United States Patent Application Publication US 2024/0301345 A1 - sequence listing, part 12

SEQ ID NO: 1840 - DNA, 9306 bp, Unknown
  MAG_14  MAG No. k141_50557
agcagaagctccacggcggcaccgtgttcaacccgaccctcgaataccttgaagtcaccctgcccttccactctccgctcatggccgacgccgtcgagcagaccgtggcctgggccggcgcctgcggcttcgaccagaagcgcacccgtgcgcttgccgaggaagtgctgctcaaccatgtggactggaacgcccgcgtcaaggcgctgttcgacgccgccgacccggccaagctgtggatcgtggaccttggtcccggcaacacgcttggcaagctgatcggcaacgtggtgcagggcaccggcatcggcgtggtcgaagccaccacgctgtccgaacgctccacgctctccacgctggaaagcgagcctgagcgcacccagaactggaaggcgttcgccccgcgcgtcatcaacaccccggccggcgccaagctggtcaccaagttctccaagctcaccggcaagccgccggtactgctgcccggcatgacccccaccaccgtggaaccggaaatcgtggccgccgcggccaacgccggctactgggccgagctcgccggcggcggccaggtgaccgccgaagtgttcgaccgccacatcgccgccctcgaagacgagctggaggaaggccgcacggtcgaattcaacgcgatgttcatggaccgttacctgtggaacctgcagttcggctcctcccgcatcgtgcccaagaagcgtgcttccggcgcgccgatcgacggcgtggtcgtctccgccggcatccccgagctggacgaagccgtggccctgatcgagtcgctgcaggcggacggtctgccgtacgtgagtttcaagcccggcaccgtggaccagattcgccaggtcgtgcgcatcgccaaggccgtgtcccccaccaccatcatggttcaggtcgagggcggtgaagccggcggccaccacagctgggaagcgctggatgacctgcttgccgccacctacgccgaagtgcgcgcctgtgacaacctcgtgctggtcgccggcggcggcatcggcacccccgaacgcgcggccgactacatttccggccagtgggcccacgcctacggcctgcccgacatgccggtcgacggcgtgcttatcggcaccgctgcgatgaccgccaaggaagcccacaccagccccgaagtcaagcagctgctcgtcaagacgcccggtattccggccgacgccaagtccgacgacgtgttcgccccgcaggccgcccactgggtgccgtccggcaagtccgtcggtggcatgtcctccggcctgagccacctgcacgccgacatttacgagctcgagaacgactccgccgaatgcggccgtctgctcgtgcgcgtcatgaagcaccccgaagagctcgactcccgccgcaaggaaatcatcgaagccctgaacaagaccgccaagccttacttcggcgacctggcctccatgacctaccttgagtgggcgcagcgcttcgccgaactcgccttcccgtgggtcgacccgacttacgccgaccgcttccagcacctgctgcagcgcatcgaagcccgtgtgaacgacacggactccggcgaattcacctccaagttgttcgccgctgatggcgtttctgctgaagaggcagctgccgctggcctgctgacccacgacgacattctcgccgacccggcccccgcgctcgaaaagctcgcactggcctacccgcagaccgccgaactcaaggtggtcccgaccgacgtggcttggttcccggtgctcgtgcgcgaataccccaagcccatgccgttcgtacccgtcatcgacaacgacctgctgcgttggtggggtcaggaccagctctggcagtccgaagaccagcgctactccgccgattccgtgcgtgccatccccggcccgatctccgttgccggcatcaccaccatcgacgagccgatcgccgacatcctcggccgcttcgaaaccgccgccatcaagcgcgtgcaggacgaacagcaagccgccgatgccgctgagaacgacgatttcgccgcacttggcgaggccaccagcgccgaagacttcatccgcaagtccccgaacatctcctgggtcggccacatcaccgacaacccggcctacggcaccgccctgggcgaccagtactacgaaatccgcgcgtttgacgccgcggccggcaagtacgatctggacatccacctcgacacctactgggacaacgacccggacggcggcacctccaagcacgccgtgcgcgatatcgtcatcccgctcatcgtggaaggcaccgagcccggccgtgtgccggtcgtggaccgcgaacgcctgattccggacgtctacgcgatgctcgccgccaccgcaggcatcggcaacaccgccatcaccggcgacaagctcaccgagatgccgcagcttgacgacaagacctctgacgagcgtccgttcggtaccgcaaccgcaacctacaccctatccgccaacctcggcttcgaccacgaagcggccactggcgccgctctgccgaccaccctgcagcccagccgcatcgcccccgatgcgctggtcggccctgcctggccggcaatctacacggcgctcggctccgtgtacgtcaagggctacccggtgattgaaggcctgctcaacgccgtccacctcgaccacctcatcgaacttgaggtgaacgaggaggacctgctcaagcacaccggcgaaaccatcaccctgaagtcttgggccgaggattacttcgagtccgcctccggccgcgtggtcaccatccacgtgacccacaccgccgccgacggcacgccgcttgcccgcgaaaccgagcgtttcgcgatccgcggccgcgtctactccgatgctttgcctgcagacgcccccgagtatggtggtgccctcctgaataaggaagcggatggctccgtcgccggacagtccactggactgtccgcctcctcgcgcggcctgcaagtagtgcaggccactccgcgccgtctgctgcgccgcgtgaaggtcgtcgccccacacgacatgaccgccttcgcccgcacttccggcgacttcaacccgatccacacctccactcgtggcgctcgcatctccggcctggccgccccgctcgtgcacggcatgtggctgtccgccaccgcccagcacgccgtgcaggcgaccgacgagaagggtgcccactacgagattgccggctggacctacaacatgtacggcatggtccagcttgacgacaccgtcgaaatctccgtcgagcgcgtcggcaaagtgcgccacggcggcatgaccctcgaagtcacctgccgtatcgacggccagctcgtctcccgcggcaccgcactggtccgtgcgccgcgcgccgccttcgtctaccccggccagggcatccagaagcagggcatggttctggacgagcgcgccaagtccgccgccgcccgcgacgtgtgggagcgcgccgacaagctcacccgctccaagctcggcttctcgatcctgggcctcgtgcgtgacaacccgaaggaactcaccgccaacggcgtgacctaccgtcaccccgaaggcctgctcaacctgacgcagttcacgcaggtggcgctcgcgacggttgcttttgcccagaccgcccgtctgcgcgaagccggcgccgacatctggcccgcctacttcgccggccactcgctcggcgaatacaacgcgttgtccgcgttcgccgacgtgattccgctggaaaccgtgctggagctcgtgttccaccgtggttccaccatgcaccacctcatcgagcgtgacgcacagggtcgctccaactaccgcatgggtgcccttcgtccgaaccagttcggtgtggacgacgcgcacgtcaaggaatatgtggaatccgtggccaaggcgtccggcgaattcctggagattgtgaactacaacctcgccggccagcagtacgccatcgccggtacgatcgccggactcaaggccctgaaggccgattccgcccgccgcgtggccgcattcggtggcaagcccgcgttcatgctggtgcccggcatcgatgtgccgttccactccacgctactgcgcaagggcgtgccggaattccgcgacaagctcgacgcgctgcttcctgcttacatcgactaccgtggccgtctggtggaccgctacattccgaacctcgtggcttcgccgttcgagatgacaaaggaattcgccgccaagatcctcgaagtcgtgccttccgagcgtatcaaggccgcactggacgacccggccgtgtgggattcctacgccgccgatgaccagaagctcggccgtctgctcttgaccgaactgctctcctggcagttcgcctccccggtgcgttggattgaaacccaggcgctgctcttcggtcagcgcgaacagggcggcctcggcgtggaagaatacgtcgaagtcggcctcggcaacgccccgaccctggccaacctcggtaccaagaccctgcgtctgcccgagttcgccggcaacgatacggtcgtctacaacgtcggccgcgatgaaggccgcgtctacatgaccgacaccgattcgctggttcccgacgacgagccggaagaggctgcggcctcggccccggtcgaaaccgctcctgccggtggttccgccgtcgccaagctcggatcgggtgctgctccggcaaatgccgcgactgaggctgctcagacaacggatggctccgtcgccggacagtccactggactgtccgactcctcgcgcggcctgcaatcagggcaggccgctgctggcgcaccgtctggttccgccgtcgccgacctgcccttcaaggcttccgatgccatcggcgtactcatggcctactccgccaaggtgcgcctcgaccagatcggcagcaacgacaccaccgacaccctgaccaacggtgtctcttctcgccgcaaccagctgctcatggacatcagctccgagctgggagtcgccagcgtggacggtgctgctgaagcgacgctcgacaagctcgcccaaatcgtcaacaaggccgccccgaactacaagccgttcggtgccgtgctctccgaggcgctgcgcgaccgcctgcgctcgctgttcggtgccgccggcgtcaaacagcagtacatccgcgaccgcgtgaccaacgtatggcagctcggcgaaggctgggtggccagcgtgctcgccgcactgctgctcgacacccgcgagggtgccagctctcgtggcggcgacctggccaagctgcccaccgccgccgtgcagaacaagccggaagccgacaagctgatcgatgcggccgttgaggtcgtcgcccagctcaagggtgttgccgtggccctgccgtccgccggtggtgccgctggtggcgctgtggtcgattccgccgcgctcgacgccttcgccgagaaggtcaccggttccaacggcgtgctcgccgccaccgcccgcttcgtgctgaacgagctcggcgtggccgctccggctccggaagaatccgaggatgagaacgccgccgtcgtggccgcggtcgaagccgaacttggctccgactggcccaagcaggtcgctccgcgcttcgacgccaacaaggccatcctcttcgatgaccggtgggcctccgcccgtgaagacctcgcccgcgcctactacggcaacgaccccgccgccttgaacggcagcttcatcggccttggcgagaccatcgccgccgaagcccaatggttcgccaacaagtcggagggcgaaaaactcaaggccgccttccagaaggccggctccgaggccctcgaacaggttgcgtccaacaagaacgcctcccgttacgcgaacgacattgccatcgtcaccggcgtgagcccgaactcgattgccgctcaggtggtcgaaggcctgctcgcaggcggtgccactgtggtggccacctcgcacagcttcaagccgtccatcaaggcttgggccaagcaggcctaccgcgagcacgccaccggcaacgccaagctgtggctggttccggccaacctctccagctaccgcgacgtcgacgctctggtcgactgggtgggccacgagcagaagaagacctccggtgccaccaccacgattctgaagcccgcgtgggagccgaccctgttcttcccgttcgccgcaccgccggtccatggcacgctcgccgactccggcgacctgttcgaatcacaggcgcgactgatgctgtggggcgtggaacgcgccatcgccggcttcagccacatcggtgccgacaccaacgtgcagcacaagctccacgtggtgctgcccggctccccgaaccgcggcgtattcggcggcgacggtgcctacggcgaagtcaagagcgcctttgacgccatcgtcaaccgtgcccgcgctgaaaaggtgtggtcgagccgcgtcaccttcgctcacccgaagatcggctgggtgcgtggcaccggcctgatgggcggtaacgacccgctggtcgccgtcgttgagcgtcacggcatccacacctactccaccgcgcagatcgcggccaagctgctcgacctgtgcactgccgaatcgcgcgagcaggccatcaaggccccgctcgatgtggacctgaccggtggcctcggctccgagcccatcgacatcaaggccctgcgtgccgaagccatggccgacgtcgagaaggaagctgctgcggcctcgtctcaggaaacggatggctccgtcgccggacagtccactggactgtccgactcctcgcgtgggcagcaaatcaaggcgctgcccaccccgatcgtcaccaagcaggcttcggtcgaccttgccgactggaccaacgtcaccgccaagccgaaagacgaaatcgtcatcgtttccgtcggtgagctgggcccgtggggctccggtcgtacgcgcacccaggccgagctcggcatccactcggatggcactgtcgacctgagcgccggcgcagtgctcgaacttgcgtggaacatgggtctgctgacttgggccgacagcccgaagcccggctggtacgacaccgacggcaacctcgtgcccgaagaggacatcgccgagcgctaccacgacgaggtcgtggcccgctccggcatccgcccgttcgaggaaggcatgggcaacgactacaaggacggtgccgacgaagaagaagccgaggtcttcctcgaccacgacgtcaccttctctgtgcccacccgcgaagtcgccgccgaatacgtcaagttggacgaggctcacaccaccatcgccccggatgaggaatccggcgaatggaacgtgacccgccacgccggctcgatgatccgcgtgccgcgccgcgccaccatgacccgcacagtcggcggccagttcccgaagggcttcgacccgacccgatggggcattcccgcctcgatggtcggcgacgtcgacaagatcgccctgtggaacatcgtcaccactgtggacgcctacctgggcgccggcttcaccccggccgaaatcctcgagtccatccacccctcgctggtggcttcgacccagggcaccggcttcggcggcatgatgtcgatgcgcaagctgtacctcgaccgcttcctcaaccacgagatcccgacagatatcctgcaggaggccctgccgaatgtggtcgcggctcacgtgatgcagtcctacatcggcggttacggcaacatgatccagcccgtctccgcctgcgccaccgcggccgtctcccttgaagagggcgtcgacaagatcgccctcggcaaggccgatttcgtggtcaccggtgcgatcgacgacatcggtgtggaatccgtgatcggcttcggcaacatgaacgccaccgccaactcggaggaaatgtacggcaagggtatcgacgcgcgcttcttcagccgtgcgaacgaccgtcgccgtggcggcttcctggaatcccagggcggcggcacgatcctcgtgacccgcggtgacatcgccgaaaagctcggcctgccggtcgcggccgtggtcggcttcatccactcctacgcggatggtgcccacacctcgatcccggctccgggcctcggtgccctggctgccggcctcggtggcaaggactccaagctcgtgcacgacctggctaagctcggcgtctcagccgacgacatcgccgtggtctccaagcacgacacgtccaccaacgccaacgacccgaacgaatccgagctgcacaacacgctggcccacgccatcggccgtaccgacggcaacccgctgttcgtgatctcgcagaagacgcttaccggccacgccaagggtggtgcctgcatcttccaggtcaacggtctgacgcagctgttcaagtccggcgtgattccggcgaacgcggcgctcgactgcgtggatccgaagctccagcgcgacgatcacatggtctgggttaggaagcccctgcgcatcggcggtggcgaggacgagttcggtcgcgagaccgctggtcgcccggtcaaggccggtctggccacctcgctcggcttcggacatgtttccggcttcgtggccctggttcatccgggtgccttcgaagcggccgtggccaaggccgatggcgaggccgcgctggaagcctggcgtgagcgtgccaacgcccgcctggccgccggccagcgtcacctcgaggaaggcatgatgggtcgcgccgcgctctacgagccgatcgacaaccgtcgcttccgcgaggatcaccgtggctacgaccaccacgaggtcgaaaaggcgatgctcctcaacccggacgtccgcctcggtgccgacggctactacgaggcctgattcctctggctcccctcggttgatgggagccagtagcgcaccggatctcggctcccctctttgaggggagctcccgcgaagcgggtgaggggagtttcccctggagctttctcgctggcacaaactcagtgagagaaatatgcagaacatacgaaagcccctccttcaaaggaggggctttctgcgttcaaagaggtacatttgcctgattgcggaatactatctgctttcaaaggggtatcgaaactctgacatcgcgagtatgagcgttgatattccaacgaccatactcgcagttttgcagtctaggtactcctttgaaagcagatagcattccgcaagaccccgaatgtacctctttgaacgcagatagatgtctggggcgctgatcacgcccctcgactgagatatgggttatgttttagcgggtgctgcgcagctcgtggacggtgat

SEQ ID NO: 1841 - DNA, 4548 bp, Unknown
  MAG_14  MAG No. k141_50909
cagctcgtccatcgaagcgtacaggtgctggtgctcgggcaccacccacgcctcggccacggcaaagcgcggcgggttgtactcgttgaacaccttgcgccattcgcggtagatatcgtgcacctcgcgacggtcgaacagcgggtggctgaagtcatgattcagcacgccgaccacgctgtattcgcggccgagctcttccaacggcttggattcgaggtccttggccaggccgtgcgccacgtcgatgcggaagccgtcggtgccgtggtcggaccagaaacgcagggtcttcttgaactcctcgtggatgtccggattcttccagttgacgtccggctgcgccttatcgaacaggtgcagataccactggccgtcggccacgcgcgcccaggccgggccgccgaagaaggattgccagtcgttcgggggcagttcgccatgctcgccgcggccgtcgcggaagatgtagcggtcgcgcgccggggagccgggctcggcggcgagggcctcctggaagaacacgtgcttgtcggcggtgtgattgggcacgatgtccacgattaccttgatgccggcctcatgcgcggccttggccatcgcgtcgaagtcttccatggtgcctaggcgcgggtcgacgttgcggtagtcgattacgtcgtagccgccgtccgccagatcggaggggtagaacggggagagccagattgcgtccacgccgaggctcttcagggagtccatcttctcggtgacgccggcgatgtcgccgatgccgtcgccgttaacgtccttgaagctgcgcgggtagatctggtaaacgacggcctgcttccaccagtcgtcattgaggttatttgcggtcatgccgattccctcctgttccgggtgcgttgtggttgggttgttccggtcgcgcccgaactgctgtgtgaaggcccaaccgttgtattgatgatgacaacgatatcatgtgaattacgcatgcaaaaatcgatttatcggcgttttgcggtggtaacgtgctcacgcctgcgcgggcgctgctgtcgcggcaggcggcgcggtggtttcgcgcagtattagcggagtgtccggccgtacgaatgccggttcgattgacttgccggcaatggcatccaataccatgtgcccggcagtcgcgcccattgcgaacgggtcctgatgcagcgtggtcagtcccacggcggcggacagggtggaatcgtcgaagccgatgatggaaatgtcctgaggtacccgccgcccgtattgacgcaggcgatacagcacgggcgcggccatttcatcatcctcaaaacagaaggcggtgatgctgggggaggcgttcagtacggcgttcaatgccgcgttgctttcgccaagaccgcgttgaatgctcaggggcgttagctcgatccccggatgggcggcagcggcatcaatgacgccctgcaaacgagcctcggcactgtagcgcatattggtttcggtcggtgcgctgccgacgaacgcgatatgccggtggccgagtgcaatcaggtgctcgatagccgaacgtgtggcggcgtaatcatcaatgctcacgcctgcgtcgaacccatcggtggaggggatgttgatgccgacaatcggcacgtgcatatgcttcagtcgctccacttcagccggttcgatgtcgaaggagctgacaatcaccgcatccgcattgcgccgcacgggcaaatccgcaaagaagtcgtggcgctcggcggcgttgcgcatggggtagggcacagtgtcgtagccggaggggcgcagcgccgagtcaagaccggcgaagatgttcgaattgaaccaactggcgatggtctcgctggcaagtagtgcgatacggaacgattggccggattttagggcggcggccgagcgtgagactgagtagtcgagcttttcggccgcggccatcactcggtctcgagtctcgggaagcaccagatccggcttggcgaaggtccgggacaccgtggatacggaaacgccggcctcgcgggccactgcctgaatgcttgccttggtcatatgccgtcgctcctttaccgtcgcgaacaatcattgtcatgacaacgataacatgcccataacaagtcgtcgtcttcggctatctcgattacgaggggctgatttagggtgtcccggacatctacttccgtttcaaggggctccttgccggtgaaaccacaagtgcaaacgactttgtgccaacgtcattccgccgttctcgcgctgggtctacttgggcgccagccccttgaagcggaagtggatgtccgggaaaggccaaatcagcccctcgaagccgatttagaccaatttcccattgcggaatcgatcaccgcttctctcggcgcatcacggcggctagggactgcacgcgtggcaggtcgaagacctcgtcggtatgcaccacgtggcctgagctgtccgccagcggcacgcgccagttcgaatattctctggaagtgcccggctgattctgggagcggcattcgcccacgccgtccaccagcgctgcctgcagcagcagcgacggcgtatcggtgagcatggcgtgcatcgcttccacgatctcctgcacatggccttccacatcatccgccacggtctgtgagatatagccgttctccaccagacggttcatcatggccgtgcgttcggccatcgccgaggcggcgaacgcctccaccggctcgctcaggagatgcagctcctcgcgcagcttgacgtgttcgaagttcaggtagccggcggtgggtggcagatcgtgcgtggtcaccgaggccaatgcctgcttgcggtagtcctcgggtgcgcggtacgggtcgccggcgttcggcgaatcgtccacgcggttgaaccattccacgtcagtgccgagcacgccgtgatcggacagaatgcggcgcacgtaatccggtacggtgcccagatcctcgccaaccaccatgcctccggcgcgcgtggcctcgatggccagtactcccagcatcgcctcgtggttgtacgtcacgtatgcgccgttgagggcgccgagcccctgcggaatccaccacaggcggaacaggcccagcacatggtcgatgcgcaccgcgcccgcgtgctcgtacatcgaatgcaccatctcgcggtacacctggtagccggtggcctccagatagcgtgggctgaacggcggctggccccaatcctggccctgctggttatagaagtccggcgggcagccgaccgtgacgccgccggaggcgaagcgttccggattggcccaggcatccgcgccgagcccgtgcacgcccacggccatgtcttgcatcagacccagtgtcatgccgtggtccagcgcctcctgctgcgcggcgttcacctgctcggcggcaatccactgcagccagcggttgaactcgaacaggtcgtggtgctcctcgacgagctggcgcacggccgggtcgtcgatggtcttctcgaagaaccaacggttctcgccccacggcgcgccccatacctcgaagcacaggcaccaggtggcgaaggaatcgaggtctgggccggcggtggtcttgaaatgctcgaattcgagctcgcgcttgttgttgcggcccgcgtcgaagatcagacgcagcgccgggcgtttggccgcccacgccgcgttgatgtccatcgggttcgattcgtcgttgcgtgcggccaccgaatcatgcagcgcatccacctgcgctcggatatcggccggcagcgtgccgtattcggggatgtcctgcgggcggatgtacgtcacgttgaggaatcggcgcgattccggtagatacggcgatggctcaagcggcggaatcggcgcgccggcgtgaatcgggttgatgagcatgaagtcggccttggacttgtcggccgcgtccgccagcagcagcttcagatcgccgtaatcgccgatgccccacgattcgcgagaccgcacggaatacatctgcgtcatccagccccaccgctggtgctcggcgaccgcctccggcacgggaatgcgcgcgggggcggcgatgatggccgccttgccctcgcgcccgtccaccgtgacggtcagtgtgtggtagcccatcggcaaatcgggggcgatggtcaagtccggcttgccggaattgaggtgcggcagcagggcaaagtggccaaacgcggtgccgtcctccagttcgatggagacggtgatgtccgcgtccgacgggcaattcagggtcaggcttgtcggcttgccggtggtggccacgatggtgggtggtagcaaacgtttgctgttttcggcctcaagttcggtcatggaacgttttatggcctcgtcgctggaggcgtccacatcgagggccttgagcacggcgaccaaggcctcgtcgctgatttcggtgtaggtgccgagctggtcgatgaacgaggtggaaagcccgcatgctttggccagcttgaccagcggacgggcgagtcgttccgcgctttccgcgcgctgcggggcaccggaagcggcgtcgttgg

SEQ ID NO: 1842 - DNA, 5636 bp, Unknown
  MAG_14  MAG No. k141_50940
ccgttctggttgttctgcttattctggctgttaccgttggaatcggagctggacgaaccgttcaccgacgactcctcctgatcgagcgtcacgtccacatccatggtcttgccgtcgcgcacgatggtcagcgtcaccttgtctcccaaagccgcggcacgaacgtaaccaagcagcgagtagttgttgttcaccgcgttgccgttgaaggccacgatggtgtcgccctccttgaggccggccttgtcggccgggccgccggagacgaccgcgctgccggtggcgctggacttggtgatggtcgcgccgccgcgggtcacgccgtcggcttcaaccgtgtcggacttgatgaccacgccgagggcaacgtgcttgaccttgccgtccttgatgatttcgtcggccacacgcttgacgaggttggacgggatggcgaagccgatgccgatcgaacccgcggagtcggatgaggtagcggtcgaggcgatggacgagttgatgccgatcacctggccggccgcgttgaaggtcgggccgccggagttgccggggttgatggccgcgtcgatctggacggcgttggtgacgatctcgttgttgttatcgtcggtcacggtcaccgggcggttcagggcggagacgatgccggtggtggcggtgtcgtcgtagccgagcgggttgccgatggccatcacgttctcgccgacggcgagcttgtcggaatcggcgaatttcacggccttgaggtcgctcggcgggttgtcgagcttgatgaccgcaagatcggtggtggtgtcggtgccgacgagcgtggcggaatacatgttgccgttggcaagcgtcacctgaatctgctgggcaccggagatcacgtggttgttggtgatgatgtggccttcggtgtcgatgatggcgccggagcccttggcggtgccgttgctcaacgcggtctggatggagaccacggagccggagacatcgctggcgacggtctgccagtcgggggcttcgccgctcttggcggtggcggacccggagccggacttattcgagctgacgttggacagcgaattgctggtcggcaaggtgatcaggccgctggtgagggcgccgtaaccgaggcccaggcagagggccgcagccagaacggcggcgaccacggcgatgaggatgttgctcgccgtcttggacatgccctgcttggcggggccgggctgaccgggctgtcccggctgggccgggccttgaccgttcggcgtaccggtaccgggagtgccgaaaccgaacagaccgccctgctggggctgctggccattccggccattctgaccggactggctggcaaacgggttgccgttgttctgctgcggctgcgtgggcggattgaacggattgccgttgccctgcggctgcgggttattggtgtagtagggattgcggttgccctgctggccctgtggggtttgctgtgcaggctggccgaacgggaattgctgcgtgggctgggcattgctgccggcctggccgccctgctggccctgtgcctgagtcggggtcggaccataagcgccatattccggggccggacgatacagcggagttgtggccgaggtctggcctgcggccggtgctgccggagaagccggcgaggaggagaccaccgtgctctcgcccttggcggaggcgtagtccgggatgggctcggtggcggcagtgtcggtagcggcttgcgtaggctgctgatcggcagcgagggcggccgaggaaaccggggcttgctgctcgctggaatcgctggcgttgccggcatcaaccgagtcgccacccacaaacgggttcttcggctcggcgttgccggtatcggcagtactattggggttttcgttattccgcggggtctggtcgacgccctgcgggttaaattcgtcagccattgctgctccttttcctaaattcctatcacgtctgttcggcggctattcgggcacttgcccattgccacttctcgtgtgctacctcagtagtaaaggcagtcaatctggaggttttctgaacgttgattgaaagtctatgcgtaatcatcgcagagtcttatgggcatctcggcttcgaggggctgatttcctgtttcgggaacatctacttgcacttcaaggggctgttcgcgcggtcaattccgagtatcaagggccctcatttaacgccattccgccatttttgcagccggcctacttgaccgggagccccttgaagcggaagtagacgttcgggagcggcgaaatccgcccctcgaaaccgagttcttcacaatttccggcccttttctggcccttctgcctaaagtgaacatatgacgatcagccttcttgaacatccgttgggcgcacagcccggacagcccggcgaccgcagcgccttccatttcgaaacgatcacccgcctgccatccacggccagcgggcttgggcgagacggtgcccgatacggccgcaccggcatcattcacacgccccacggcgatattcgcacgcctgccttcgtgccggtgggcacgcaagccgcgatgaaggccgtgttgcccgagcagatgaaggatctaggcgcacagtgcctgctggccaacgccttccacctgttcgagcgcccgggcgaggacgtgctggacgcggccggcggcttggcgcgtttcatgaactgggatgggcccacgttcaccgattctggcggtttccaagtgatgtcgctgggcgtcggtttcaagaagacgctggcaatggacgtgaccggcatgaagtcggacgacatcatcgccaagggcaaggagcgcatggcctgggtggatgaggacggcgtgacgttcaagtcgcctttgaatggtgacgcacatcgtttctccgctgagatttcgatgggcatccagcacaaaatcggcgcagacatcatgttcgcgttcgacgaactcaccacgctgatgaacacccgctcctaccaggaggactcggtggagcgcaccttccgctgggcccgccgatgcgtggacgagcaccagcggctgacggctgagcggctgggcaagccctatcaggcgctgtatggcgtggtgcagggcgcgaattacgaggatctacgccggcgcgcggcctcgcagatcgcctcgctggacttcgacggcgtgggaatcggcggcgcaatcgagaagcgcatcattggagacacctgcgcgtggatctgcgacgcgatgccggagaaccgcccgcgccatgtgctgggcatcgcctccgtggacgatatcttcgcgtgcgtggagaacggcggcgacaccttcgactgcgtggcccccgcgcgctgcgcccgcaacggcgcgatctacacgcgcgccggccggtacaacatcaagcgcgcccagcataagttcgatttcgggccgctggaggagggatgcgactgctacacatgccagcattattcgcgcgcgtacgtcgaccacctgctgcgcgcccgcgagttcaacgggtttacgttggccacgatccataacgagcatttcttcgtgaagctgctagacgacatccgcgcctcgatcgacggcggatactttgatgagttccgcgacgaagcgttggcccacttctacggcaacggcgagcgccggccagggttgtgagtttttctccttcgttgcggcttgtgccgaacttctctctgctcccctcgctgaggctgagacgttaagcaaacagcccagtgggctgtttgtagtcgaaggtgagacgatagtcgaaccagcaggttgcaggcaaggcccgtccttaattgcggacgagctgtcacgaagtgactgaggggagtgccgccaccctcaaagatcacggcgcccgcaggagacccacaagcgatatatccctgcctcccatgcgacacgccgaagattgcatgattacccagccgggtgtaagttagtcgattgtctgcgagtgtggcggaatggtagacgcgctgtcttcaggtggcagtgagtgtatgctcgtgggggttcaactccccccactcgcaccagcaactaaagggctggaatcggaaggttccagcccttttgctttatccgggcaagcgccgtttttcaggggggggctttaggacttaaggcttatggcccaactttcgtggcggaaaatgtcccggtacctgcatcaatcgcttgacgttcaagccaggccagaatccgctgtcccggttcgcgatttcgggcgatctttgcaaaccgggacaatttttgttgccccggtataaatgtcaatcgatttatgcgaaaaccgggacaacgtgccaattccagaatcggccttattccgccgattccgtctgccagacgatatgagttgaggaaaccggagtgtcccggttcacgaaaacaagccgaaatcgccgaccgggacagcggattctgccccggtcgacaggtcaaacgattgacatatgaaccgggacaaatacagatcagagagaagcccatgaagcagatttaactttcctcaactttccatccgccataaactagcattacataacatcatgaaccgagacgaaaccaacgaagtatctggagtcaccgacgaccagctcggccgaacggccgagccgtacgaatccggcaactggcggggcggcgtcgggagcatcattcgcagcaatccgaaatcaggaaccgacacaagtcggacccagcagacacgcataatacgagttcacagactcggcgatgtattccgcaaccgcaccaccgaataccgcaccacggaagaactgtaagcattacgaaatcaaccttgattattgcgcgggcctatactaggttacggtagcgtaggttagtggtcgggagagcgtcgccggccatagcgaggtgatcagtatgagcgtttccatcagcacgccatctggacgaaccatggcttccgccgcaacagttgcgccttccgcaaccgcgagtcaaaaatccagcgcaagcgccaaccccaccgcactggaccgtgcatcggcccgatacagggccgcgcaatcgcgctaccgccaagccaaggccgcactgaaggcgatcaagcgccagatcgtccccgtggacgcattcggcatacgcaagccccgccttcgcggatggctgcacctcgccaccctgccgctgtgcatcgcggcgtccatcgtgcttatttgtatcgcgccggccggtcccgtcaaggcggcctgcgcagtgtacggcgcctcggccatgctgctgttcggcaacagcgcgctgctgcacgtcgtgccatggcgcagcgcgaaggtgactcgcgtgctgtgcggcatcgattattcgaacatcttcctcatcatcgccggcaccaacacacccgtgctgttcgcgctcagcccggcgattcgccggccatatctcacggtgatttggacgaccacggcgattggcacgatactgcatatcgtctggctgcggacgccgaactgggtgttcaccactgtgtatgttgtgctgggattggcgccggtgacgcttattccgcagctatggacggctcccgcagtgggtccggctgcgaccatactcatcgcatgcggaggcgccgcgtacatcgccggcg

SEQ ID NO: 1843 - DNA, 7077 bp, Unknown
  MAG_14  MAG No. k141_51026
ccccggcggcccatgccacgggatgccaccgcaccggcattccggctgcggcaccgggcatgcagcgtcacggccgcatgccgcgaggcatcacagcttcgcggcgaaccagcgcgtgatcgtcgtcggatgcgtgatcgcggtgcccaccacggcggcccacgcgccgcattccatcacgcggtgcagctggtcgggcgtgtggatgcgcccctcgcacagcaccggcatgtccgggaacgccttgaccatccgctcgagcagttcgaagtccgggccgtcggtcttgagacgctcaccggtgtagccggacagcgtggtggagatgatgtcggtgccggcctcgaccgcacgctcggcgtcggcgaaactgccgcagtcggccatcgtgatcacgccctcgtcgtgcagtgcgtgcacggtgtcggcgtagctcagaccgtccgggcgaggcctgccggtggcgtcgatcgccacgatgtcggcgcccgcggccgcgcagcaacgggcgtggcgcagcgtcggggtgatgtagacgccctcgtcgccctccttccagatgccgatcaccggcaccttcacctgccccttgatggcagcgatgtcggcaagtccctgacagcggatgcccaccgcgccaccctccaccgcggccatggccatttgggccatcgtctcggggtggcgcagcggctcgcccggatacgcctggcagctgacgacaagcccgcccctgatcttttcgattacctgatgcatgatgcgcttcctttcctcatgccttgacattgcttcatatgggtgttgacgattgcgcgacgaattgccggagagcgccggctcggggtcctcccgaggggagtcccagcccggcggcggatcacgggcggccctgcgcgacatgcctgcgcacggccaccgcggcgccgatcagcggagcggcgccgcccagttcgccctccaccagcggcgcggacctgaccagctgcaatgcggaatcctcgaatcccgcgcgcagggcgttccaccacagggggccggccttgaccaccgacccggaaacgacgatgacgtccgggtcgatgagattgcccatgccgccgatgcactcgcccagcgcacgggcgctgtcctcgatcacgccgacggccaggggctccccagcggccgcgcgcgccgcaacctgggagccgtccgccaccggttcgccctcttcggcatcgcaacgggcgttgtagaggtctttcaacccggttcccgacgcgaccggctcgatatgcccttcgcgggtgccgcacgagcacaggaatccgcggcccagcgcgctcggcacgtgccccgcgtggccggccacgccgtgcgcgccggtgaacagggcgccatccaccacgatcgcgccgccgatgccggtgcccacgccgatcgagagcaccacgcccctgccgcgtccggcgccgtacgtcgcctcgcccagaccgtgcgcgcccacgtcgccgatcatgtgcaccggcaggtcggtcacggccgcgaacgcgtcgtagatgcgctggccgcgccagccgggcaggatgtccgtggcggagacgatctcgccggtttcactgtccggcacgcctgccgccgcgaggccgacgccggcgatcgccacgccctcggcctcggcgcgctcaagctggcggacggcgaaggcgacgatgcggttcttcaggtcctcgccgccgcgcgcggcctcggtcgggatttcgcagcgggccgtcacctcgggcctgccgtccgcgcccgcgtttgcgtttgcgcttgcgggcaacgtcacgaatcccgaggcgactttggtgccgccgatgtcgaaggcgaggtaggtgggcgccgcccccgcgctcatgcgacgaccgcctcgtggatgcgcgcgagatagtcgaggcgctcctcgaccgtcgcggccttgggcacgcacaccttggcgcccagatagtcgagcgggcgctcctgcgtcccggcggcgcgcacggcggccttgatggcggcggcgtccatgagcgaggtcggctcgtccgggttcatgggcaggtggccgtcgatccagccgtagccgtactgggtctcctccgggccggcgccggagaacatgaggccgctcagtacgccggccttcgcggcggcctccacgtgcgccacggcggtttcgggtgtgcgcccctccaccaccgagcgtccccagttgacggtgagcccgatgccggccgacccgcacagcgcgatctcgtcctcaatcggcaggaagcccttttccggcttctgcccctcgacgtacttgtcgcagtgctcgatgaccagcttggcgccggaccagtccagctgcgcgagggcctgcaacgaggcggtcatcgcgtcgcggctggcaatgcgcgtgggcgccgtgtggatttcgacgaacttgacgtcctggctgccccgccactgtgcaaagtcggcgagcgcgtcgcgcagctgcttgaagaacgccagagcgaaccggcgtccgtcctcgtccgggctggccagtccgaagttcgggtccttccatacgtgctgcatggtgcccggaatggcagtgaccgtattgttcttccaatgcctgggcagttggccggcaagccagatgcggtcggcggtttcggcaaggtcccccgggaaggggatctcggtgccgtcgatccagggctgaccgcccagcagatcgtaataggcttcctgggcttcgcgcccctgcggcaatgacgcgtacgcgccgacgacgaatgatggcatcgctttcctccttgaaatgcccgatgcgggttcgctgagcattcctatcgtactatcatcagacatctgatatctaatctgttaaaggcagattacttcggcgtgtcttctctcggcctgccgaccttagcatcatgcattcgcttactatgcttgcccccctggaggggaaccagaaattatcaacaaatagtgacatgggatgctaaccgcggccagccggtgaaatggcatgcgcttatacggtttcaccggctggcgcccgctacggcggagttttcgtatggccctgtacgatttcaccggctgacgggcacccagccggagtttccgtatacggtcatacgatttcaccgtcttagccgcagccagccggtgaaatcgtatgtggactccgtgcggcaacaagtcagcgggcaagcggcacggccccgacaagccgcgcaatccgctcactaacggaacagcgagacgcccctgcgggccatgcagaatgcgttgccaagccacgtgtgcttggaattcggccacaccgcaccgagcctcggggcgttctggctcagccagatgctgggcacgcggccgtcggcgctgcgcgagcccagcaggttgaacccgtttttctcctgaagccagcccggatgctgcgtggcgatggccagtccctcctcgagcgtgagcggaatgcgctcgtcggagtcaatgagcttgcgggccacgtcgggctcgcggtttgtgtgtacttggtaccggtgcgcggttccacgacgatgtagaacggtccctcgggcggctcgaagccgtcctgcggcaaaaagctcgcgatgtcgcgcggcggcatcgtggcgaaaccggccatgcggttgatcgacgtacgggaaatcagcgattcgggcgacaccagctcgcgcgtgggcgccagcaggatgcgctcgtcaaaatcggtatgctccagcgcctcgatcagcggacgggccagggagcggaatgccgcggcgctcacatccgccacgtccgggtaccccaatgccacgatgcggtccaactggcgctgcgcttctaccgacgccttcgacatgactcccagtgtagagcatcgcggcggggcggcgccgtgacgttccagccggttccggcgtcccgtcgcaccggcgatccggcccagcatacgggcacccggttcttcttgttccgcccgattcgtaagattgatggatacgtgtggccatttcgctacggctgcccgaacgtgaaatcaatccgtcaaacccagaaggttgttatgtccgaaaagttgaaagtcggcattctcggcgccaccggtatggtcggtcagcgttttatcacgctgcttgagaatcacccgtggttcgaggtggtcacccttgccgcttccgcgcacagcgccggcaagacgtatgccgaggcggtcggagaccgttggaagatggaaaccccgatgcccgaatacgtcaagaacatggtggtcgtcgatggcgacgatgccgagtccgtggcctctggcgttgatttcatgttctctgcggtaaacatgccgaaggaccagattcgcgccattgaagagcgttatgccaagaccgagaccccggtggtctccaacaacagcgctcaccgttggaccccggacgtgccgatggtggtgccggagatcaacccggagcacttcgaggtgatcgagcaccagcgcaagcgcctgggcaccactcgtggtttcatcgccgtcaagccgaactgctcgattcaggcctacacgccggcactggccgcatggaaggaattcgagccgcgtgaggtggttgtgagcacctatcaggcgatttccggcgcaggcaagaccttcaaggattggcctgagatggtgggcaacatcatcccgttcatctctggtgaagaagcgaagtccgagaaggaaccgctcaaggtgttcggccatgtggacgccgaaaagggcgagatcgtgccgttcgacggcgacctcaagatcacttcgcaatgcatccgcgtgcccgtgctcaacggtcacaccgccaccgtgttcctgaacttcggcaagaaggccaccaaggaagagcttatcgaccgtctggtgaactacacgtccaaggcttccgagctggagctgccgcacgcgccgaagcacttcatccagtacctcaccgaggatgaccgcccgcaggtcaagctcgacgtggactacgagggtggcatgggcgtttccatcggccgtctgcgtgaggattccatcttcgattggaagttcgtgggtctggcccacaacaccctgcgtggtgcagccggcggcgccctcgaatgcgccgaaatgctcaaggctctaggctacatcactaagaagtagttgaatctcgttaaaatcgcaaaagccctccgcaaggagggctttcatcgtattaggcgcggaattcgcggctcagcggccagtaccgccgtacaccacggcttcgatctgatcggcatcgagaccgtatgcagtgtgcagcgccttgacggcgtcgttgagctgatcgagcggcacgagtgcggcgatacggatctcggaagtggagatcatcagcacgttgatgccctcatcgctcagggcctggaagaacttggcagccagaccggcgtgggtcttcatgccaacacccaccacggctaccttgccgacgttggtgttcacatcaaaggagtggtaacccagcacttcctgcttgtcgagcagcgtgttctgcacctgcttgacggccgattcgggcacggtgaaggagatgtctgcagtgccaacggatgcgccggcctgcacgatcatgtccacgttcacgtcggcggtggccagctcggtgaacaccttggctgccatacccggctcgttcggcacgccacgcacggtggccagcgcctcggaacgatcgtgggcaatgccggaaatcaccggtgcctcggggcccaggtcagggaacaggtcgcccatggatttcgcttcttcttcagtcatgtcttgccttgtcttggttgaaattacttacgattattgttcgctgtagccgcgctcagtcgaggttcggcagcgtgcgcgggtcaatgccgtcaggcacaaccagcgtgccggggcgacgggagaacgaagagcgcacatgcagcggcatgttgaaacgctgagcgtactctacgcagcgcagtgccagcaccttggagccgcaggaggccatttccagaatggcttcgtagccgatggaaggaatacggcgggcggaaggcacgatgcgcggatcggcggtaaagatgccgtccacgtcggtgtaaatctcgcagatgtcggcaccaagggccacagcgagtgccacggcggacgtgtccgaaccaccgcggccgagcgtggtggcgtcacccttggcgttgatgccctggaagccggcaacgatggcgatgtctcccaatgagagcgcgttcttcacgcggtccggtctcacggccttgatgtgggccgcgccgtaacgggtgtcggtgaagaagccggcctgctgaccggtgaaggagtgggcgcggctgccttcggcgtgaatggccatggccagcaggctcatggaaattcgctcgcctgcagtcatcagcatatccatctcgcgctcgggcgggttggagtcgatgctcagcgcctgatcgataaggtcatcggtggtatcgcccatggcggagaccaccacggccaccttattgcccttcttctccgtctccacaacgcgcttggccacacgtttgatcgaatcggtatcggcgaccgacgagccgccgtacttctgcacgatgagagccactgctgtcctttgttcttctcttagggatttgtttggtcgatattctacgcaaacgcaacgattataagggctgtcgcgttcaccccgcgaccccgcgccggcatgcggacacgggtatggcctacgttgttcagcaaatattcaagttttcaccggtggttctttgagacagccgcatccatcctttgagattcgagcggttaactatcaattaccggcaaacgaaagcaaaccggcgaggtttccgcagaaccccataactgaataccttcttcttcctctctccttttcaaggcccggtcccgctctattgtggaagttggaccatccctattagggaagttggacactagattacgaactagactttttcggacttcttatacccctacattgcccctatatggcccctatatggccctcgtcggcatgttgcatgaaaggcttggtgcgg

SEQ ID NO: 1844 - DNA, 16209 bp, Unknown
  MAG_14  MAG No. k141_51145
agcgggtgacgcctccggcgttgatcatcggggcgtagacgaactggacaaaggggttgcgggccgcgccgaacctatagggccatccgcttccacttgcggatcttcgtcctgaacgatccgaacggggcgacggtgttcacatgaatgaacctgtacacttcccataccgccgttttggtggcgtcgtcggcccattgcctcatatgcggcttgaacagctcgtcctcgctcatcgcatcgatcatcatatatatggcgtcgacgttgtcggtcaacatgccctccagctcccgcagcgaaaggtgggcgtaggtgtcgttgaaccaccggtacagctttccgagctggttccacttgaactcatccgacggcgttcgcaccggaaggcccctccgctcgcgatcctcccactgcagcagcagggtggtccaaccgacctgataggcgaggttttccgccggggtcctctcgacctcgtcgatgcgcttgtctttcagggcttccggaatatcgtcgaactccgcaatgtatttgcggaacgccgcactgatctcctctttgagctcctgcgcgttctcgtatgttctcaccatgcacctcccggtcgccgtgcgtcgctgtgacgatgcgggcatcgtatcagtccggcggatgtcgtgacgtcatcggcgtgtcgtacccgttcgacatgcaaaaaggcctccgtgctggacggaggccttgagaaatcgtgtgggcctcggttacttcaccgaggccttttcgatcagcgtgcagtggatcttcgccggaatcggcgcgtcgatcggcggcaggggagcggtggtcgctggccgtgagacgtcgtccatcgagcgtccttcgataattgacaccagcttggccacggcccagtagcccatctcgaaatgcggcagttccacagtggtgagcatcggttccagcgtttcggcgaacacgcgatggttgtccacgccgatcacggagatgtccttgccgaccgtgagtcctcggcgtgcggcgcattcgtacacataccaggcgcgggcatcgttgaagcagaagaatccgtccggatgctcggcgtcgaacaaatcgctgactgcggtcagtgccggcccgttattgagcacattgacgaccagacgatcgtcatagtcgaggcaggcgtccctgagcgccgcctgatagccttccaaacgaccatcctgcgcaatcatcggttccgagcaacccacataggcgatacgtgcgcatccggccttaaccaatctggtggtggcgtcgtagccgatttggaactcgtccggttccacgctcgggattttgccaagcgagtcggtggcatccaccaacaccagtggcgtcttggccagcgaagaaggcgcatgggtgatgcggttcgacatcttggcgtacaggaaaccgtcggtgccgtatcgcttgagtgcggcgatttcctcgctctctctgttctcaccgtcggtgctcacggtgatgagcatatagccgaactggcttgcggcggtctgcgcgcccagaatcataccgccggcgtacggggtggtggccacctcctcactgatgaaaccgaggatgtgcgtcttgcctgtacgcagcgaactggccagcggattcgaccggtagccgagcttggtggcgatggcgcgcacattgtccgcaatttcggactttacgcgcccctcgtcgcgtccgttgagcaccagcgacaccgtagagacggaaacccccgccttgttcgcgatttccttcatcgtagccatgcgtcaaacgatacaccctaattgacggactgtcgggaaagtatcagtgttctccaccgactccgccgaggttgcgcaccgcaccgatgaataatggtatgccgtccggggtgacgtacgaatacaggaatgggcgatccaccgtgaactcgatgttgtccaccggcgcgctagtgaagtctgcgccggctttggtgaaggacatggccttggcgccggcctcgttcacctcgatgcgcgtgccttgcagaatcgaaccgatatacagattctcgccgtgcgaatcggtgtcgaccatcttggtgaagtcggcgtcgcctgcactgaacgcatcggtcacccccagtttttcgaatgccttgatggtggcttccgagtcgaacatgctgtcgacggtgaatcgtggcagcgagacgttcaccgtggccgagttgacggagacgccccatccgggcagactgtccgcggtgcaacccattgcgtcctcgccaggggatgccgacgaacacgtgccgaacgcccatccgagtttctcggcattgccggccagctcgtcgaaatgccctttggccggcagcacgatggccagattgccgctgttgtcgaatggaatctccacccgctgccaagtgttgtactcatcatggctgtaagtcatttggctgaaggtccggtgcatcatcggcacctgagcatctccggcttcgccgtggaaggtgccgtcgccggtggactgctcttcgaacggatccttccagcggccatccgcatagacggtgttgatgatggacaggacttcacggtcacgcagcgtgatcttcggcttgagcgaaccattcgtatgcttggcaatccaatcggacatcttggcggcggcctgatcgtcgaacggtagcgtggtgacttcggcctcgaatatcttcttgacggtggattggtaatcgctggcaagggagtagtcgttatcgatccacagcgagttcgcggcgctcatctcggatttcgcccccgaatattgcccgttgatcgaactcagcagcgattggtagtcgctgtcggccagcgaaccggagcccagcagctcattcagttgcgagcgggtcgtgccattggcgccctgcgcggcgatggccaacgccatccacatcgaagcaggggagtagttcacattaccggtgtctcggtcgccggctcccatcgccaggaattccggtgcggtgcggtaggcgaaggctgcggtgctgtcgactaccggctgtgtggcaggcgtggccttcggcttgaacatattgcgaaccagtgcgctgccatcgccggccgtccaccatacgccgccggcgacggcaaggacaagcactactgtcacgatggcggcgatacaagcgttacggcgtttgcgttgtttgcgcaaccggtactgttccatcagtttctcgctcatggtcagcccctttgcttggatcggctcgtgcatcattgcacgaagcccctgattccagtatattttggtctctcttattttgtgcgacgagccacaatccaccgcacggcccacaccacgccgaatccgaggaagctcgccacggcgaacacgatgacgaaatgcaagacctgatccatcgagccccaggagaggtatcggtcgccgatcagcgtgcaggtacttcctatcgggcacgtgtcttcatacaccgtgatgagcgccatgagcatcggcgcaggtaccagtgtgcacgccaacgggaacagcaggcttttccacggatacgtcagtgaggccgggcgtagcgcgtagatgccgttgatgaccagcaaggcgggcggaatcacaaaattgattagcaacgcggcggccatcgcagccatgccgccccgtaaggtcagcgccaatagcaagccgtacatgattgccgtcgccagccagcagccgaagcgaatcgcatcctgacgaatccatgtgagcagtcgtccgctcgccgtctgcggattcggatccacaaacaattcgcgcagaccgtagcgtccgattgcatagcagatgaacgcaacggccgtataacagatcaacagcatggccgagccgatcaacgaatgaaccaatagctgatggccgctttcagcgtgcattagcttccaccactgagcccaggaacggtatgggaaccccggccgtaagcgaagattggtacagccgaatgccagcggtccgatgattgcgctcgccaatgggaaagacagactgccggatcgtatcgaaccgagtatcaggttggtgattcccaacaccaatggccagtgcagaaccataccggggaaccatacgaacaggtttttggcagccctgtcaaggacctcgtcgggcatgagatacattgatgagctccactgcagcagcaacaacaccgctatcagtacaaccatgccaatccaatgcgcgcggttccacgcgaatattcgttgcgtcccgcgctcggcggcggcattgcgcatatcgctcctgttgagcttgctgagtgcttgtgcacggttcattgcagtcctcctttaccgccttgtcaaggattgatgatgattccatcgtaaatcgcgcaggaaatgtggaatgatagttgtcatagtgaccatgacatgtcaggacggagcagttcggcgtcgggcacactgaaggggtgaatgtaatgggagaagcgcgcaaccgcaacatacgcatcggcattgtggacaatgacccgtatgcgctgaaagtgttcggcgcgctaatcgagcgcatgtccagcgattttgccgtgatatggacctgcgatttgggtgccgtggccatcagccgatgcctgagccccaccaagcggcctgacgtgctggttacggatatgtctatgggcgacgtgcccggtaccgaagtctgtcgtgcgattcgtaccaaaacacccgaggttgggctggtgggtgtcacctcatacgcgctcgcgtcatttcacgacgaggcggctcgctgcggggcgcaggccttggttggtaaaaccgatttgaacggcattgcgctcgctattcgcaatgcagcccaaggattgtcgaccaatgagctggtactgggagatgaggggagcggtaattcgctgtccttcatggatgccgcaaccgcctacgcggtgctcgaagatacgtcatacgcgcaccgtggcgcgctttccggcaaagaacgcgacaccctgcgtatgtatgcggatgggtcgaccaccaaggaaatcgccgagcgattgggcatcagcgtggccactgtggcgacttttgaacgccgcgcactcgccaaactcggcgctcgcagtcgcgctcatgccatatcaatctgcgtgaaacggcatgagatttaagagttggcatgggcggtatgtgcaacggcatggatggtaggaaaggaactgctatgaaagcgttacgacaccgattggccgagctggatagcggtgttcgcaatgcatggctgttgattgccatactggttgttgccttgatatgcacgatggaaaccatggcgggcttggctgctgacagtgtctcggcggcggactgccttgcggagttcatattcgttgccattgtggggtggatggcgtttcgtccggtcaccggatgcgtggcggtagcggtggcttggatagtgttgtgcatgagtccgatctggatgccgtcgggtgcaatgctcgccgtgttattggcggtgggtattgccggatacgccgataagcgattggcgctggcggttgccggcattgccgttgtggtgtggatgttgtcgcgtggtggcgtggccattccttggcttgatggcggctcagacacgatgagcggttctgcggatggcgcggcgagtagtagtgccctagacggtagtgttgctgatggtggctcttcatccagtgggtctgacagcgcagggcagtcgggaagcgacttcaccggaagcgcctatgaatcgagcggttcttctgccgagcatcgcactgggcaagtgattcttggtgcgattgccctctatggtgtgatgccagtggccgtgttgtttattggcttcatgcttggtggcatggcggcgcgatggaatcacgaacgcagcttggttcgagcggagttggctcaccgccgtcagcaggaacgcacagctcaggacattcacgattacgtatccaatgatttggcatacctgattttgcgattcgacaaggatattgccgatggcaagaccccttctgaagaagaattacgcgaactgcgtagcgtggctatgggcgcattggatcgcacgcatcaggtcattgatgttattgaaggcaggggagaagcggcgcacagtgcagtgactccgcatgattcgaccgttgatgccgcttctggcattgcatgtggcatcacagacgctgattgcccgctagccgagcaaattcgtgatgttgcgagcaatggtgaccgccgattatcagagcttggctttgaaggtcagacgattatttccggtgctcatggcgcagccggtcggagtggcctgatcgccgggctgctggaggaactgtacggcaacatcgccaaacatgccgacccggaagcgggctatgtaatgacgattggcatcggactggacaccgtccgcatcgcctgcatcgacacggcccgcacgtcatcggattcggatgcggatggcagtgcggacctatccaccggtaccggtctcaaccgttaccgacaattactagaacaacaaaacggcgccctgcatatcaccacgcaagacgccgaatggacattatcagcagttattccactgtgaggaaaccgatcacccaaccgacttctgcgcagtctccgcgccaaagaagccgacaatcagcatcgatgcaatagcaatcgcgctgatggccacaaagatggacgtggcaccaagcgaggtaagcatccaacccaccaccataggcatcaacacattgagcagcttggccacggcgttcgcgaagccgacgcaacggaagcgaaccttggtggcgaacagttccggagcgtacacagccaccacggaagccataagcacgtacaggcacatcatgagcaggaagccaacgataattgcgctcacggtagaggtctggaaggcatacattaaaccgaacacgccagtgaacaggaaggccggcacaatcgtgcgcttgcggccgatgcggtcgataagcagagagccaatcaggcagccgaccggggcaccgagcatcatcgccgtggaggtgagcagcgagctggacaggttaataccacgcttgaccagaatcgtcggaacccaagaagtgaaggcgtaggagcacacgttcgtggcggccacagcaaccacagctacaagcaggcagatgccgagcgaacggccgccggcgttgcgggtgtcgctggtgtcggccttggcggctgcgtcgatcagttcggagccgttggcctcaagctgcttgacgatggcgtcggcctcatcgtaacggccgtgcacggcgagccaacgcggggattcggggatgtcgcggcgcagccaccagatgatggcggcccccagaccgatggccacgaacagcggacgccaggaccagcgggggatgatccatgcacacagcagcatagcgatcggcacaccgcagttggccacgagcgagacaatcgcgcaccagtggccacggcggttcatcggtgcgaactcgttgaccatggcgaagccggtgacgatttcagcgccgaggcccaggccggcacccagacggcacagggacagcacggccatgttcggggcgaatgcgccgaggaaggtgaagccgccaaacagcagcaggttgatttggtaagccacgcggcggcccttcaggtcaccgacgaagccggccagcagcgaaccgaccagcagacccaggaagcctgcggacataaaggtggaattttgcgcaacggtggaccagtgtgtggccaacgcgctggaggcaacggcgctgccaatatatacgtcgatgctgtccatcagcatgccagcggcgaccagcgccacgatgcgatggaacatcggggtttcatgtgcgcgatccacgcgcgagataatatcctgaaccttggcttgatccgtcacggtggtacgtgcttgtgcgctttccatagccgcgggattgccggaaatctgctgttcagcagcagtcatatttgagccctcttcttgcaaacctgcccgcgtgcaactgctcaatgatgttgcggcgagcgaactcttgattggactgcgtgttccgttcgccctcccattgtgtgggatgaacgacgtttgcagtccaagtcttgaattccacgtagcgagccaatcgttgtgagatagctcactacatggggcttaactataggttcgatcttgtggcacgccgcgttgcggtcacattgtgaacgataacagagtttgtaacgctcctatatatgccccacttacgctcttaccccgttgaaagaaggcaaaaccgtgattcccatggggcggtaaaacactcatggggcggtatttggcccatggggcggttagcggattttgcctttccgcagaatagagccgttttcgcctaccgccccatgagggttttaccgccccatgagatatttaccgccctatgggtgagttaccgccccatgaaacgtgtaataacaaagcatgcccttgctggtggaagcgatgctttgctatttcgcctgcttgtcggcgaggatctcatccaccagcttgggcttttcggtcagctggccggtgaagccgggacggatatccatgtgcagcaccagagaagtgcggtagccctgctcggcgagcttcttggcggcctcaccggccaccttgagcacgtcgtccagattgccttccacgttggtgaacagggcgttggtttcctgcggcagggcggattcgcgaatcacttcgacggcctgagccacgtatggtgaaacctcggagcccacgccattggccgacacctggatggctgccacggtgttgaggtacggtttgccggtttccgggtcgatcggcacttcctgagtaacggcattacggtcaagaaccatgattctcctttttcagtagtgttaagctcccctggcaaggggagcttaacaaccacacttatgtcagcgatacttccagaaatgatccatcgggccggagccgtggccgagattcagctgggtcttcagcgcaccggtcaggtacttcttcgcatgcttgatggctttgggcagcgtgtcgccaagcgccagatacgaggcgatggcggagctcagcgtgcatccggtgccgtgcgtgttcggattattgatacgcgcgccatcaaaccaggtcacggttccatccgtctcggcaagcacatcgttggcatcctcggtgccatgaccacccttgaccagcgcggcacagccgtaacgctccacgatgcggtgggcggcggcctccatatcctcctgatcgcgaatcagcgtatcggtcagtacttcggcctcgggaatgttcggagtcacgaccgtagccatcgggaacagcttgccggtcaaggccgcaatggcatcgtcactgatgagcttggcaccggaagtggccaccataaccgggtcgagcacgatgttcgtggcgtgatggaaggtgagtcgttcagcaatgacgtcgatgatgtcagtggcagacaccatgccgattttcaccgcgaccggcggaatatcctcaaacaccatgttgatctggtcggcgagaatgtccggtttggtatcctgaatggaacgcacgccggtggtgttctgtgcggtgagcgcggtgatggcgctcatgccgaacacgccgcaagccagcatggtcttcagatcggcctgcatgccggcaccgccggacgagtcggagccggagatcgcgagaacagcgggcagtgtagatgttgcaatttgtgccatagtgttcattctaagtggggcccatgatgtttttcggagcggttttccttgatgttttgccgctcctgtggtgagatgggagggtttgctgattgcgattgattcatgaaatgttcgggaggggacatggctgataacgatgtactgcgccgtgacggcgtcttggtgcgcatcactggttttgacgatgaacgcaccgcatattttggcgtaatgcctaatgggcacaccacacagctcacatttccgcgtcaggaggtgttcgatgtgggcgacgtgttgctcgtcggcacggatttctatcgtaaagtgccgcatgatgtgtggccgttgaagccccgtgtgggcatcgtgcgccgtgcgctcaacgaaggcgtggtcctggagacttccgacggcctcgaactgcttgaaggcgattacccgaattcgatcatgcccggcaacaccgtgcagttcaccgacctgttcggcatcgaacgagtgctgtggcccacggccatccgcccaggcgaatccgatcacgatgacgacatcaagcagtaccgcatcacgccgggcagcgatccgtcgcttaccttcgattcgttcggcggttatgagcaggtgatcacgcgcgccaaggagcttatcgaaacgcagctgggcaacagtgcgcagatgcgtgcgatcggtgccaagcccatcaagggcgtgatcttcaccggtgctccgggcaccggcaaaacgcatctggcccgcatcatcgccaatgtggcggacgcgcagttctatctggtgtccggcccgaccatcgtgagcaagtatgtgggcgatagtgaggaaacgctgcgcatgattttcgccgccgcgcaggcggacaagcgcgccatcatcttctttgatgagatcgattcgattgcgtcctcgcgcgagaacgataccaatggcgtcggcaagcgcttggtggcgcagttgctgacgttgatggatggtttcgagtccaagggcaatgttgtggtggtcgctgcgaccaatcgtattgaggacgtggatcccgctttgttgcgtccgggccgtttcgactggcagattcctttcccgatgccgtctgagcgcgaccgtttgggcattctgcaggtgcaggcccgttcgttgtcaatcgagggcgaactgccgttggtggatatcgcacagcggaccgaaggctggagcggcgccgaagtgtgcgccatctggaccgaggccgctctggtggccgccaaggaccgccgcggcgcgatccgtgctgccgacctcgtcaccgccttcgagcgagtcgagcgtcgtcccgaattaagacaccaccgggcataataattggctcccctcagagaggggagccagagaggtttactcctgggcggtggagtagagcttgccgccttgggcggtgtacttttcgctcatcgcatccatgccggcgaggatttcttcggggctgagcacgttggcggacaccacgtcgttatcgacattggccttggccttagccagtgcctcggagtcgatgccagcagcagcctccttcacgatttgctgctgagcggcctcgccaccgaatgccttgcggatgttctgggagatggccatcgagcagaacttcgggccgcacatcgagcagaagtgcgccatcttggccggctcggcgggcagggtgtcatcgtggaaggcgatggcggtgtccggatcgtaggacagattgaactggtcgagccaacggaactcgaagcgagccttggaaatcgcattgtcacgatccatcgcgtgcgggtggtgcttggcgatgtctgcggcgtggcaggcgatcttgtaggcgatcacgccctgcttcacatcatccttgttcggcaggccgaggtgttccttcggggtcacgtagcacagcatagcggtgccgtaacgaccgatctcggtggcgccgatggcggaggtgatgtggtcgtaacccggagcggtatcggtggtcagcggtccgagggtgtagaacggggcgcccttgcacacggccttctccagctcgatgttcatacgcacggtgtcgaacggcacgtggcccgggccctcgatcatcacctgcacgtccttggcccaggcgcgctcggtcagctcgcccagagtcatgagctcggaaagctgcgcggcgtcgttcgcgtcggccagggagccggggcgcaggccatcgcccagagagaacgccacgtcgtacttggcgaagatgtcgcacagctcgtcgaagtgcgtgtacaggaagctctcctggtggtggcgcaggcaccagtcggccatgatggagccaccgcgggagacgatgccggtcacgcggttggcggtcagcggcacgtaacgcagcagcacaccggcgtggatggtcatgtaatccacaccctgctcgcactgttcgatcacggtgtcgcggaacagctcccagctcagcttggaggcatcatcctcgaccttttcgagggcctggtacatcggcacggtgccgatcggcacgggggagttgcgaagaatccactcacgggtggtgtggatgtcgttaccggtggacaggtccatcacggtatcggcgccccacttggtggcccacgtcagcttctccacttcctcgtcgatggaggaggtgacggccgagttgcccatgttggcgttgagcttggtcaggaaggcggatccgataatcatcggctcggcctcggggtggttgatgttgcagggcatcaccgcgcggccggcggccagctcggagcgcacgagctccacatcacagttctctcgggtggccacgtactgcatctccggggtgatgatgccgtggcgggcgtaccacatctgggtgatcgggtggtccttggcgcgcatcggctcatgcgtgcgtccacgccattccttggtggcgcggccgcgcttgatggcgcgcttaccatcatcctcaaggttgcggcggcggccctcgtagtcttcgatgtcgccgcggtcgcggatccagtcgagacgcaggggcttcagaccttccttcgggtcgcacttggggccttcggtgttgtagtcgtggaacggcgggttcgggcccacgccgggcgtgtcgctcagcttgatttcggtgtacggcacttccaggtcgtaggaaccatactgataggtgaacggtacggacttggtcttgcggatgtgcgccttgtcgcgctgcttggaaccacgggcggcgatgtccacgcgctgctgcttggcgagcttctgggcatccttggcgtccttggcgttggtgaacttcttctcagtggcctcggagccaggctttgcggccccttcctgagcagcctgagtatcagcagcgggggtgtgggctacgacgcgcggcgcgtagccgtgcttcttgtcgccgcggacggccttccagccttcgaccatggtgcgcgcggcctcttccgggttctcggcacccgcgatggcggagaccgcgaaccagccggcggccttggtgccggcgagcatggccatatcggctgcggtcacgccgccgcccacgaccaccgggaattcgctggcagcgcagatggtgttgatctgggcggcgtccagtgtcttgccggagccgtcgttgccgcccacggaagcctcgggcttggtggtggagacgtgcagagggccggcgccaatgtagtcgatgcagccgtcgggcagctcgttgatgagctgaacgaggctttcggtctcagccgacagacccacgatggcctcgtcgccgagcagggcgcgggcttctcgcggctccatgtcggtctggccgatatgcacaccgtccaccttgatgcccttgcggcgggcctgccacaccacgtcggcacggtcgtcgatcacaaaggccacggaatcggacttctcattgtcctcgatgatctgcgcgatgtcgcgggccatgtcggtcagctcggaagcgtcggccttcttggcacgcagctggatgaaggtcgcgccgccgcgcagggcctgatccaccacgtcggtcagcggacggcctttgcagtcctccggccccaccacgaagtacgcggacaagtcgaagttgtctcgcatggaggcgtatgggtattcattactcattattattcctacctttgttgtttcttgtggaagtcttattgggaaaaactgttatgagctccctcatcagagggaactgaaactactgcaccaaaatctcggattccgccacctgttcggcggtaacattccacagcgcgtcaaggaacgcgacctggaacgagcccggcccgtgcgaagtcgtatcggctatctctgccgcgcggttgtacagcagagatgcggacagagcggcggtcaacggatcggaaaccgccagatatgtggcagccacgccgcccagcgagcagcctgcaccgatgatcttggtcatcatcgcgctgccgcccggcagtcggtacacggtttcgccgtcggtcaccagatcggcgatgccggacacagccactgcacagcgggtggaagcgtcatgggaggaatgcttggcgtgctgttcggtcagatactgtgccagcgccaccgccgcaccggttgcggactccacgtcgtcgacggattccactccggcggggcggtgctcggaagcgtcccccacggtttcggtattgagcccccacatgttcgccagcgcgattacctcggaggcgttcgcgcgaatcatggtcgggggagcggccttgaaggtctgaagaatggcggtgcgggtgtggccgatgccggcggccaccgggtcgagcacccacggcttgtccaagtagttgagtcgctgggcgatttcgggcagcgcatccttatagaacggcagcagcgtgcccacgttgatgtagttcgcgcccgcgattttcgcggtttcgatcacgtcgtccggcaggaaactcatggccgcagtgccgccggccgccagttgcgcgttggcaaccaaattgatggtcacaaaattggtgaatgactgggccaacggagtcgtctcgcgtacgcggcgaacggcatcggcgatattgtcgcggatgggtgaatcggctggaaccggagtcccggcggtacaaccgctggacacaccggtaaacgatgatgcactattgctcatttactgctccctacgatggtcttaaccaacaggttctaagggtcaggctcaggcctttctcaactcgcgaaccacatgcgagtccccctgcactacagtgccgacgctatgcgccaacatggacattatcgtgacggatttgttcgatacgtgtcgtcaggtctggcgcgtcccgtccattcgtgatatgtggacgcctccgccgagcaacatctcccgaatttgtgacgctgacgcgatgtcagtggtacaaattggggaagggcaaaacaacaggaacaatatggaggtgtttgcgatataggaatcgctgcgaacggccgctcgtgagacgcggaacatataccggacaatgccgcctgacctgtcaccatatacggctatcctgaagcggttgttattagaccccaaaccgttcaaaccagaaggtgcattgtggctcagtccaaactcgatgaagtcgtatcccttgcgaagcgtcgcggcttcgtgttccccgccggcgaaatttacggcggcacccgttccgcttgggattacggccccctcggcgtcgctctcaaggacaatatcaagcgtgaatggtggcgctccatggtcgtcacccgtcctgatgtcgtcggtgtcgacacctccatcattctgccgcccgaagtgtgggtggcgtccggccacgtgagcgtgttcaacgatccgctcgtcgagtgcctcaactgccacaagcgcaaccgcgccgacaagctcgaggaatcctacgccgagaagcacggcgacaagatgccggaaaacggcatgaaggacatcgtctgcccgaactgcggcacccgtggacagtggaccgaaccgcgcgactttaacatgatgctgcgcacccacctcggcccggtcgaggacgagaacagcctgcactacctgcgtccggagactgcacagggcatcttcgtcgacttcaagaacgtgatgacctcctcccgttccaagccgccgttcggcatcgccaacatgggtaagtccttccgtaacgagatcaccccgggcaacttcatcttccgcacccgtgagttcgagcagatggagatggagttcttcgtcaagcccggcaccgatgaggaatggcaccagtactggatcgacgcccgcacccgctggtacctcgacctcggcgtcaagccagagaacctgcgccactacgagcacccgacggagaagctctcccactactccaagcgcaccgtggacatcgaatacaagttcggcttccaaggttccgactggggcgagctc

SEQ ID NO: 1845 - DNA, 3631 bp, Unknown
  MAG_14  MAG No. k141_51571
caacgcgcggtaacatcgatgcgctaagactggtgcacatacgccaatcacgctaggaggaaacgcatggccaaaatcatggtcgagggaaaggtcgtcgagctcgacggcgacgagatgacccgcgtcatctggaaggacatcaaggatcgcctgatcctgccgtacctcgacgtgaacctcgactactacgatctgggcatcgagcaccgcgacgagaccgatgaccaggtgaccatcgacgccgcccacgccatccagaagcaccatgtcggcgtcaagtgcgccaccatcacccccgatgaggcccgagtcaaggaattcggtctcaagaagatgtggaagtcccccaacggcaccatccgcaacatcctgggcggcacgatcttccgcgagccgattgtgatgagcaacgtgcctcgtctggtacccggctggaccaagccgatcgtcgtggcccgtcacgcattcggcgaccagtacaaggccaccgatttcaaggttccgggcgccggccagctgaccgtcaccttcactccggacgatggctccgagccgattcagcacgtggtctacaactacggcgaagacggcggcgtggcccaggtgcagtacaacgtcaacgattcgatccgcggtttcgctcgtgcctgcttcaactacggcctgatgcgtcattacccggtgtacctgtccaccaagaacacgattttgaaggcctacgacggccaattcaaggacatcttcgctgaggtgttcgagaccgaatacaaggacaagtacgccgaggccggcctgacttacgagcaccgcctgatcgacgacatggtggccagctccctgaagtggcacggcggttacatctgggcctgcaagaactacgatggcgatgtgcagtccgactccgtggcccagggcttcggttcgctgggcctcatgacctccgtgctcatgaccccggacggccagaccgtcgaggccgaagcggcgcacggcaccgtgacccgtcactaccgccgctggaagaagggcgagaagacctccaccaacccgatcgcctccatcttcgcgtggaccggcggcctcaagcaccgcgccgatctggacggcacgcccgaagtccgtcacttcgccgagacgctggaaaaggtcatcgtcgacaccgttgaaggtggtcagatgaccaaggatctggccatgctcatcggcccggacgaaccgtggctcgacaccgacggcttcatgaacgcgctggacgagaacctggccaaggctctggccgagtaaatcatcgaacacatcgtgcggacctacatgggtcatgtcatgtcgccaactgtcatgattgtcgtgcttcatctggaatgttcctcagcacgacaatcatgacagttgttcgatacacgcgcgaaatacccctaattgttcccggatatgtggcgatttgtccactggtccgggactttttcgtatacggcctactagaatcgtgattcagtttgttttcacgcccgcttgaggaggtttcgccgcttatggtgttcgcacgccgctcaaccaccctgctcgccgccattgtcgcatcctgcgcgatggtgctgtcactgaccgcgtgcacctcagacaataagaccgttgtagatggtcaaaccacggtgacgtccaattctgccggcggcgtggccgtgttcacgccttcggacggcattacgctgaatcagcagacgccactgaacaaatgggcgaagctggtgcccgacctaaccaaggccctggtcgacgccggtttcaagaaaggcgatatcgatcatacgacgtccgactcgttggacaagcaaagccgcgccatccaagactttgtggtcgatcatctttcgaataacaccacggacgattccggcattgccatcgcgcccgacaacatgacattgctcgtggctccagtagtcgaggccgacgcttccactcgccaatacggcgattacgtcagccagaacctgagcaccaacgatgccacggatgagggagctacttctgacggtgattcttccgaagacagctcttccaaagatgactcgtccaacactgagagcgacggcactgcatcggacgagcaggcgcaggccgtggaccggctggtctcatcgctcaagctggccaaggaatccggcatgcatgtggtattgctcggcaacagcatcgaggggtataggccggacgccttcgtcaagttctcggacgcccagaccatcggcaagctacaggcggaaaagatggtgtccaaactcaagttggataaggccagtaaagacaaccccaaatacattgaggtgctgctgccatacaccgccgtggacgaaaaaggcaacgccaacgattccacgttcgcccaagaggcgttccgtggtatctggcaggtactgggctcctactatcagaagggcgttgtggaaagcccttcaggcaccttggacggcaaatccacggaaaacgattggcaagccgtggcctacgatgccgccaaggaaggctccactgcgaaagtgcttgacaagcgtctggcaaaaaccgacgggcagtccacactcacccgtattgacggcatcatcacgatgaacgactatatcgcctccgaggtcgtcaaggaattggacgatctgggatacaccggctctgccgccgatatcaatccgcagatcaccatctcgggcattgtcggcaatatcaccggcaagaaggatctcagccgcgacgcagtgccggacccgatcaaatcccctgaaaacgacaacgcaaacgactcatccagttccgatgacgatgcggataaggacacctccgcttccgacaaggaccgtgactcgcaatggcctctggtgaccggatacggcgcgtacgtctcgaacatcccatccatcgtcaatggcaagcaatggatgaccggcatggaagacagacagaccatcgccacggatatcgctcaggcctgcgccaggctcaacaagaacgaagcgctgaattccatgccttcaatcaggaactccgaggtaggcggcgtgaagaagatcccgaccatcaacgaaccgttgctggctgtcagcgccagcaatctcaagtccgcgctgatcgcccccggatatatctccttggccgatgccggtctgtgattcatactcgtcacgccgctagccgcctgcgatgcctcttccgtacggccctgttccggccgacaaacattgctgaatcatgacggcttcagtacgatttttcgactccccgcatattgctgtgggtcaagatagtcggccgttcctcgcttgaggccccaatgcaggcaacggtcttcgcaatggtccgagttgccctcaacgatgcctacgggctgtctgcgggagatcgtatcccccaccgagagctcggtaacagccggttcgaatgttgacgtgacacctccacgatgccgtagactcaccacatctttgccagctactttgccagcaaaactcacggtccctgcctgtggtgacagaattacggtaccttgctccgcaacaagatccacgccacgatgacctggtgcccacgggttgatcggccgctcgaactgttgttcgacctgtggatcgtcgac

SEQ ID NO: 1846 - DNA, 32463 bp, Unknown
  MAG_14  MAG No. k141_51779
accatacttgaaaatatgacgcgtgggccctgacgacctctcaaagaacggcatgacaccaccatacgaccagcatcgccgcgtacacaatacacatcacacgcggccggcaagaaaaccgcacaactcctgcgccaccggtagcatctgcgactccaaaccggggttcatgaaacggtcgtagatattccacctatcgcacagggacacccacagatacgcccgccccgaagcaacaatcacattggagtgcaacggatgagcggacaatacctgcaacacattctgcggcggccccaccaactgtggccgaaccgcatgccccaacaaatcgcttaccgagcaccacgcataccccctgcgaacgagccggcacaggcaacaccaccacctgcatataccgcatggcgtaattactcaaaaagccattattgtcatacacattcagcgtgaacgtcagccacggtcccttgctgtagaacctgttcacccgcatattacgcacggcttcgccacgaagcaccaccgtgcttccagcatcgacggtccgtttggcctgccaatcacgcgcatggaccgaatacgtgaccgaagaaactccgggagccggctcataacggatctcaaccagcacaggaaccccgaaaccacggaaaaagcccaacacatcatcgcaatgcaaacgcacgccaccacgaacgacgcgatgacgccgttgcgataccaataccgccacgtcggccacatgcgctgcctgacacggaccatacgccagccgagcaacgaaccagccaccacgaacacgcaccagacaacaatgccgtaccggaaaaccctacccacccagaaaggaaaaccagatttatcagcattcagcagccacagcacgccgacgaacaccacggcctccagcatgtaccacggccaatccaactgccgacgaacaaccgcaccggcaacagcatccacacgatcccacatcatcaaccttctctcatcaaaaaccgcttcgtaaggcaaccatacagtcagcagtacggacaacaagccggctatcacacgtaccagcacagctcctgtgccacacaagcagcatctgcgactccagcgccaggggccatgtaccgcgaatcattgtcgcacacattgatcggcgtccacaggcaagccaggccattcgtcaccttcatgctgtcatgatttccgtggaaggccggggtgagcgctgcagaagcgcagacgatggccagtggggtctgttcgtccgtccgccatggacagtggccggccgaatacagcctcatgcctgtgggacggcacgcggatttggccggtttccgcgcggcgtcccgcaggaacgtgggatggtagagaaatcaatcgtttgacgttcgtggcgttccacactatcaaccgccagaaccgcgcaatcacgccaatccccgttacggaccataatcatcccccgggctctctgcgggacggcagacgaaaaaccgcgaaatccgcgcgtcgtcccgcacttcgcccggtccacgaacaggacaagcatcaccgatagaccgaacacacatctacagccgcgacaagaaccccaacagctagccgcccgccccggatatcgccgtccaatagtaaatcgagcccaaaacgcaaacccaaagcactgactcagataataaaactcggattttccaccacagacagcgagaaactctcccctataccaagtagcgtacatgccaccttgctcgatagacgaacaatgagaagtatcggttaacgggcatgccgggcaggtcgatgggctctggcgcgggaacgaagacggcgtaccagcacgaatgggccggcaaacgtgatcgtatacaacacgacggcgaggaacacgctgagccatgcggtgaacatgcccaacggcatctcctctaccggagtggtctcggctatgcatgcaacgatctatcactccgatattgtggtcagtatgcgcggcagttgttcgtcacggttgaggaaagaacgcgtttggcaacgaagtagcgtacgccggccttcctcagtgcgggtgtataccatggtgcaatgcgtcaggcagcggtccaactgccggcgcagtatttcggcgtcctgctggcggcgggcaaatatggacgggcatgggaagcttacaccgtacgtgcgcacgccccattccttgccgatgatgacatatcgcggattgttgatgggcgcgagtagctccttcataacgccggcgaacagcacctgctcgcgccgcgaaccaccaatcagcatggcacgcaacgccgtgaatctgcgacgtgtctggcggatcgaggaagtcactcacctctttgcctaccgcgttggtttctaggcgctcaggttccgcagtcgccaaatgccagacattggccaccttatcggggtctgcggccacgctgcggttggcggccatgctgtatgcttcactgcatcagtgtaaggcatgaatcaataggttttgagccccagatcgatggtgagaatgatgccggcgattacggcggcggcgcgcatgatgtttgcgggaatcttgcgggtgatgggcggggcgatgtacccgccgatgaagcagccgatgcacagcatgatggcggccggccaatcgaccgcgccttggatgatgaataccactgaggcgctgatgttcgcgcctgtgccgatcagggttttcaatgcattgatcttgtggaatgggccgattttggcggcatcaagcatggcgagagccagggtgccggcgcccgcgccgaagtagccggagtagatggcgactgccaccacgcccagccatacccaccaggaatcctggctcatgggctgcacgagttgttccggcgggcggtgaggtgcggtaggggtggttgcgcgcttggcggcatcagtggcatcggtggcttcagtggcttcgatgtgcttgagttgcgcggtggcatccgcggcggcctgcttggcctgcatgcggccgcgcggattgatggcgatgatcagcgagctcagcaaaatcagcactggtgcggcgaattcaaagacactcgggtcgagtttgagcaacagaaacgcaccggccaccccgccgaacgcgccaatgaccacatacgtaatggagcgtaccgcttggcctttgagttctttgcgcgcgcccatcacgccaccgatgcccgtgccgaccacgccaacggtgttagaagcgtttgccaatacaggcggaatgccgaacgcgagcaaggccgggtatgagaccagtgacgatgcgcctaccgcatagcccacgaatcctgcgccgattccggccaacagaatcagtagtaatgaagttatggaaaagcccgcaatcattccccgtatccttgtcgctcatcgaccggcacattgccggccttgagcgagaatacgctgttgaggattggttgcgggttttatgttggaatgtggacgtagctcctcgcggaagcgattccctcagtcgcctgaggcgacaactcccctcgcacccgaggggagccagaaggaaatcagagcgcttcgttgtattcgcgaaccttgagggtgcggtgggaggatgccacgttttcgacgatcagacgcttcagggcgttgtcggcggcaatgtgctcgtccagccaggcgtcaccgagcttgaccagcgtggcgggatcggcgtaacccgggtacaggccgttgagcagggcctcggccatgtggtaggtcttgttcgcccagatccagtcgacggcctcgaaataccgggcggcgaacggctcggccaggtcgtggcgcggggtggcggagaagccacgggccacggcttcgagctgggagttggtcagctcgtcgttgtggagtgcctgatcccaagcccattccttggcttgcgtcgtggccatggaggcgcgggcgccgtaggcgaactcgcggttttccgtggtctccttcttggcgagctgcgcgtccacgtcgtcgttggtcatctcgttgacggaggtgagcgcttggacgatggtccacgtgaagttgttgtcgatttcgaggccttcaagacgcacggtgccgtccagcagaccgtgtgcgttggcggcgaatgcggcatcgccctcctcgccatagcccaggtaggcggtggcgagctggaactgggtgtccgagccggcttcggcggcgttggccagggtccacagctcggcggccacgtggcgcagcacatcgtcgcggcgggctggcgccacgtagtggtgggcggtggtgctcatgcaggccagcgcgtaacggaaggtggtggattcggtttccgtggccagaagacgcagggtcatgtccacgaagcgttcggccgggaattcgccgtcacgggtcatatcccagaaggcgagccaggtcacggcgcgggccagggcatcgtcgaaacgatgcaggttggcttcggcgaatgcctgggattcggcgtcgaaacgaatcttggtgtaggtcaggtcatcgtcgttgaccagcacgaatgccgggcgcggcttgcctgccgcggcctcgacgatggtggtttcgccatccacgtcgagttcgaactgctcggtgcgcacgatcttgccggtttcggcgtcttcgttgtagaagccgacggccaggcgatgcggacgcagcaccgggtgttcggccggcgcgctctgggtgagcttcaattcggcgatggtgccgtccgcgtttacggtcaggccggtggcgatcgtgttgatgccggattcctccagccacttggcgctccaggccttgagatcgcggccggaggtcttctccagttcgctcagcaggtcggccagggtggcgttggagtaggcgtggcggttcaggtagttgtggataccttcgaagaactgcgtgcggcccacgtagaatgccagctgcttcagcacggaggcgcccttggcgtaggtgatgccgtcgaagttgacgtaggtgtcgttgaggtcgttgatcggggcgacgatcgggtgcgtggtgggcagctgatcctggcgcaacgcccagctcttctcaccggagcagaaggtggcccaggcgtcatgccattcggtggcttcggcagtggccagcgtggaggtgaattcggcgaaggactcgttgagccacaggtcgttccaccacctcatggtcacatagtcgccgaaccacatgtgggccagctcgtgcagcacggtcaccacgcggcgctcggccagcgcgtcggtcaccttggactcgaacacgtaggagtcacggatggtgaccatgccgatgttctccatagcgcccgcgttgtattcgggaacgtagatctggtcgaacttggcgtacgggtagggcacgccccaggtcttggcgtagaacgcgaagcccttcttggtgatgtcgaacaggtagtcgacgtccttcgcgaaggccttggccaacgactgtcggcagtactgggccatcggcacggtgcgaccgtcttcgttcaggtattcggtgtgccattcggcgtacgggccggcgcagatggcggtcaggtaggagctcatcaccggggtcggctcgaagtcccacagacgggtgctttcgttcggcttgtcgccgagggtgccgtcgagggtttcgcgcggatcgtcctcgatggtggcaaccggcatgttggaggtgacgatccagctggcgggagcgagcaccttgaaatcgaaggtggccttcaggtcaggctggtcgaacacggcgtagacgcggcgcgcgtccggcacctcgaactgggagtacaggtagatgttgccatcggacgggtcgaccgagcggtgcaggccctcgccggtgttggagtaacggcacttggcttcgacggtgacctcgttcttctccttgaggtcggtcagttcgatgcggttgtcctggaaggccacggctgggtccagggacttgccgttgaggtcgatggatgtcacttcgtcggcaatcaggtcgaggaaggtcgacgaaccaggcttcgcgttgaagcagatgagcgacttggaaccgaagttcttcgcgccgaccgtcaggtcaaggtcgacgtgatagtgaatcggcgcttcgataacggccttacgttcttcggcttcaatacgagtgagattagaaccgggcatgacttcaattactccttacggtcgtccctggataatccggactacttggtttctacggtttcgacgtcctgagcgatgtcggccacgacgggcacgatcatcggcttgcggtgcagctggcgcgcaacccagctgccgagcgtgcggcgcatggtctgctgcagcttgtaggtgtcacgcgcgccctgcatcatctggtcgttgagctgttcgacgatctggtgacgcaccttgtcgaactcgctttcgtcctcggccacggcgttcaggtagatcttcgggccggtgacgacctcgtggttgtcggtgtcgaccaccacgaacgcggatacgaagccctcggtgccgagaatgcggcgcttttccagctcgtcatcggtcagctcgccgacggaatcgccatcgacgtacacgtaaccgcacggcacggagccgacgaccgcggccttgccgtgatacaggtcgaccacgtcgccgtcttcggccaagaccacgttctgcgggtccacgccggtcttgacggcgatcaggccgttggccaccaggtgacggttctcgccgtggatcggcatggcgcacttgggcttgacgatgttgtacatgtacagcagctcgccctcgttgcagtggccggacacatgcacggcggcgttgtcgcggttgacgaccttggcgccgagctgcacgagcttgttgatcaccttgtagacgccgtgctcattgcctggaatcagggagctggcgagaatcacggtgtcgaactcgttgatgtggatgtcgcggtggttgccgtcggcgatgcggccgagtgcggccatcggttcgccctgggaaccggtgcacatgaagacgagcttgtcgtcctgaatgtcgttggcctgcttcaggtccacgacggtgccttcggggatgtgcaggtagccgaggtcggcggcgatggacatgttgcgcaccatcgaacggccgacgaacacgaccttgcggccgtacttgtgggcggcgtccaccacctgctgcacacggtgcacgtgggaggagaagctggcgacgatgatcttgcgggtggcctgggcgaacgcttggtcaagggccgggccgatggaggtctcgggcttgacgaagccgggcacctcggcgttggtggagtccatcatcagcaggtccacgcccttttcgccgatcttgccgaattcgacgaggtcggtgatgcggtggtcgagcggcagctggtcgagcttgatatcgcccgtgtcgatcagggagccggccggggtcttgacgtagacggccagggcgtccgggatggagtgggtgacgttgacgaattcgaggtcgaaggggcccaccttgagcttctcacggccggcaacctcaaccttggtggggttctggtggtgttccttgcacttggcgtccacgaaggcgagggtcagcttggagccgatcagcgggatgtccggacgcagcttgagcaggtagggcacgccgccgatgtggtcctcgtggccgtgggtgagcaccagggcgtcgaccttgtcgagacggttcttgatgtagctgaaatcgggcaggatgagatccacgcccggctgctcctcctcggggaagagcacgccgcagtcgatgagcagcaggtgaccgttgtattcgatcacgttcatgttgcggccgatttcgcccaagccgccgagcggcgtgatgcgcatggagcccttgcggtacttcggcggggcgatcagcacggcatcctgctggggtgcggtggcctgccgggtggcgttgatcttacgggacggcgtacggctgttggatccgttggcgttgcggccgcgcgcggaaccgcgacggcgagaattcgtgttcttgcttgttttcttttgttcttgtgccataacctttttgggatttctgttgtggtgcctctgctctgtcatgcaggggcggcgggctggcaacccgtatgcagcgtttcgggcttacagcagtccggcagcgcgcatgccctcttcagccttgtcaagctgagtggcgtcgggaccgatgttcggcagacgcatggtggtggaggggataacgcccttgaccttgagcgcagccttggccatgacggcctgatagccgtcgccattcaacgcgtggacaaggggggcgagctggttggcgaggcgacgggcggtggtgatatcgccgcgatcgaatgcctggacaagctgctgcatggggttggaggcgacgtgggcaatcaccgaaatgatgccgacggcgccgatggagaggaacggcaggaacaggccgtcatcgccggaataccaggcgaggccggtgcgctgctgcttctccactgcggctgcaagatcgccggtggcgtccttgacagccttgacgtgttcaagttcggccagtcggtcgtaggtttcgaccttgaccttcaagccggtacggccgggaacatcgtagacgatgatcggcttttcggcggattcgtcgacggccttgtagtggccgacgataccgtcctgcgaggggcgggaatagtaaggcatgacgacgagcaccgcgtcggcgcccgcttcctgagtctgttcgaccatacgcacggtgtgtgcggtgtcgttggagccggcgccggaaatcaccggaacgtcgacgacctccttgacggccctgaccagctcgaccttctcatccatatgggtgacgggcgattcaccggtggtgccattgaccaccagaccatccgcgccatcggcgacgaggtatttggcgagcttctgcgcggcggcgaaatcgacgctgccgtcggatttcatcggggtgaccatagccggcagaatgcggccgaaaggtgctggctcaagaaggtgcatgtcatgctcgctcatagtgttcaccgtacttcccattgtggactcttatactacgtaccttgattgttgctgaatgcgtggcattatggccggagccggtggcaatgccgtgatgcgcgtcccggcgcgcttccctgcctgaaatgcgggggcgactactggtcgactgcgggtcgattacaggtcgaggaagtggtcgaggccgatggtcaggccggccggagcgtcgccggcgagcttgcgcacggcaagcaggacgccgggcatgaagctggtgcggtcgaagctgtcggcccgaatggtcagctgctcgccggcgttgccgaagagcacttcctcgtgggcgttgaggccgcgcagacgcacggcgtgcacgtggatgccgtcgaccacctggccgcgtgagccgccatcggtttcggtggcgtccggcacgggggcgagtcctgcggccttgcgcgcttcggcgatgccgtgggcggtgtgaatggcggtgccggagggggcgtccaccttggtggggtggtgcagttcgatgacttcggcggattcgaagtatttcgcggccttggttgcaaagtagtcggccagtacggcggagatcgcgaaattaggtgcgatgaagaccttctgggtttcgggcttcgggccgttggcgatggcggatttgacctgggcgagtttctcgtcggtccaaccggtggtgccgaccaccacgtccacgccttggccgatcagggtcagcacgttgttcaggctgacggacggcacggtgaattcgacgaccacatcggtgttgtcggtggtgacctgggtcaggtcgtcaccggcatccaatgcgagcgccagctgcgtatcctcggcgttgttcaccgcttcgaccacgtgcgagcccatgcggccctttgctccgaccaccgaaaccttgatcatgtcttcttccctgtctacccgtacctgcccggcaatgtacccggaacgttttccaatcggcaatcagcctatcaccgccaagccctcacgccaatatcccgtccacagaatcgagctccctctgacaagccgaaccatgaagtcgagctccctctgatgagccgaaccgtgaagaaaacgccggaggcgtttttaggtgagggcgaacgacagtgagcaataattcagttggctgaaagccatcatttaattgcgttcgagctggccgcgaagcggactgagggagagacccccggcgaagccgccaaccatccatcaggcgtagcccgattccgtttcacccacgccgcttggccaaggcccatccggccaacgccaatggcacggacgccagcgtgaagatgaatggcagcatcatgcccacatgagggttggaggcgtcaagcacaatgccggccacggacgagccgatcgatgtgccgaccgtgcctgcggtggttacccagctcagtccttcggtcagggattccgccggcaccagatccttgacgatgaggttgccggtggcgaacgtcggcgagacggtcaggccggcgaggatttcgaagacgcccagcaggatgagattgtccattgacagccggaagaacacgtagccgacggtcagcagcgataggaacatcaccatatgcgcccaatgggagcctttgagtcggcaagagccgaacaccagcgcgccgatgcacgagccgaccgcgaacatcgccaattgcagaccgaggaagggctcaagtcccatggatttcatggtggcggtaatggacacgtcgaaggacgtgaagctcatattgaacacgatgaacacagcgagcaacggcagtacgccggcatagagcaatacgctcttgggcttggcgccgctgcgtttgagctggcgcagggtcagctggtcggcatcttcgcttgcagcagggctgccgtcatcgtgcgcggccacggtgacctgttccacgataaccggtggctgggtggatttcagcgagaagaatatggtgccgccgataccgcatgccacggtgggcacgaacagttgggataccgggtgcacggaggtggccagccaagccgccagaatcggccccagaataaagacgatctcgtcaatggcggcttccatggcgtaggccgtgttgagcagctgttcaccatcttccacaccgcgcaacgcataggaccagcgtgttcggaccaatgcgccgaatgagaactgcgtcagacccatgatgatggccaggacgaacagcagcggaatcggcacgcgcaccaacgccgcgaaggcgaaggcgagcatggccacgatctgcacggcgagcgcaagccggcccacgcgggcttggccgaaacggtcgaaggcgcgggcgtagaacggggtgacgcagctcatggccagcacataggcggcgctcatggtgccggcgatggtccaattgtcgtagagatggttgagcgccagaacgatgccgagactcatcatggagatcggcaatcgtgccaccgcgccggacaggcagaacgccttggctccgggcagcatgaacaggcgctggtagggcgagtgggcagcggacgacttcgaaaccgcgcgagtcgtggacacaataactccttactggtgcgttgtccggcacgtgcgcccgcccacacgtgccatccgagggtagcggttcccgagcaacgtcacgcggtgcgtttcaaccgcggaccggtacgtggccagtcgtcttcatcgtcggagatgccttgcgatgcataaggtctctccaccggtgaaggccgtccgatgctgtacaggtcatgagcctttgggctcagtcgttgtcagattgttcgggaatgccggagctcaactcggtaaggatttcctgtttggatttcgcgcgggcgtgaagctcgcgcaagccctcgtcgggctcactgacatagtagagagtggcgtcgatactgtccaattccacaccttcgaccgctgccagcagcagtcggtacatgtcgagctgggcaagtttgcgggtgatgtcgtctggcttggtgggccgacgaccggttttccagtcgaccacggtaaagcgtgcggtggtgctggacgggtcaagtccaccgatgaataccgcatcgagtttgccattgaccaggcccacgcccggcacgtccacgacgatggcacgctccgtccacgccgggatgcgcttggcccacgatgattcggccagtctgcgctgccacgccaccagcttggactcggtggcattgtcgctgcttatggaagtggcggaggcagcggctgcggcggatacggattgttgagccgtgggctgtgggacagcgggctgccgtgtggatggcttgcggcattgccgctcccgttcggccaaatcggccaacatggcttcccgggaaacgaatcccgcatcctgacctgtatgcggcatgcttggttcggcttcatatgccagtaccgcttcatccggcttaccggcattgatgaattgctcagcccacgcatggaactgcgtgccggcctcggccgccggagacgatatgcgcggaatcgggcggataatgctacgccagtagaggcgctcctcccgttcgttcatgccacctacgcgggcttgcaggcttgtcacgttctggcgtcctgcagccagaacgcgttgcgccttggctttgactgcctcatcaagcgactggccgctggcggcatcggccatcaaatcggcgtcgtccaccagcaattgtgcccgttgcaggagtgggccggcgtcttggtgctgctcaagtgacgaggaatctgcggcgatgacatcgatgccgcgtgacagctgttcatgcaccgcgtcgctgagggtagccggccacggcaattcggcggcggcattcgtctgcgtaatcggcgtttgccacgcctcccccaccacggcgtcactgtatgccgcggcatgctctccgataaagaacccttcgggaggggcaatcgcttcgccttgcgccgagatcagcatgggcttcccggcattggcggcttgcagccgttccacacagtcctgagccgatatcgcatgttcacgggcttggagcgcgtcatgcacttcaagccagaaattggatggctgagcggcgcgagagcctttgggcaccactgacgggtcccgcccggattcgcccgtataggcgcaataggtcatcagggcatcttcccgcgcacgggtaagcgccacatacatcaatcgacgttcgtcggcatgcagccgacgcccatattcctccgcctgcgtcaaataccagccggatgcatccacttcttccacgccatcgccgaattcgcgcatggagccgaacacttcatcatcgataagctccacatcatccaaagccgccaacgatgcgatggggtcggcttccacatcggcatcatgggggaatcgcggcaaaatgccggcatcggcgcgcataggcacgggcacggcggtggggttggtgagccaggagtcggcggtctcatgatattcgggtgcggtccagtgaccttgctcggtgcctcccgtatggtgttcgtccagcacgatcttgagatggtcgccctgattgctggggaatccgccggcggtaagccccactaccgcaacggcatcccattccaaccctttggactggtgtacggtcatcagttccacatccaccggagcgtcggggagactggcggcttcatcctccaccgaagccagatgatccacccatgtgatgaacccatgcaacgagggagtttgctcagcggcaatctcttgcgtgtacgtatccaccaaatccacaatcgcatccataggcatatgcgccaaagcgggattggcgcggtgctgcggattatgcagcacaccggccaatacggtgtcgatgtcaagatccaacgcttctatgccggcgcgaatcacgtcgcccagtggccgcccgacggcatcatgcacctgacggagcatcaccgcggcccgggttatggcgttgcgcccgtgtgcgctcaaccgttcaagcagttttaccaggtcgccgcgtagcaatacgtctggcaggaataccgcattggccacctgatcgcggtactcacgcaccacagccgtccattcattcgctggtgtatccgtttgggcaaggccggcctgcaccaatgcttggaagcgttgttccatgttctgttcttcagcaaaacgggccaacatggtcaaatccgctgcggacatggtgaatcgtggcgtggccagcaagcgcatcagcgatcccgtatcggtgtggtcggcggccacgtgcagcaacgccatcagatcgcggatttccggacgttccagcagcgcggaatagccgaccacgaatgtggtcaatccggcctgttccaatgccgcctgatattcgggcatatgtgatttggaccgaaacagcacggcgaccggcgctttctgttcgcccggcatctgttcctgttgttcggctgcggaacggtgccgtgcgatggccgtcttgcagaaacgcactacggcgtcgatctcctgcccggccgtggcgaagcccagtactcccaatgttccttcgggggcatcaggcatggggtcgagcgatgagacatcgacctcacgcatcaatgagctggagggacgcgacggattggagcgcaacggcagcgtgagattattggcggcttcgagcactatacggctgttgcgcctggtgacggacaacgggaatggcttgtatccggcaggcaggtggaaatcttgctggaacatacggaatgcaccagggctggcaccacgccatgcgtaaatcgactggaacggatcacccaccgcgttgacggcggacctccgtgacgcatccacatggaacagtgctgccagcagagcggcctgcgtggtggaggtgtcctgatattcgtcgagcagcacatggctgtacctgcggcgcgtgcgctctccgatggaggggaagcgctcgataagctgatacgcggcaatggtgaagtcggagaattcggccatattgcgttcccgcttggctcgggcataggcctccaccagctggagcagaatatcgcgtttgcgtgtggtctccagcagcgcaccgcaatgataggcgcagcgggcgtgcaaatgttcggcacggtcatcgagcttggcttgccagctggcgtcggtatctttcttcagtcgtttgatcttggggattttcggctcgtcctcgggcatgggttcgtctgcgacggcttgctgcaatcgattgatgaatgccgaatcccattgccgtacttgattgatcgcatcatcgaagctggtgcagccggcaccgatcatggcactgccaatggcatccgacaacgccagaacacggttcgccaaactggagaaggcgccaaaatcctcactgaacgccagatccatgtgactgtcgatgacttcggtggccagttgaagcgctccggctgcgctcaatggttgcgtgttctgatcgaatccgacaagcagtccatattggcgcacgatggtctggaagaaggcgtcatacgtgaaaatggccggcttgaggaatgcccgatcagacaccgtggcggtcgtagagcccgccatatcaccggccactgcggcggagacgcgttccagcagttcgcctgcggccttgcgtgtgaaggtcaggccaaggatgcgttcaggtgccacacctcgattgataagcgcgatgatgcgttgggtcatcgtaaaggttttgccggaaccggcaccggcaaccaccagtacgtcagcatcgactggcgcatcgatgatggcggcctgttccgcactgggagtgaacgtgctcatgcttgcctcgtttcgaaaatcgtgtcgatctggcccgcacaggcagggcagacgttcttcatacggcagaatccgatatgggtgtcttgcggatgggcctcgatgatggccgacctgctggccgccgcggcatagaatacgcgggcgatcatggtcagcgaccataacgtctgcgtaccggcgagcgcggcgaattgcgcccacgcttcggcactcacaccttcgggaggagtagccggatctatggcgggtatgtcgaagaaacggttggggtctttataccagtatcgtggcgtgaacggttcggcattcaacgaaccatcagtgaacagcggcggctggaaggcaccttccggggcgtagcttctggctggtgccgcattctgcccgacatggaacagcgcgctttggctgatatgcggcattgcggcaagtgccttggcaccgcgcggcccgtcttcggggaacacgaggccaagctgatagcacacgagctgcagatcattgaaaatctgtttgaccgtgggcgttctgcctgttttgtagtcaatgaggcgaatgcattcgccgccgtctgcgagtacgcgggtttccatacggtcgatgcgcccggacagtctcacggtcagatgctcgtccatgccttccggccaccctccgaccagtgctcccatcagacggaccagcatgttccgatcgatcgggtgcatgccgggcacggcattgtatgcgtcgagtatgtcacgcacatcgaatcgtgcggcaaactcccgttcgcattcggcaccggccaatgcgccaatgctgaagttgctggagttcttgccaagatacgtttccggatcggcgtcgctgcgcacaaagtaatcggcgatgttgcgcagggcatctgccgcggactcgtccttacgggtggcctcatagcggttccgggtgtcggctatggcattcggatcggggcgtttgctctgatagatggcattaagccgtgccgtgacagcctcgatgcggcgttccgtgccggccgtggagtccaagcccagtgtggccaacgtctgggcattgtgggaaagatggtccagcccttcctcgctgccttgctgtgcaaccgcatggatgagggttccgaagctggtggccacggagctggggcgaggaccggcgaaccggttctccagcatccagcacaccggacatgcccataggctgtcgaccgccgatggagacagggtgaccatgggtgcggcctgcgcatccgtcttgcctttccccgtttggataccgtcagactgtacaccgccagatgacgcgctatcggatgaggcactgtcggatgaggcaccgccagatgacgcaccgccagatgacgcgctatccgattgggccggcgattccacgaacgcccagctctgcggatttgcggcgcgcacaccatgctccgacaggagtgtcaacgcaaccgcggcgtcctttgcggcagcctgctgcggttgagcagtggccagaaccgcgcgggcggcgctgaccaacccacgtgggtcggcgtccaatccggccagatcatattcggcggatcctgtatgcgcccccactgtggtgaaaggcgcctgttgccggttgcgcggatagtattccggcagatacccgaaaagaaagtccgaggggctcatgctgtcgttccataccgcgctgatcatgattcgccgtgcacgggtcagcgcgaccaggaaacccttcttctcgcccgacagcacagccgcgaactgcggatcatgcccggttttgtcactttcttcaagcgctcccctcagcacgagctcggcaaggtcttcaccaccgaacatggtgttgcgcccggcgaggttcggccacacgtcttgctggaccaccggtatccacgcatatccccagtggcgtccggccgcgcctgccggcgtggtcaatgtcacagcgtcttccaccggccctatgtgggccaaggaatcggcctgcacttccatgccccgaacctgtgccatgaatgacgtgatgtctcggctggcggtggaatcatcggcgaactggaacaggcgcattgccgcgtccagccggtcattggccgtgcgcccctctgccgtgttgaataatgccgcacgctgccagaccggtgccagaccggtggcgttccaggcaacagacagtgcataacgcggctgtacgcgctggcttgccggcagccgctccaagccggaagcaacgctgcccaccagatgccacaggttcgcaaaagcgcgggcctgagggtcgttgccaagcaccgcatggatggatgcgagcgcagcctgcgccggcgcggcggcatcatcaacggcaagcatcacgtacagcgcgtcaacgccaaaggccaagtcatcgtcggacggttcaccgagtatttcgacagacactggcgatggaaccattgatgaggatgtttcacgacctgtttcacgccgtgtttcatggtatgtttcacgcaatgtctcccatgccgtcgtcagagaggtcagcatggcatcatccgtggcgagatgcgccagcgactccagcgcgctcatggccaattcaatcggagcgagccttgcaggacgcccttgaccgggtctgcccccggcactcaccaacgggccgttcatcaacgtggccactctagtccttatatatgccgcgcaggaagccaacgtcatctggcattccgccattccctcggcacgcaatcgggcaagctccacaagcgcgaacaatccctgcacgaaagtctcgtccttcaaaggacgggtgaccgacgaataccgcaccggcacgccatctcggcgcagtcgttcgccgaacagccgcacggcggcattgtcgtgggtgatgaccgccatgtcgttccaccgaatatgccggtcgagatgcgcccgcttgatgcgccagaccacatcatccagctcctcacgtgaggatcggtacaggccggcggtcaccgtgccgtccgactgataattcgctgcatcgactccgcccagtatggcggtcagcttgccgggacgctcggccggaggcagcggctcgtcttccggcgagggaatcgacagcgaaatacgagacgcgatcacatcagccatcgtcatgtgcgactgatcagcgccggtactgccgccaaccagctgttcttccttggctttcagccacccttccacggcacggcgcatcagatattccggatacgatccacggaaggtctgcaccgattcatccgggttgccgaccagcaccaacttgacgccggcattccccaactcctccaagaagcgcatgccggccagcgtggtgtcttgaacatcatccacaaccagcagccggggcaagcccaacgcctccatacgcataggccggtcggaatcatccgcgtgatcggcggcgaatgcctcatgcaccacacgagctcctgccaccagcaaatacgaggcatccaaacggtattgccccggatatgccgcgctttgggctgcaatatattcacggcgcaacgcgaaagccaaacgccattgcaccgacaatcgcgcgtcctccgtcacggcgtccaagagacgtggctcttcgtgaacgcctacaccgagctcgtccaatcgggccagcatatcgcgcaactggccgataaacgcatctgaaatacctcgagtgaacctatccgcgctggtcgagccgcctgccgacgtcggagacggcgaatccgacccttgttgcgagaggcttgattgtgcggaagcggccgagccgggcatctcgccggcaccggcatcgcgtatgagtttcgcccagtcatcctgggcaaagtagacgcgtagcaaatcacaggtgccgcaatcatctcccgctacggcatggcgcagatgcacggccatgacttgacgcagcaaagcatcctgttccgcaccgttcaacaatcgaggcgacggcaatccagttccctcgcgcgaagctgatatggcccggaatgccacggcacccagcgtggtgaccggcctggcctgcacggaaaacccgagctcacgaatcacccgattgcccaatgcgtcggcggccacacggccggatacggccatcaccgcctgcgtgccaccgtagcggcgcagccccgccatcaacaccgataaggcgaattcggttttgccgcttccaggcgtgccgacaatcagcctcgccgctccatcacggtcgatgccgtccagcactgttccaggttcaagtctcgtcatcatggctccagcctaaacccgaccgtcacagagggaaaaattttaccgaacccgacgaagaatcgtacccttgacggtatcctgtagaacgaatgcagggagagcgcattttccaaggagggagggaacagatggccaatattccgatgaggccgccgaagctgcccggatatgatttcgtccagatgttgggaagcggtgccaccgccacggtgtacctatataaccagcgtatgcccgcacgcccggtggcggtaaaggtcagcgccaaaacccttgacccacgggccgctgccctgttcaaccgcgaggccaacttcatggccaagctgtcatcccacccgtacattctgccggtatatggtgccggcgtcacctccgatggccatggctacatcgtcatcgaatatgcgccgggcggcacctacaacagcatcatgaaggcccggtccatgacctgcgagcaggtactcgacctcggcatcaagctgtcaagcgcgctgttcaccgcgcatcgcagcaatatcatccatcacgacatcaagcccagcaacattctcatcacctcgcagggtttgcctgttctgggtgatttcggtatctccaccgatgtgtatgaccgtaccgaaaccggattctcgccgccgtgggcaccgcctgaagtgcttcagcatctgaccaatggttcggaagccgccgacatctattcactggcggccaccctgtacgccatgttcgtcggctgctcgccattccagcacgaatatcatccacgttcgcaatcggaactgatttcgctgatcgtcaatcagccattgcctcgcctcaaccgccccgacgtaccggccgatgtggaagcggtgctgcgccgggccctgaacaaggaccccgaccagcggtactactccgcgttggagttcgcacgcgccatgcagcgtgtgcaattcgcatatttcgggcatgccactcccgttaccgtggaagggatgccggcctaccccaaagacatcgagcgtcggcgccgggccacggaccagcgagatcagaccacccgttcgtcacggcgatgggtcaaaccggtgggtattaccgtcggtatacttgcggcgatcaccgcagcggcactgatattcgccttcgtggtcgttccccgcatggacagcgccaccggatcagataccaaacaggtggcgacgcccggcaccaaggatgatgacaacaaccgcaataatcaggatgacgtgattaccgataccgcgaacgcccagattccttccccggagaatctgaacggcacctatgcggcggatgggtcatccgtgacgttcacctggacgaatccagacccgcaaagcggtgatacctatgcgtgggccatagtgcagggcagcaataccgaccagagcgcgcaaaccgtcacaacgtcagatcccacggtgaccgtcaacgcgcaggaaggctcgcagacctgcattcaggtgtccattgtgcgcaagaaccgccagatgtccgtcagccccgccatcgcctgtgcggccaagccgcaagagtgatccgctcgccactgctgggcataccaccttggcattgcgtatcgcatcaggcatgcgcccggcagtggcgaattcaccaaatggacaacaggaacggcaggtattggaaccgtaaagcgttgtcattacactagcaaccagagaaaccagggttcagggagttcagatggccacatcgtcccagtcatacgatcgtcgccgacgcatcagcgcggctttgcgccgccttatgccctccggagggcatacgtggacggttcccgtaatcacgctcctgctgcttctgggacttgttgccggcgcggtgatcatgagcaccgtcacgcgccgccatgtgcaactggacgatggcaccgtgtgggtcacttcgctgaagaaccagaaggccgcacgattcaacgtaaagaacaaggaggccgacgccggcgtctcctcctccgccccacgattcgacatcgcgcagcataatggcgacaccatcctgaccgaaacgaccaaagcctccaccatcaaggcatccacggtcagcaccggtgtcaagactgacatcaaagccaacaccaccactgtggtcggcggggataccgtagccctgatcaacgagaagaccggcaatgtgtggaccggcttgtcggaaaaccttgattccgtggcccccaccacttccgatccgaaaatgaagctgggcgagggcgggcgcatcgcagtaacccacgatggcaaggtctacggataccgtccatccgacggtatggtgctgcgtcttgacaatcccagcagcgccaaggccaaaaccctcgaatcgctgaccgacggcaagcagcagaccgttgaaagctttaccgtcatcgggagcacgccggtaatcgcaaccggcaaaaccgtcatattcaagggcggccgcgtcgatgtcgacacgaccggcaccctcacccttcaggagcctcccaccgatgacgtacagtccgattgggtggccgcggcatcaccgagaggccttacgcttatcccgttgaagtccaatgccaaggcgaatttcatagccaacgggggcaaggcgaatccggcacgaccggtatcgtccaagggctgcgtgtactcggcttggagccagaaggccagcaactacattcgcgcctgctcccccgcggataccagcgtcaagccgcaaaccctcgaatccgtcaatactacttccgaattggtgttccgcaccaaccatcgccttgtggtgctcaacgacacggttaacggcaatgtgtggaaccctgaggattccaccaaagtcatcaaaatacagtggaacaaaatacaggccgagcagaccgagaaagaacagcagaacaacgactcggccaacaaccaccacgacttctccaagacctgttccgcacaatccggccaaatcaaagccgaggatgatgaaatcggcgcacgagccggttcggaacagattctcgacgtgctgcgcaatgacgagcagaccgattgttccgtgcttaaaatcaccaaggttggcgcaccaaacaacaaagacgtcaccatttcgccgatttacgacggccggtatctgcaactcgatgcctccgccacatccgcaggcaccgttacctttacttacgatatttccgatggccgcggccagacctcttccgccacggtgaccgtaaccctgaatgatggaggcaaccacgctcccgtacagttcgacactcctcccgagatcgatgtggagcagggagccagttataccgccaatgcgctgagcagcttcaacgatccggatggagacccgctcactctggtctccgctgtggcccagaacaccgacccggtgcaggtgtccacccgagccgacggccagcttacgttcaacaccggtgcgctggcgtcgggacgcgtgggcgtcgaggtcaccgtctccgatggcacggcgaccggcaccggcatggtgtatttctcggtcaagcccgcgaacaccttggccgcggtcatcgacccggtagcgaaaaccaccgttcccaacacggataccgtcgtcaagctgtcctcttacgtgcatggcacttccttgcagccggcacagctgactcaggtggatacgcccaacggcgcttcgacgaccaccaatgcggcggatatgtcgttgacgttcaaggccaccaatcccggcacctattatgtgccctacaccattactcaaggctcgattccggccaccggattggctcgcgtcgaggtacagcccgccaccggcgaggccgccaaaccggttgccgccaacgatgtcgccctgcttggcgcggataataccgccattgtggagccgctcaccaatgacgtcgatccgatgggcggcgtgctgtccgtcaccacggtgagcgcaccggccgactccggcatcaaggttggtctcgtcagccataagcgcgtgtatatcactgcgcgtcaggtgcccacgaaacccgtcgcccttacctacaccgtggccaacgcctccggaaccgccaagggcaccatcgtgttgcagccaccggctctgaccacctcgaattcagtgcccaaggccagcaatatcaatgcccaggtgcgcaccggcggcatcgtgtccgtggatgtgcttgaccatgtggcctactcggatggcaccacggtcaagctcaagaacaacctgcaatacgacaaggagacgttcaagggtctggccttcgtctctggagacacggtccgctaccaagcatccagcgagaccggcaacttccccatcacctatacggttgaagacaatctgggtaatgtggcttccgccaatatcaccattaccgtgcataagagcgacgcagcgagcaaggccgcgccaaccccgcatgacgccgaagcgcaggttgccgccggacagaaggtccgcatccccatcacactgaccggcatagacatggatggcgacgacgatcagctgttgggtctgggcaacaaggcacccacgctgggccgcatatccgaagtcggttccgactacttggtctatgaagcgtatccggattcgtccggcaccgacaccttctcctatgccgtggaggattggaccggtcagcgcgcacaggcgcagatccgcgtgggcgtattccaaggatcgtccgactccggcgtatacgccagggatgacgaaatcacgttgaggcccaatacggccgcaaccgtgccggtcgcgcagaacgacatctccggcgacaacaccaatctgaccgtcgacaagcatgtcgaggtccaaggtctcgacggggtgagcgcgaaagacaacatgatctccttcaccacgcccggcagcgccaccaccgcctatatcgcctacacggtcaaagacaaggccggcttgtccgatacggccaccctcacggtaaacgtggatccgaatgccgccatcgagccgcctaccgcctacgactatcgtgtgccgtccgccgccaccatcgataagaagtccgtggatgtggatgtttcccagtggatcgccaatccttccggcacagccaatgagctcaaggtcggcgtgcatccctccgccagcgctcacgctcacgtcaagggcggcgagcattcgaccaccatcaccgtcgacctgacgtcacaggcgcgagccgtgccttacacggtgaccaatacgaaatacaacatcacctccaccgcgttcatccaggtaccggcctatggtgtctttccgcccacgttgcgtcccaaggcaccggaattgaaggtcaattcgcgtgagaccattgaaatcaacatcaatgactatgttcgcgtcggcgccggcaaggaaccgtatatcgaaagcgctgattccgtcagcgccaccaaggcttccaactccgatttctacgtgaacgacaagaccctgaagttcactgcggcaaaagactacgcaggccccgcctccattacctttaccgctgtggatggcaagcagggatcggataagaccaagatcatcaattccgcagtgatcactctccagatcacggtgataggccgcgatgtgccgccgcccacgttctcgtcctccactattgatgtcgaggcgggcgcggcccccaagaccgttgatctgacggcgctcacccatgcaccgtccggcgtgtatgacgacgagaagcaatacacgtattccggcggaagctcatcgtccgggcgaatcaccgctaacctgtcccgttccggcagcttgcaggtttccgccaccaaggatgccgctcctggcaccaccgcgtccattcccgtgcaaatcgcatacggcgcgggcaccgtgaatgccggtgtgaccgtgcgcgtagtgtcttccacccgtccgctggcacgcgtcggcgacaagacgctgaagatcaaggccggtgccagcgatgccgtgaacgtgcttaccggcgcgtacaatccgttccccgattcctcgctgaccgtcatcagctgcaaggcggatgacgccgccaaactcactatcgccggatgcgatgcctccggaaacgtcaccatcgccgtcgcatccgatccgggtgcttccacgaacaccgtgctcgtcaccgtgcaagacggcagcaagtccaaggatcgtgaagtcaccgcatcgattaccgtgtccgtgatcgacaagcccgagccgccactgctctcccccgtagccggggaaccgcaggacagcgcggtcagcctcacatggacgcccggtgccgccaatggcagcccgatcaccaactacaaggtcagttggaccggcgccgccactggagagaaggattgcggtgccgtcacctcatgccaggtcacgggtctgaagaacggcaaaacctattccttcaccgtcgccgcgcgaaatgacgtcggttggtccaaaccgtccaccgccgtcgaagccacaccggacaaggtgccgtccgctcccaccgatgtcacggtcacaggtggcaataaaaccgccaaagtgacgtggaaagcgccgagcggtgatttcagcgccgtcgacaactattcagtgaccgtcaccggtgcaggtgctccgcagaccaaggaaaccggcaatacggccaccgagctgtcgtttacgttcaacaacaacgacatttccgatggcaccgccattacggcgaccgtcaaagcccataacaaaatcaattggagtgccgagtccgcctcatcacagccaaaggacatctggggagacccggatgcgccgaccattgcgctgtcgaacgacgacaccacaggaacggcgaaagtcactctcggcaacaaccgcaatgccggctgccggcgaatttccttgggaggagacatcaaggacaccatcgattgcagtgacagtggcgctacgttcgatatcaatgagaacgatttgaacacccgggaaatcaccgtaacggccaccgtggtgccgcagcgcgatgcttccgccggcacaggcaagagcaggtttgtcccgcagtacaatgtccagccgcccactgacgtctacaccaccggatccggcagtacatgcaccgtgcattggaccaagcaggggcatgcgcagtcctacaacgtgactgccgatggcatcgattccggtacagctactaaccggaactcactcgacttccgaatgagtccttgggccaaatgcaataccgcatcggtgcaacaggtgttcaacggcgctaccagcgatgccgccaccggaggcccgtacaatggcgctccttacacctatgagaagaaggctgtaatcaacaaaccgcaggagctgcgctggtcagacaacgctcacgtcattaacgtcaccggcggttcggttgaggtctatggcaagcaggccaccgtacaaatcatcatcaatggccaaccgttcacgtggaaccccggccagccattggacgtcaccgacttggccgtggccgccgatggcaactacacgtggagcgtcaaagtcaccggcgggccgggatactccggtctcgacaatacggcggacggcagcagcgtcgcgggcacacgcccctctgattcctcggaggggaccgagtcgctcaaatccggtaccgatgtcaccactttggccaagaacccttggattcttggtttcggtaataccccaatatcgtcaaccaccattcacaagcagtaggagaacatccatgagcgagaacatcgacgacgcgacgcagctgtctgacagcacgcagctatccgacgccacgcacttgtccgatgccacacatctggcatcggaaccgcacactggcaccaccccgaacaccgagacggcacagcaacccgttgcgttgcctaacctgccgcagcggccgtcacaagcgtcgtcagaaaagccgtctcctactactgatgccgcctccattcctgcgggcgatgacagcaccgtgctcaagccgcgcaaggacgcgacgccagccatcccgcagcaggtcggcatgccggcaaagaccagcacgcccaaagtcgcgcttccgcacttcggacgtaaatccggcaagcaggccgctactgcgaatgctgcccccgccacccagacctcccgtcaatggacgaccacaaccgccggcaagaccgcagcatccaacgccgaaaccgtggctggtcgcgggccggtagccaatcagcaggccgccgcgcaatcccagccgcaatcccagccgcagcgtcagtcgagcaaagccgcgcaagcagccgcatcggcactgcccgccagcatcaattccggactactgccccagcccacggctcaggtccgggatttccagcagtccttcaatgcgctggtcgagaatgtctccaaggtggttatcggcaagaccattcccatcaagcaatgcgtcaccgcactgatggtcggtggccatattctgcttgaagacaaccccggcaccggtaagacccagttggcccgaggcttggccaactccatttccaccggtttcaagcgtattcagttcacgcctgatctgctgccttcggatgtggtgggtgtgactttctacgatcagaagcgcggagaattcgagttccgcgagggcccgattttcgcctccatcgtgctggccgatgaaatcaaccgtgcatcgccgaagacgcagtccgcacttctggaggttatggaagagcagaaagtcaccgttgacggcgtcacccatgatgtaccgcagccgttcatcgtgatcgcaacccagaaccccatcgagcagctcggtacctataagctgcctgaggcgcagatggaccgcttccttatcaagacgtcgattggctacccgggccatgatgtgtccgtcgatatcctcaagcaggtcgatatcaccgaccgtgcgcagaccatttccccggtgctgagcggtgacgatgtcatgcggctgcgtcaggtggccaccgaaatctatgtggatgatgcgattcgtgaatacatcgtcaggctcgtcgaggcgacccgccacaacgagaagatcacagtcggctcctccatgcgtggcgctttggcgctgacccgatgcgcccgtatctgggccgcggccgatggccgtgcctacgtggtgccggatgacgtcaaggaccttgcagtggccgtgctcgcacaccgtatcacgctgactccggaagccaccttcgatggcgcgactccggaaagcctgatcgcacaggtgctcgaagacgttccctcccccaccatcggttcctgatagggcctggaaaggtatccgaccatggcatctacatccgccgcattacgccgtcgccggcgcgctgaacgcatgttcaagcgcgcggtaagacgcatcagacggttcttcgcatcctacgtctcgcccttgggctgggcggtaacgggcgcaggcatcgcatgtcttattgcgttcctgcctctgggctggtatgagctgctcgtattcggcatcgtggcgatggtgatgatgctcgcggcaatcgcgctttccctcggcaacacacgcttccacgcgtccatcgccgtatccgatcatcgcgtgaccgtgggagacaccatatccgttatcgtcggcatcgacaacaccggcagaacgccgacaaccacggcacgcggatatctgccaatcggcgatgcgcatgaacgattcaacatccccatgctggctcccgggcaatccaagcaaaccgatgtggagttccgtacggtatcgcgcgcaatactgcccatcggaccattgcgcatccgcaagggagacccgttcggcctggtgcgtcacgaaaaggagctggccgaccgcatcatcgtattcatccaccctcgtaccgtgcgtctcgataccttgaatgccggcgtgccccgcgatctggaaggccaaccatccggccagatcgtggatgatgatctcgacttctacggattgcgcgaatacgagccgggcgacgacgtgcgtaacgtccactggctgagctccgcgaaaaccggcacgttgatgattcgccaatatgaagccacgcgccgcaccgacacctcggtgaccatcagcgtgaacccggatgagtacgtcaacggcgaggaattcgagatggcggtgtccatccactcctccatcggcgtcaaatgcctgctgcagaatcgcccgctgttctgtcacgcgggcaacgcgcacggccagccgcgcaacgccatggagttcctcgacaacgccagtgccatagagcctgatcgtgaggacaatccgaatctcgccgagggcacgctgaagcacagtcctgatgcttcgttctattttttcactgttggatcgctgaaagacatcgagcaaatcaagcgcatgaccttggccttgccccgatcggccagctgcgtggtattgcaggccagcgccggcgccaatcgcggcatcagaagattcgccaacttcacattggccaccatcggcgaactcgatgatctcccactgatcatgggggtgctcgcatgaccttcgaccagtccagtatcaccaataccaataccgctgcgtacgccggatcgagcggcacatacaccggcacttcctccggcacgtacaccggaacctccaccaccaccggctcctgggccgactccacacattcggttatctggatgaccagaggcaatgtgcttcgcggcatgggcctcagtcgccagccgtggggcaaacgaatcaccagcctcgtactcatagcggcgatgatgttgctggcgcaagccaatctcatcgacgtgtacggcggcgtggccacttgggcgatcgccgccgtaccggccaccttgctgggcgcgatcatcgctctggcgggcatgttgccggcgttgcgactgtggtggcaaatcgtgtttctggcgtttgcccaattcatcatcggtccggtggtaacgctgagttccaccacgtcccattacgtgattcccaccttgaagaccttgagttcaggttgggaaatgacgtttggctcgttcaagtacattatttccgtcgatccgcctctgggcacgcaagacggcgtgctgctggcggtatggaccatcggcctgtggcttacgttcctcaccggcgtgtttgccattaatgccaacgcatggttgtctctggtgggagtgctgccccttgcggcggccgtggccgtatgtgctctgctgggtacggacagcggctggcaacgtgccatctgcggcattgcctttgccttgctgctgattatctggctgtcttggcgtcttgaactgctggaatgggggcgctggatatccgcgctgatcatcgtcgtgctcgctgccggccttgctttcggaggcacgttgctggtgccgcaggaccgtttcgtgctgcgtgaccgctacgatccgccgttaagcccctacgattacaccagcccgctcagcggcatgcgatcctatatcaaggaccacaaaaaagacgtgttgctgaccgtccataatctgccggccggaacaccagtcaaacttgcggtgatggatcgattcgacggcacagtatggaacctgtccgattcttccgaagccacggactcctcgaattatcatcgcgtgggcaccacgatcaaggcggatgagcagggcgaatccttcactgcgaccttcaccgtcgatcagggattgaccgacacctggctgccgctggcgggagcggccactggcgtgagcttcgccaacgatgccgacaacggcaatgacacgttctactacaacacggataccgattccgccattattcccgccggcacgcgtaaaagcctcacctataccgaatccggcattatcgcccgcaagcccaccgataagcagatcagcagtgcggccgcggcccgcatcacccaaccggaagcccaggatgttcccgattcggccagcaaactggccacgtccattgccggcggacagtcctcgggcggtgccgcagccacggcgttggccgacacattgaaagactccggatggttctctcatggactcgaaggcgattatccctccgatgccggccatggcaactaccgtatcaacaagctgctggcaggcacggccatggtgggcgactccgagcaatatgcctccgccatggcactgatggctcgtgagctgggactgccctcccgtgtggtcctgggcttcctgccgaaaaacaaggatggcgaaatcaccgatgcccgcacggagaagacctcgggcaatggcaccaaaatcgaattcaccggcaacgatgtcaccgcttgggtggaaatcaaattgcagggcctgggatgggtggcgttct

SEQ ID NO: 1847 - DNA, 29885 bp, Unknown
  MAG_14  MAG No. k141_52688
gacacccaccccaataacaaggccatgcagcacgtgctcgaaagctccggcttcgcccgttgcggcctgatccagctgctcgaccggccggtcgacaccaccagaatcgcctatcagcgccacgagtggtgagtgtggctgtcgccaccgtgttcggttccgcggtggagctggtcaggtaaggtccacgtcgtcgcgcacgtacggtccgtcggccgcccgttcaaactcgtgcatatcgcaaaaaccgtacgctgaaagtaactcagcgtacggttttcacgaaagcagccatcgactatcggtcagccgatagacctcagtcctcagtcgcagcgaccttggtgtcagccccggccttctgctcaaggccgagcttggagcgcttgcggctgtagccgaagtacacgatcaggcccagaccgaaccagacggcgaaacgcacccaggtctcccagttgagaccggcgatgagcacgaagcagaatacgatggccagaatcggggtgaccggcacgcccggcgcgcggaagccgcggggcgcattcggctgggtcttgcgcatccatagaataccggccgacacgatgatgaacgcggacagcgtaccgatgttcaccagctcgaacagcacgttgatgttgatgaagccgccggcgaacgcggtcagcagaccgaagaaccaggtgcccttgaacggggtgcggtacttctcgtgcacgtggccgaagaacttcgggaacaggccgtcacggctcatggcgtagcagatacgggactggccgtacagctgcacgagcatcaccgtggtcatgccgatcagcgcgccgaggttcacgatcaccgcgagccagttcatgccggtctccagaatcacgccggccactggggcgtcgatgtacttggcgaactccttgtagggcaccacgccggtcatgatcatggtcatgacgatgtagagcacggtggaaacggccagggacagcaggatgccgcgcggcagtgtcttgttcgggttgatggtctcctcggcggaagaggacacggcgtcgaatccgatgaagctgaagaacacgatggatgcggccggcacaatgccgtacggctgggtggagccgggctggaaagtgtagatgccgtacggggagaacggctgccagttggacggcttgacataccacacggcgcacacgatgaacagcacgatgatggcgagcttgatgagcaccatcacgtcattggtgcgcttggtctggttgatgccgatcgagagcacccacgtgatgatcagcacgatgacgaaaccgggcaggttgaagtaggtggtgacgtccgggttggtgccgtaggcggcggtcagctcgaccggcaggtgcagtccgaagccttccaacaacttgttgaagtatccggaccagccggcggacacggtggccgcctgcagagcatactccagaatcagatcccagccgatcacgaaggcgatgagctcgccgaacgccagataggcataggagtaggccgagccggacaccggtgccatggcggcgaactcggcgtagcacaggccggcgaaaccgcagcagacggcggccagcaggaacgatacggacagggccgggccggcggtgagcgcgcccttgccggtgagcacgaagataccggtgccgatgatcgcgccgataccgagcatcgtcagatcgaaggtgcgcatcgtgcgcttcaggggagtggattcggcgacaagctgatccacgcttttcttacgaaacagatccatgttcttctctcatgaaacttaagatatggggctagaccggacggatttccgggatcccggcacgcctcaacgccgggaatcaaaggcggcttccgagaaaccgcatatcggtcattagtgtacgactgccgggcgaaaacaaacgattgtgaccacacgtcacattcctgcgcaacaataggtgcctatgagcatgaacgcagcacccgaaatcgcattctcgtccgagcagggcaaggccaactatgcggccacccgccgccaataccccgcacaggccatcgtgaacctcaaaaccatgcgcgacaacatggcccacctggtctccgtggtcggcggcccgaactccggcacggcggtgatgggcgtggtcaaggccgacgcatacggccacggactgctgcccgccgcactggccgcgctcgccggcggcgcgacatggctcggcaccgcgcaatcgcatgaagcactgctgctgcgcaaactcggcatcggccccgaccgttgccgcattctgacttgggtctacaacggcaccgaagtgccattcgatgagctgatcgctgccgatatcgacgtatcggtcggctccctgcccggcatcgatgccgtggccgccgccgcacgcaagctcggcaagcccgcccgcgtacacgtcaaggtcgattccggcttcggtcgcaacggtttcacgccggctggattcgacgccgcgctcgccaaactcgtgccgctcgccaaagagggcgtgttgcatattgtgggtcagtggagccatctcgccgtggccgattcgcccgatgtgcccgaattcgtgtcctccaccgaccgccagatcgaaacattcaaggacttcacgcgccgcatggaacaggccggcattccgccggagatccgtcacctggccaacccggcggccactttggaccgcccggagattcacttcgaactcacccgccccggcatcggcctgtacggctacgagcccgatcccgcgatgggcaccccgcgcgactggcatctgaccccggccatgcgcctgcaggcgcagctcggcacggtcaaggatgtggaggccggccatggcatctcttatggccgcacctacctgaccccggacaacacctcgaccgctattgtgccgctgggctacgccgatggcatccaccgctccgcttccggtttcgatatggaaggtgccaagcacgtggagaagccgggcggcccggtgcgcatcatgaccactgaaggtccgaagctctaccgcgtgtgcggccgcgtgtgcatggaccagttcatcgtggacctgcacggatccgccgccgaactcggcgttcacgagggcgacacggtcgaactgttcggcccgggccgcggcgaggattacgttgagcctaccgccgacgattgggcccgcgccgccgacaccatcagctacgagatcttcacctgcctgcgcaaccgcatcccgcgcctttacgagcatgccgccgaagtactgcccgccgccgacctcgccaagctcgaccccgccacgctgctataaggtgcattaccgccatacggtggcaccccgtaatcccttcttcccgaatatgtgccgttgacatgtgctgagcgtcacatattcgggaaatcggccccaatctcccgaatatgtgccgttgagttgacgtcagtggcacatattcgggaagtcgggattactgcggccgatatgtgtgcctatgcttggaatatggaaacgacgttggatggggaacaggtgctgagcgatgagggctacagcgccttcgacgaggagcggtgggcacccgagccgcccaaatccaagtcgcgcacggctttcgaacgcgatcgcgcgcgactgattcattcgtccgctttgcggcgtttgggcgcgaaaagccagattctgattgccggtaccgacgatttcgcccgcacccgactgacgcatacgctggaagtcgcccagatcggtcgccaaatcggcgcattgctcggctgtgatccggacgtggtcgactgcgcctgtctggcccacgaccttggtcacccgccgttcgggcacaacggggagcgtgcgctcgccgacatcgccagcaatatcggcggcttcgagggcaacgcacagaccatgcgtatcctgacccggctcgaacccaagatctttcacccggacgggcgttcggccggtgtgaacctgacccgtgcggccttggatgcggctgtcaaatacccgtggaccttggccgaagccgaccgacaccccaagggggagcggtcgaagaagttctgcgtctacccggatgacgaaccggtgttccgctggctcaaaatcggcgcgccccaggccgccaaacccatggaatgccagatcatggacctttcggatgatgtcgcctactccgtgcatgatgtcgaggattccatcgccaccggcgcgttcgatccgattgtgctcgccgatccgaagatgctggaccacatcatcgagcagacgcgcgcatggtatggggcgaagtgggatgccgacaagctgctggccgcgttcatgcgattgcgccgagagcatttgttccctgcacatttcaatggttcgcgcgaatcgttggcacagctcaagaacatcacgtccgatttgatcggccgcttctgctggtcggtggaaaccgccacgcgcgacacgtatgggcccgggccgttgacccggtattccgcgaacatcgtgattcccgaggacacgaattacgagatcgtggcactgaagggcatcgccgtgtacttcgtcatggcgcctcgcgagcgcgagccattccatcaggaggagctcaagatcgtatcggatttggtcgatgtgcttatggccgattcgccgctcccatccgacgctttggaaagccagttcctggccgattggaatgaatccaccaatgacaacgagcgcctgcgcgtcgccatcgatcaggtcgcaagcctgaccgacaactccgctctggccctgcactccatcttgtgctgagggcgtgttggacgggtgcttccctcagtctcgctgcgcgagccagctcccctcgggtgaggggagctgtcgctgtaggcgactgaagggagtttcgcggaagaaatgataaccgacggtaaaaatttaccgtgtctcaggtgaggcggtactctagagacttatggtcggaatgattaggaaagaagatgtcgagaaggtgcgcgccgccgcggacctgtatgacatcgtatctgcgaccgtaacgcttaagccctccggcaccggcaccttcgtgggcctgtgcccgttccacgacgagaaaaccggcagcttcaacgtgcgcccctcactcggcgtgtggcactgcttcggctgcggcttgggtggcgacgtattcaaatacgtcgaacaatccgaaaacatcgacttccgcgaagccgtggaactgctcgccgacaagtaccatatcgagctgcactacgagaacagcggcaacggcccgaaccgcgagaacaccggctccaagcgcacccgactgctggaagcctgcgaggaagcccaacgcttcttcgtctcccagatcctgaccaaggaggcactgcccgcccgcaagctgctcggaggccgcaacttctcccaagccgactgcgaacgtttcggttgcggctacgcgccccaaggttgggataatcttgtgcgccacttggcctccaaggggtttacgcagaaggaaatcctcgacgcgggcttggcccgccaaggccagcgcggcatctatgactatttccgcggccgcgtgacgtggcctatccgcgattcgaccggccgcacgctcggcttcggcgcgcgcaaactatacgaagacgatcagatcgccgccaaatacatcaacacgccggacacgcagctctaccgcaaaacccaggtgctttacggcatcgatttggcgaaatccgccatcgtcaagaagcgacaggtggtgatcgtcgaaggctatacggacgtgatggccatgcacttggccggcattgacaccgccatcgccacgtgcggtacggcgttcggcgccgagcacgccaagattgtgcgccgcctgatcgccgacgattcgctgggcgcggtccagctggtcgggccgttgaaggtcaaggaccagccgttgagctcgcgcatcgtgttcacgttcgatggtgacgccgccggccagaaagccgcgctgcatgccttcggccttgattcggccttcctctcccaaaccttcgtggccgtggccgacgacaatctcgacccgtgcgacctgcgcatcgagcgaggcaacgaagcagtgcgttcgctgatcgcccgcgccaaaccgttgtatgacttcgtgatcgacgccgccatcggccggttcgacctgacctacacgcccggccaagtgggtgcgatgaaagccgtggccccgctggtggcgcagattcgcgaccgctccctatgggacgcttacgcgcgcaagtccgcgggccgtatcggcgtggatcttgaggtgatgcgccgcgaggtgatgaacgcgcgccggcagatgcatgtacgcgatgaggacgcctacgcgcccaaacgtcgattcgagcgtgacgagccgcgtgtggaacccggcaccaacccatacgccaatccggccacgcgcaaggcgttggagcgccgtgacgccgccgaacaggcatatttcaagatcgacgacgccgtattcatcgccgaacagcagttcatggccgtgctgattcaggtgccgcgcgccatcgaccgcaccatgttcgggcagctgaccatcgaccatttcatgacttcggtgttccgcaccctgttccaggcgatcgcggccgccggcggactgccatccgacgataccccgcaggggctgtggatgcacaacctcaccaaggccggcgggccgatgctgaatcaggtgatcaacgagctggccgtcatgccgttgccactgcctggcgacgacggtggtaatggcgcacaacctccgcagtcgaacgtgcctgggggagtcggcggtggtgcggccgccgtgcagctacgccctgccacgccggaagagcagcgctatgccactgagcttctcacccgattgttggacatgggcttcatgcgccagatcggcttggccaaacgccgcatggcccagctgcccgacggcgaagagaagataaccctcctcggccagatcacccgcatggaaaccgcccgtaaagacctccaagcccaaatctacggcaacaccgtcggctaatacctcccactgattgcgcgcatcttcgaatacgtgccggatgcataaggccatacaaccggttgccggattggatgggtgcagaagttgcagattggccccatccaaattggactggtttgggtgggccaatccaatccgttcaataatgaagcgcgataccaagcagcgtcgaacgaagggaaactcatgacgcagaatcgtgcggaactcaaccgtaatctggcccagatgctcaagggtggcgtgatcatggacgtcaccacgcccgaacaggcgaaaatcgcgcaggatgccggcgcgtgcgcggtgatggcgctggagcgcatccccgctgacattcgtgccgccggcggcgtctcccgtatgagcgacccggccatgatcaagggcattcaggaagctgtctccattccggtcatggccaaggtgcgcatcggccacatcgccgaggcccgcattctgcaggccatcgacatcgactacatcgacgaatccgaagtgctttccccggccgacgacgtgtaccacatcgacaagaaccagttcgacgtgccgttcgtgtgcggcgcgaagaacctgggcgaggcgctgcgccgcatcgccgagggtgctgccatgattcgcaccaagggcgagcccggcaccggcgacgtgattcaggccgtgcgccacatgcgcaccatgaacaagcagatccgcgagctcgtggccttgcgcgacgacgaggtctacgaggccgccaagcagctggccgtgccctacgacctggccaagtacgtgcacgacaacggccgtctgcccgtcgtgaacttcgccgccggtggcgtggccaccccggccgacgccgccctgatgatggagctcggtgccgaaggcgtgttcgtgggctccggcatcttcaagtccggcgacccggccaagcgcgccgccgccatcgtcaaggccaccgccaactggcaggacgccgatctgctcgccaagctgtccgaaaacctaggcgaagccatggtcggcatcaatgaggacgagattcagaccatcatggccgctcgcggcgagtgagtgcattaccttggctcccctctttgaggggagccaagaaagggtgacgctcccgccagcgggagtcaaggcccaaggagacaacatggttgtagctgttgaatatatttccaaagaagagtccgcggacgtcgaaaacgtcaagcacggcgtgaccggcatcctggccgtacaaggcgcattcgccgaacatgcggcggtgctggacaagctcggtgcgccgtggaaactgctgcgcgcggccgaggatttcgatgaatccatcgaccgcgtgattctgcctggcggcgaatccactacacagggcaagctcctgcattcgaccggactgttcgagccgatcgccgcccacatcaaggcaggcaaaccggtattcggtacttgcgccggcatgattctgctggctaaaaagctcgacaatgacgacaacgtctactttggcgcgctcgacgccgtcgtacgccgcaacgcctatggtcgtcagctcggtagtttccaggccaccgccgattttggtgcagcggatgatccgcagcgtatcacggacttcccactggtattcatccgcggaccgtacgtggtgtcggtcggacccgaagccacggtcgaaaccgaagtcgatggccacgtggtgggcttgcgtcaaggcaatatcctggccaccgccttccacccggaactcacggacgatacccgcatccacgagctcttcctgtcgctgtagtcgattcgtctgccgttagactggtatccgactgacgaatcaaggagacgatctgccatgcagcttgagctgaatcgacgcagcaaggtgccgatgtaccggcagctggccgccgggctgcgtgaacagatcgtctccggcgcgatggccgagggctaccgcctgcctcccgaacgcgagctgtcctcgcgtctcgaagtcaatcgcaccacggtgttgcaggcgtatcagcagctcaaggacgaaggtcttatcgcctccaaagtcggcaaaggcacgttcgtgctgccggctgcctccgcaagccgaacaccgcacacgtcaaacagtgacttcgggaatgcgataacgcgaacaacacgatcgtcggcagaaatgggaacatcgcaagcctcctcttccggcgacgtagaacgtgctacctccactggtttcttgacgacggaccagggcagcagctctgcggcggtccatacgattcgtgaaagccgctcggttcagggcccggagccaaccgtcgtgcgtccgccatggtcggtgttgttctctgattattccaaccggtttacctaccatgacatcgcctcggccgagcgggcgcagcgcggcgacaccattattgatttcgccaccggttcgccgaacccggcggatatcccggacgatctgctgcgcaaggtgagcatcgaggcgttcgaatcgcgggaattcgacggccaaccggaatcacctatcgagggattcgaagagttgcgtgcgctgcttgccgaacatatgcgcacacgaggcgtacaatgcggcgtccgcaacgtgatggtgctctccggctccgagcagggcatcgacctcatcgtgcgcgcgttcatcaaccccggcgactgcgtgctggtcgaacaatccacgttcttcccggcattgcagaccttccgttcggcggatgcgcgcatcatcggcgttccagtggacgagcacggtatgcgtacagacctgttggacggctattgcgcgcgattccggcccaagctcatttacaccgtcccgacattccaaaaccctaccggtaccacgctgccgcccgaacgacgcagcgaactcatcgacgtggcgcggcgctatcagtgtctgatcgtggaagacgatgcttacggcgatttgtggtacggcggggaatcgtccgacgcacatcgccccataccgcttaagggcatggagaatgcgggatacgtgatgtatttgtcgacgttctcgaaaaccgtcacttcgggcctgcgcacgggatgggttgtggccgacccgcatgtgattaaccggctggcggctctgcggcgcatggtcgaccagcatacgagcacgtcatcgcagcgcatctgcctggaactgcttaaagaaggccgcatcgccgaacatttgcgcggtttgatcaagacttaccgcattcgacgagatgcggcaatcgcagcattggagcggtatgcgccggatgaagtgtattggaccgtgcctgcaggcggctactatatttgggtttccttaccggacggcgtgcgctctctggatgtattggaatcctgccgttcccaaggcgttacgttcatgccgggcagcgtgttcgacgttgacgaaatggatgattcccatattcgtctcaactttgtgcgcccggatgctgctgacattgataccggcattcgaatcattggcgagacgatagcacagatgtagccaagtgactggctcattgcggttgtcgagttttttgatggctgcatacccacatcgatgggtgcattcgacgaatgaataagcgaggaagccatcatcagttcgctgtggcatgcgcatagcgttgtcgggcgaacggggcagaccacgtggtcgttgcgtgacctggccgatcgagccggcatcgcattgcccctggcgtagtggcgaggtggcgcagtaacgagtcacgccatcgcgagccgatgatgcgaaatgcggaaccggtcgcggccatcaacggctatcatacatgcggaagcaacgatacgttggcgtcagcacatccatctgactccagaaagggacacgatatgaccacatcctccgtttcgccggtgaccactgaactggcgggcagcgaaaccggcatcacgcttgtcgttcacgccggagcgggcagtcgtggcaagcacagcacgcctgaacgcatcgcccaggccgaacttgatctgcagcgcgccctcgatgccggataccagttgttggaatccggagcaccggcgcatgaggctgtggtcgccgccatccacgtcatggaagacgctcccgaattcaacgccggccgtggtgccgccctgaccagcgatggcatcgcccagatggacgcctgcctgatgaccggcgatggcgaggtcggtgcggtcaccggcgtaagcaccgtgaagaacccgatcgatgcggcgcgtgccgtcaaagagcagaccaagcatgtgctgttcgcggacccgaccgatgccgagatcgccgattggggcgtcgcgaccgaaagcaacgagtacttcatcaccgaacagcgtcgtcagtccttggccgaggctcagtccggtggcgatgagtgggagaagcatggcaccatcggcgccgtggctcgcgatgccgaaggcaatagcgccgccggcacgtccactggcggcatcaccaaccagatgcacggtcgtgtgggcgattcgccgctgcccggttgcggcacgttcgccaaccagtccacggtggcggtgtcctgcaccggcatcggcgaggcgttcatcaaggtggtcgccgcccatcaggtgtcggatcgcgtgcgtttcgccggcgagaacgtcgaggatgccgcgacggccactttggacgaagtcgccgcgcatcatggcgatggcggcatgatcgttctgccggcggtcggccgtggcgtggtcgcctacaacagcgagatgatgaacttcggataccgtagcgcgcaaggcggtaaggtgcagggctgattgcccctgtattgcggcatataacataatggccggtgtgctgcggattcttggtaaggaatccgcagcacaccggccattcatgtatgcggcaagtgccgccgatcagtgcggcagtgcgcgctacttggtgatcgtgttgtacgtgggcatgttcgtgtaatcgaactgcacgttcttcacgttctgtgcagacacggcggcgaaacgtttgaccgggaatactggggtaatacgcaacttcatcgctcctcttcctcgaatgaaactatgttccattggtttgagccagtcacgtacggtattcgtgtctggcctgccacacaatgatgcagccgtatatacgggcacagcattgcgcggcagttcattgtatggaagacatgcaaactcaatgtttccttgtccaaataaaaaaacgagcgcggctgatgtgcggcaccggtccaaaaactcatgtccgccagcgcaacgcgactacgtaccttatgccggtctgcgcgtagaatagaacggctgcgatattgggttattcacggaggaatggatgcgacgctggctgatcaatgtagccaaaaatgagacgattctcatcgtcgccgcaatactcgccctgatttcgtgtttcattgtgccgccggacgccgattacaaaagctacattcacgccagcaccatcagccagctcatctgcctgatgattgtggtgtgcggattccagcgtatcggcgtgttccgcatcatcggttcgcgattgctggagaaggtcagcaccatgcgcggactggtcattacgcttgtcgctttgacgttcttttccgcgatgttcatcaccaatgacgttgcgctggtcacgtttgtgccgttcgcggtggccgtgctcatcatggctgggcaagaggataagaccatcctcgtggtcacgctgatgaccattggcgcgaacgtgggcagtatgctcaccccgatcggcaacgcgcacaacctgtatctcaaagccctgaccggcatgccgaccatggaattcctcggcatcatggcaccgtattccggcacggcggccgtgttgctggtcatcgtgatttccgtggtgtttggcggcaaaccggtcggcgacctgggcgacctcgaaaccggcgtgctggctcccgagcgcaacaaacaccagcccgacgagattcgtatcaccggctacggcgccggttatggcggctggcgcaccatcgtctactcgctgctgttcatcgtctgcctactggccgtctccgacgtgattcccctgtgggtgatgtgcgtgatcgtggtcgtcgtgttcctgttcaccgatcggcgcgtattcaaatacgtggattggggactgccgctcaccttctgcatgttcttcatcttcatcggcaacatgaagcgcgtgcccgaattctacgaactggcgcgctcgctggtcggcggccatccgctggaggtggcggtcggctccagccaggtcatcagcaatgtgcccaccacgattctgctttccggcttctgcgaccaatggcgcgatctgatcattggcaccaatttgggcggcatgggtacgctcatcgcctcgatggcctcgcttatttcttacaagaacgtcgtgcgccaatacccgcacaagaaaggccggtatctggccgtctactccgccgtcaacgttctgtttttggccgtattgctgaccttgagctggatcatcgagccgagtctctgagccgccgttgtgggttgggccggtctatcgcgcgtatacggtgggggagccggtcagtcggctcatggccgactgcgggatgtcatgaatgcggccgatggtggcatccagcgtggatacgccggatacgccggctgtggtggctgtgttggctgcagaggtgatgctggatacgccgactgcggacgatgatacggccgcaaccatcggctgacgataggcgttggagttgcgggccagccgggcgagcgcagggcgctgcctgcggaacagattgataaacataccgcatactccttcatcgttggccggcggtcttctggccgccgtggtttccatcctgccctcccgtgcttgtattcgctatgggggatagcccctattattccctgaatctgcacgattccccctcatccttgagggtgattctaacggcaaaggaatcggcctaatggccgatgtcaatcagcgcgaagccaccagcgtgacgctgtacggcttgatcttcatcgccagcaatgaagacggcgacggcaatgtgtaagcccgacgttccggcacaatcgcccccgaagcctcgccgcggtatccgatagtggttttcgccgtcggactggcgcttaacgtcgtcacctccaaacgcaccggtcgcgatggcgaggcgcccagcccggccagtccgcgcgcgatttccaacgtcacatccaccggggaatcggaggtattgacgattttgatgtaacggcaggcgtcatccccgtcatgcccggtggcactgacatacagatgtttggcggggcgtgacgcggtctgctcgatggacacggcatatgtcgtgtcgcccagatgcgtggaaaacagccgctccacctcataattcaccgtggggttcacatgcgccggattgagttcgataagattctgcgcccaccccttagccgggatatgcgcgagcagcggtgcataggaggtcatgcgcaccacgtcggaattgcgctcgcaaccggtcaggaacgcggcctcgccgagtgccgacttccacgtgttcgcgccctgttcggtctgcggttggccggcaaaatagccgttggctgaatattcgccgaaatagacgccggcgccgcaacgcgggtaagcgtcgaatcgtgacgcttggtatgcaaaccattcgggggagtggtaagaatgttcgtcgacgataatcgcgtcaccggtggcggaatcatgtgccccggaatcggttgcggccaacgctcgcgcatggtcccagctgcgtttcatcgtcggctggaaggggaacagtccggcgctcatcacacacagcatatccgggtatcgttcgtgaatggcctcgctgatcatgtcaaacttggccacgtagtcagccccgaagttttcgttgcccacgccgatcatgtccaggccgaacggttctggatggcccatatcacgccggaccgcggcccacgagctggactccggatcgccattcgcgaattcgatgaggtccaggtagtcctgaatcacattgttgcggaaagtggccgaattgatatccatgtggcgcggatcgcggccgggcgactggcatgcgatgccggcgaacagagtgggcagcggcttggccttgaggtcctcgcacaggcagaaatactcgtagaagccgatctgatagctctgcgaatagctggaaccatccggcatcttgaacgaccacatcgaatactgttggcgtcgcgcggccagggagccgacggtatccttccagcgatattcattgccgggcgtcacaccttcgacgatgcagccgccggggaatcgcagaaacgctggatgcaacgcctgaatggtttccaccagatcgcggcgcagcttgccgtaacgccatttcgggtcgcccgcgccccaatagtccgcatccatgaactgcaccagatccagatcgaacgtggtgcgttcgccggcgtcaatggtgatacgcagcttgccgtaatcggtgttcaggccggttacgtcggcgttgaaccggtaccagccgtcacggccgatggcgatggcaccatccgacgaatccggactgatcgaaacgccggaatcctgcgcattggcaccatcgtcctgcctcagaccggtctcttccgtatcgtcaagcggatctgcgtccacgatatacgacaatcgagtggtgctggtgagaggcagaccgtacctatcgaccacgccgacggacagcttggcccgcccatgaaccggacgtaccgcgagactgacggaataggtgtggtcggcgacgatggagaacgcgggctcgcccccgttgtcgccgcctccgttatagccgaggttttccagatatgcagggccggtttcggaaggaacatcggacgtgatgcgagcgtatcggctatgtgcgtgaattggcggggcggggcagtcggtggtcacccgctggccgtgaatcccgcgtatctcactgccgaggctggcggcggaacagttgatgaaatcccagaaacgcagggaatcggcctgtgtacgccatcgttcggcgccggccatacgccacgtgtgatggtcgagatagacgccgtcaaaactgtagttgttcaccatgttggcgttcagcccgccatccgcaccatggttgatgtcctcgaagaacacgccgtacagccgcccgcttgtgtgatgggtggggcttcccacgctaatccgcaccatggttttgattgtagagggaatggagcggaaaggtaaacggaagagttcgctcaccgttcatgttgcggtcaatccaagtcgactgttcgccggtatacagccggtaccctcgaaacaggaatggaaaatacggacgactaggagcgcggctgtgcaatcctcggtgggaatacgtgagcgcatcgaccacgtgtatccgtcgctgcgtccggcggagcgcgccgtggcccagtatattcgggatcatatcgaggaggcggccgacctgaccgtcggccagatggccgacatcgcccacgtcagccagccgacggtgattcgtttcgcccgcaagctcggtttcggcggttaccgtgaactgcggtacgtgttgcgccatccgtccgccgagcacaaagtgaccttcaatccgttggctggattcgatctgaatccgtgggatggcgaagatgagattcccggcaaagcggcctatgtcgcgaaggcgctgatcgatgagctgcacagtgcgttggaccccaaggcctatcgcaaggcggtcgccctactcgccgaatcggagttcatcgatattttcggcgtggagaactcgttgacaccggcgatggatctgttcaccaagctcggctacctgggactgacatgccgtctcaataccgacgcttacctgcagcagatcggtgccgggcacctgccccacggcgctgtggccgtcgccttctcccattcgggcagttcggcggatacggtcaaagcgttgcgattggcgaaatcgcatggcgcgaaaaccatcgccataaccaatgccatcggcgcgccgctggccagctgggccgacgtgacgttgctgacgggtcgtgactcgcacacgatctatggcaatgcgattttctcgcgcgtggccgataccgcgctcgtggacatgctgtacatgggcgtgattctgtccgactacggccgtttctccaccgcgctcgacgaatccggtcgcatgattcgcgatcgcgtattcgagaactgagctgctgctttatcgtgccttgggctgtattgctctggtcgttgccgctttgttgccgctctggtcgttaccgtcctgaggcatgtgccagcgaatacgtagtggacttggcgtgcgtatgacgttcgatcttgccgctcaactccagctggtccaagagctgcgtcatctgatccttgttcaggccaagcgctttctgcatggttttacggctgagcttcacgccgcggaacgcgaggaaattgagcgtgaactgctccaacgtttgaggcgacggttccagcgtcgctgtatcgagcgggcgggtactgacctggtcgtcaccgtccgggcgctcgccgaatccactgccgagaatcagcgtctgcaatggcgcgcagccgatgatgcgtgcgccggccaaagcatctgcggcgttatccgtcatgcgctgaatcgtggggaatgaatacattttggcgcgctgcgcttcgtcagtggtgctgggcgcggcggaagcatcggtatcggtccgatgcaaggatgcggcctcggccgagaccgggatgggcagcaccatcgccaccgaagtggggcctacgcgcagttgcggactgaccgcgctctgcgcgtaggcgtccataatgcgttggataccggtaccgcagttctcgcagagccccaaatcggcgaacaattcagccaaacgcggggtgcgtggctggcatacgccgttgagcagatcgttgatttccaaaccatcggtcaggccgccgagcgagacgatttccaggcgggaatcgaagatattgatcagtgtggggccggagtacgtgtaatcgcgatgttccagtgcgttgaccaatgcttcgcgcagggctatggccgggtattggccggattcgttgataccgttcagcagggcgctggcttggtcgagctggcgcagcaccgagccggtgaatgtgtgacgttcgcgaatggcgtttttgccattgccctcgaaaatggtggccttgataacgaacgggcattggttggacagcagggtggcaagcgacgattcggtggcgctggtgaaggtgttgttggcgccggtgttggtgatgctgccggcgggggcattgccggcatcggcagagacggatgcagccatgttggtcacaaccgggctttcccaatccctgccttcactggcaaaacgaccctgtgcgtatgtgaaagtgagctcaccactatcgcctgcgacggtctggcccgatgcggcgtgatctacgttgctctccgttgtccccatatcgccgatggtaccggtgcaagccgacgttacgccgaggtgttttacacccctacggctagacttacatgagtttggccccgtagctcagctggatagagcatgtgacttctaatctcaaggtcgacggttcgagcccgtccggggtcacgatgcaataaacccttggtccctcatcgtctgtgggggccaggggcttttgagtattatgccggtctgggtccgtctggagcctgaactgtcgaccttgagattagaagtcacatgctcatcatcaccatccgggaacacccttaaggggtgcggctcctgcataacggttatacactgacttgagatgtgctggataataaccagctatcgcgcgtccgccaatggcgacgaacgaaggaagaagggcccgtgccgcgagcaatcatcgaggtaagaaacctacgcaaggaataccccgtcgaggatgagacggtggtggcgcttgatcgtgtcaatctcagtatcccgcaaggccagatctgctgcattttcggcgaatccggctccggcaaatccacgctgctcaaccagttggccggcatggaaaaaccgacgcgcggcggcgtgagaatcggcggcgtacccgtcagcaaactcgacgagcgtgagctggcggccttccgccagaagcatctcggcttcgtattccagtcgtacaacctgctgcccaatctgaccgcgctcgaaaacgtggcaatgccgctgatgttccgcggcgtgcccaaggaacagcgcgaacgtgcggcgcgtggcgtactcaaacgagtcgggctcggccatcgtctcagccattacccgcgccagatgtcgggcggccaacagcagcgcgtcggcatcgcccgggcgtttgtgaccaagcccgaggtggtgttcgccgatgagccgaccggcaaccttgactccaaaaccaaaaccgaggtcatgacgatgatctgcgcattcgcccatgacttcaaccagaccatcgtgctggtcacacacgatccgcagatggcctcatacgccgaccgcattgtcaccttgctcgatggccgcatcaccagcgatcggctcaacaccgacctttcccgcccaactgttccgtccacgccgtccgccccaaccacaccaactacaccgtccacgccgtccgcccatagaacccaaggaactgaccgatgaagcacctctcccaccacaccatcgccatcatcgtcgcgttgctctccacgctgtcactggcacttgccgtcatctcccttccgcatcaggcgtacgcggtcgacggcacagacggcacaagcggcacgaacagtacgtctcagggaaacgacggcgattccgcgccgatcgccggaccggtgcccaacatcatcatcaccaacttcgcgtatggaggtgattccgtggccgccggatccaaattcaatctcgacttcaccttccagaacaaggggcaggtggcggtgacgaacatggtcgtcaccgtggacggcggcgagagcttcgccatcgcgggaggcacgaacacgttctacgtcgacgcgctgtgggccggttacgccatgacgcaaagcgtgccgatgcaggcgctcgcctccgcgaaaagcggtgcccagtccgtgaccgtgaacttccgatacgagtatgtggacgccagcgcccgctcctcaagccagtctgacgtcaagatttccgtgccgatcagtcagcctgaccggttcgaaatcagtgatcccgtagtgcccgaccaggtgatcgccggccaggaaaacacggtcacgatggaatatgtgaacaagggcaaaggcgatatcgccaacgtcgaggccacgatggagggcgaaggtttcgatgccacgatgaaaacccagtacgtgggcaatgtggcttccggcgccaccggcacgattggttacgccttcacaccgcacgcgtcaggcgagctgaagaccacgctcaaagtcacgtacgaggattccgacggacagaccaagaccaaggaattcccgctcaccatacccgtaaccgatatgcagccgatggatgattccggcatggccgatccgaacatggaccagaacgccaatcagggattgccggtgctggtgtatgtggtcatcgtcgtgatcgccgtggtcattatcgtggtgattgtgctgctcgtgcgtcgcaggcgcaagcagaaggccaagaagaacgatattgatgaggactgggatgattggtccgaaggcaaggatgataagaccgataccggcgtgacggatggtgctgcggcagacaccgctcctatcacaccagtcaccccagcctcatcagtcgcaccagccggctcatcccacaaggcctgaaaggcccgaccatgcgattcggcgacatactgcggctctgcagacaaaacctatggcggcgtaaatcccgtacgattctgaccgtgctgggcgttatcgtcggctgctgctcgattgtgctcatggtctctttgggccaaggcattaacgagcagaacgagaagatgctcaaatcgatgggcgatctgtccatcgtcaccgtgtacaccaacggttatgccggtccgatggacgatggcggctcgtccaagatgggcgataccaagctcgacgacaaggccgtggaatccttccgcgcgatgagcggcgtatccggcgtgacgccgatgatgaacttcccttataacgtgacggccagagcaggcgcgggcggccgttacatctatgattacgtgcagatcatgggcatcgacatgacccagctcgaccagatgggctacaagctcgtcggtggcgagaaaccggtcaaaaaagaccaggtgcttgccggcgaatggttcgcctatggtttcatggacactctgaagaacggcgaacaacgcaccagcacacgtggcggtcagtattcctcatgcacgtttaaccaggccaccggccagtgcgaggaagatcaggacgaagatccgttcttcgacccgctcaccacgcaaatcagtctgaccaccggcaccaattatcagggcgaccagtacagcatgaacatgtacggcggcggtggcggcggcacaggcggcgcgggcggcggtggcggcgcaagcggcagcgccgcgggtcagtcggaaaacgtcaccctcgatgtgcgggcttccggcattgtggcgggcgactacaacaagggctatgccacctccgacggtctggtcatggatttgcaggcgttgaaggaactggccgccaaagtcgatccagccgccgccaaaaaagccaccgcctatgatcaagtgctggtcaaggccgccgacctcaagtccgtgcccgaagtcgaatcacagatcaaagcgttgggctacgagacctcctcctatgaagacatgcgtaagtcgttggaagaacagtcgcgcgcgattcagctgattctgggcggtatcggtgcggtttcgctgttggttgcggccatcggcatcgccaacacaatggttatgtccgtaaccgagcgcacgcgcgagatcggcattatgaaggcgcttggctgctacgttcgtgacattcgcgtcatgtttcttgcggaggccggcgcgatcggattcttcggcggattgatcggctgcgtgctgagcggactgatatcgctgggcatcaacgttgtcggcgcgttgtatgcgggcggcatgagcggcggcatgtctggcggtatggtcagcggtgccggcgggggctccggcgacggtaccggtggcggaacatctatctggaccatactctggcaggcgatagttggtggcgagaatgtgacccgttattcggtgattccgtggtggctgttcctgttcgccgtgctgttttccacgctgatcggcttgctattcggcttcggcccggccaataaagccgttaaaatcccggccctagacgccatcaaaaacaacgagtgatcgcctctgtcacctgctccaccgttagtccataacgttcgttcagttcgcccagcgacacgcggtcggtaaattccttggctgcgccgaagttcagcacacgaggattacggctgccgtccgagacatgatgattcgcatagtatgcggtcactttctcgccccagccgccttcaagctgcccgtcttcaagggtgatgacctgctggtggccatcacgcaacgactccagtacgtctgaatccagcgacgtgcactggcgcgggtcgataaccgttgccgtgatgccataatcgtcagacaatgcggcggccgtctgctccgccaacggatacgcattgcccagtccgatgatcgcgacttgcgagcccgtctgattgacccgccaatccagcatgtgacgcgcaccggcatgctgagccgttacgctaacggtcccgcggactgttgcggcagatatgcccccgctggcggagctggcggaggctggcagcgaagctgactgggggcggtcagcaatctgcccacccgtcaccggcagcagcgtcgcatcccgttccgccgccagaatcgcctcgcccggcacccgaatcaccgccggaccagcaggggcgtccgccgaaccggccggcgcggtagcccatgccaaatcagccagatagtcgcgagccgaagtcggcaccagcatcgtaacccctggaatattggagaacatcgtcacgtcatatgcgccggaatgcgtattgtccgaaccggacaagccgcccagaaaatcaagtaccgtgactcgcgaacggttcaggctcatctcctggaagaactggtcgtacgcgcgctggaagaaggacgccgtggtggccaccacgggggtgccgcccgcccgtgcgatgccggcggcgtacgccacggcatgcgattcggtgatgcccgtgtccacgtaatgcgaacccgcgcgttcgcggaattcgtgggtgatgccgttggagcccggcgtggcgggggagatgaccacgagtcctggctcggtggcgaaacgcggttcgagcgcggccatcgccattttgccgtaatgcttgcgcggatcgtccggcttgccgattgcggcatccggattctgccaatgcgaggcctcgcactggccttcatgcggttcgtgatcggacaggttgcagtgatccgaatgccacggctcgctgtggttcacgttatcggtggggtgcacgccggtgtcggagactgccggatccagctcatggacgttaccggccgaggccgagggtgcgccggccacgtaatcggcgccgtcgtatcccgcgcccttcagcgtgtggatatggaccaccaccggatggtcgatattgcgcacttcctcgaaagccgcgaccagagcggaaacatcgttgccggccgccacataccgataatccaagccaaacgcgttgaacagattcggctgggcggtgccgccggacgcgcgcaggcgggcgagcgggccgtacatgccgccgaaatcgccggcgatcgacatctcgttgtcgttgaacacgatgatgagattgccgccctgctcagccgcgttgttcagtccttcaaacgccacgcccgaactgagcgaaccgtcgccgatcacggcgatcacattgccgatgccgctgttcgggccttccatatcgcgggttttcgccaaaccgcaagccagtgaaatcgaggtaccggtgtggccgagcacgaactggtcgtgttcgctttcatccggattggtgaagccagtcacctcgctgaaacggtccgggtccagataggcgtcggcgcggcccgtgagcatcttatgcacgtagctttggtgggacacgtcgaacacgatacggtcgcacggcgagtcgaatacgcgatgcagggccaccgtggcctccaccatgcccagattggagccgatatgaccgccgtgccgatggccgtacgccaacagcgtggcgcgaatctcgcggcacagttcggcgagctcgtcgggggcaagggccttgacatcggccgggctggcaatgcggctcagcagatgggagtcgtcgccatgggaaggggtaatgctcggggggatgtcgtgaaggcgcgcggccccctcggcggcaccggagacggcgaaggaatcgcttgaatcaaatccgtttcctgacgcgttgcgcataccctcgaatctcccttcgctagtctttccgaagttgaatgctaacgcccggcattgtccgaggtccacatgacgaatcaatgcccccaacatctccgtaaatgggtgattcgttcgctgcgcgatgtgggacaatgaatgcggtaattccttttgataccaaggagcgcgcaatgaaggccgtatacgcatccaccgtcaaccatgacgatccgcttgccgcgttggcggtgggcgagcagcccgaaccccaggcccgcccgttctggtcgaccgtttcggtgcgcgcggtgaccgtaaaccatcacgacgtctggtcgctacagggtgtgggtctcgccgccgaacagacgccgatgatcctgggcaccgatgccgtgggcattctggacgaggacatccccggcaagcatgggctcaaggccggcagcgaagtggtgctgtacacgttcgtcggcaccgatggggcgggcgtggccccgggcgagcgccgtacgatcctctccgagaaataccccggcacgatggccgagaaaactgccgtgccgtccgccaacgtgttcgccaagcccgcaaacctcaccacggccgaggcggccgcactcggcaccagctggctgaccgcctactcgctgctgttcgaggccgccggcatcaagccgggcgactccgtgctcatccagggcgcgggcggcggcgtgtccactgcggccatccagctcgcccatgccgccggtctggaggtgttcgtcacctcacgcgacgcggacaagcgcgccaaagcgctgaaacttggcgcgaacgccgcgctggagaccggtgcgcggttgccgcgcaaggtcgatgcggtgatcgagtccgtgggggcggccacatggggccattcggtgcggtcggtgcgtcccggcggcaccatcgccatctgcggcgccaccaccggcgaccagcccggtgccgaactgacccggttgttcttccaggacattcgcgtgcagggctgcacgatgggttcgcgcgaggatttcgcccggctgctgcgcttcgtggagcacgccgacctgcatccggtgatcgattccgtggtcagcaggttggacgccgcccccgaggcgttcgccaggatgatcgccggcgacatgttcggcaagatcgttattgagctgtaagcctcacagaattatgtattgagaacgattcgctgcgtggcttaactccgctatcaggagtacagtgggccttattctcaataactagggagtaaatgataatggcaaatgaatccaagcccgaagtcgcagtggtcatgggatcggccagcgactgggagaccatgaagcgcgcctgcgatattctcgaccagttcggcgtcgcctaccacaagcaggtcatctccgcgcaccgcacgcccgagctcatggccgagttcgcgcacaacgcccgcgccaatggcctgaaggtcattatcgccggtgccggcggtgccgcccacctgccgggcatgatcgccgcgcagaccacactgcccgtaatcggcgtgcccgtgcgctcccacgccctgtccggctgggattcgctgctgtccatcgtgcagatgcccggcggcattccggtggccaccaccgccgtcggcaactccggtgccaccaacgccggcctgctcgccgtgcagatgctctccgccttcgagcccgaactggccgacaagcttgaggattaccgtaacgaactgaaagaaaaggtggctgaatccaatgcccagcttgtctgaggaaacaggcggtcgtgtttcgatgctgatgccgggatcgaccatcggcatcatcggcggcggccagctcggccgcatgatggctttgtccgcccgctacatgggcttccgcgtcggcgtgcttgacccgacgccgaactgcccgaccggtcaggtggccgacttccagatcaccgccgaatacgatgacaaaaccgccatccatgatctggccgtgcagtccgacgtgctcacctacgagttcgagaacgtggacgccgatgccatcgacgaggtgcgcggcatcaccgccaccccgcagggcactgacttgctgcgcgtgacccagcaccgcgtgcacgagaagcagttcatcaacgaccacggcaccgccaccgcaccgtggcgcgccgtcaacaacttcgatgagcttgacgccgcattggatgatattcattatccggccgtgctgaagaccgtgtccggcggctacgacggccacggtcagctcgtgctgcgttccgacgccgacttggagaagatccgctcccgttccgaccgtggtggcggcttcccgccgagcatcctggaaggcttcgtcgacttcgcattcgaggcttcgatcctggtctccggcaacggcaaggacttcgtcaccttccccatcgtgcgtaacgagcaccgcaacaacatcctgcacatgaccatcgcccccgccgaagtgtccgaacatgtggctcgcgaagcgcatgaactggcgattcgcttggccaagggcttcgaactggctggcacgctggccatcgaactgttcatcaccaaggacgatcaggtcatcgtcaacgagctcgccccgcgcccgcacaactccggccactacaccatcgaggcctgctcgatggaccagttcgacgcccacatccgcggcatcgccggctggcccatgcccaagcccaagctgctctcgccggccgtgatggtcaacgtactcggccagcatgtggagccgacgcgcgcgctgatcgccacccacccggagtggaatgtgcacgactacggcaaggccgaagtgcgccacgaccgcaagatgggccacatcaccgtgctcaccgacaaccctgatgccacggttgctgaccttgaggccaccggctgctgggacgacctgaaaaagaaggcgtgaccttatcgatggttgaacatatcgaacgccagaccaagcagaaggacgcgattcgcgccgccttggccgactgtgaggagttcatctccgctcaggacctgcaccgcaggctggaggacgaaggctcgaaaatcggcttggccaccgtgtaccgccagctcaacgccttggccgatgccggtgccgccgacacgatccgcctggacggccagcagctgttccgcctatgcggcgacgacggacatcaccaccacttggtgtgcaagcggtgcggcaaaaccgtggaaatcgacccgcccagcgaggcttggctgcgcaaagtggccgacggccacggcttcaccgtcgaatcccacaccctggaggtcttcggactatgccctgattgccaaaaggagcagaaagcgcagaaggctcagaaagcagtgagcgaataattgaatgggatcggcttcaaagccgatcccatttgttattccgctgctattccaccgacttcagggcgccgagcatgtcgaccgtcttcaaccgccggtagaccagcacgccgagtccgccgagcaccttgatggtcggcagttcgcggatacgttcggagacgttgagattcgtcagattgtagaggatcaccacggccagcagctcagccgcgagaatcagcacttccatgatctgatccggcaagtcgacgattgtggccacctgtttcttcgaagtcgtgttctgcacaatgcccttcgcgccgtccaactttatgagcttggcgctacgcgactccacattggaggtctcatggttcttgagccttaccatataggcgttcgactggtactgttcgccggacacgtgcttatagccacccgaagtcatgaacatgaaatgcccgatatgcatttcggtgatgccgtccacgcgcaccttgcgctcggtaccgctcgaatcggtgacggtaatcgtgtcgcctaccttggcgtccatcatctccgccatacgttcggagatgatcgcaccacggtcggtgagcacctgcggcttgtgcccggtgcgcgaacgcagggtgatgtagtcgccgaaattgtaggcgtcatcagtggcgatcagggtaatcgactgtttgtcgttctccttgccggccactttcgacatctcctcgtagtagatcggcgcggactcggagacggccccgcccctcatcgccttggccacttcggcgcgctgcgaataatgttttcgtcagctttggtcaggccataatcgctgatgacggttatgtcagcgagattgttctgattaaagaagtcggtgccggttatttgcatgtccgggccggtgacgaacaggcctacgagcgcaaaggagccaagcgtcatcaggctcacgatggaggcgaatcgacccttggatttggccatggtgacgcgggtgtctttccatagcatgcgcttatggaatgacccgttgcgtcggcggttgcgcttggccttgtgcgcgtggggcgttctgccgggcgcggtataggagtcgtttgctgaatttgcggcggaatcggttgcggagtcggtcgcgggcgtaaggttggtcgtttcggtgaaatcattgagatcggtcatactgcttaccactccagatccttgatatccatcgggtgctcgttcacttcgatcgatttgacgcgcgcgtcatgcatgtggatcgcgcggtcggcaatcggcgcgatggcggaattgtgcgtcacaatgaccacggtcgcacccttcttacggctctgatcctgcagaatctgcagcacctgcttgccggtgttgtagtccagagtgccagtcggctcgtcgcacagcagaatcttcgggttcgtggccaccgctcgggcgatggccgcgcgccgctgtccgccgcccgaaagctgcgcggggaagttgttgatacggtcctgaagccccacgtcgataagcgcttgggtcggttcctgcgcgtctttcatgatttcggaggcgagctccacgttctccttggccgtgaggttggccaccagattgtaggactggaacacgaagccgaggcgttgcgctttgtcaagcgtgagtatgcgttcttcgacgcactgtcccgttcgggcaacgatatgcagatgtatgaccgggtcaaggatgtgttgaagcagatgctgcttgggcaggcggcccgtgtgggtgcc

SEQ ID NO: 1848 - DNA, 8426 bp, Unknown
  MAG_14  MAG No. k141_52966
caacgatcgtcgtgatttccgtcgcgatgatcgccgtgacttccaccgcgatggtgagcgtcgtgacttccaccgcgatggtgagcgtcgtgacttccgtcgtgacaatgatcgtcgtgacttccgccgcgatgaccgaagggataacgatcgccgtgatttccatcgtgatggcgatcgccgcaacttccgcagggacgaccgccgcgacaacaaccgtcgtgacggcgaattccgcgagttttcgcaggaagagaagcgccagtaccgtgaggagaagcgctctgaatacatgaggcgtccgcgccgtaactccgacggcacgatgagcttcccctcgcagaacccgtacaccgaccgtcgtcccgacgagcccaagatgcccaagggcatggaatggtcgatgctgtccaaggatgagcgcgaacgtctgcgcggcctgtccaaggagcatgcggagaacattggtctgcacatcctcgccgctttcgcgctggaggagagcgatcccgaacttgccttggagcacgccaagtgggtggcccgtcaggcctcccgcatcgactttgcccgcgagacgctcgcgttcgtggcctaccgtcagggcgactacaagctgtccctgcgtgagttccgtaccgcctaccgtatgaacggcttcctcgactacctgccgttcatcgctgactgcgagcgtggtgtcggtgaaccgaagaaggccgtggaactggcgctgtccgatgagggcaagcagctgcatggcgctcccaaggtcgagatgttcctggtgtatgccggtgcccttggcgatttggagatgtgggacaaggccattgaagtggttcataccgtcggccgctctcagggtcttccgggtgagtaccgtatgcgtgccgtgcaggccgagcagtacttccttgaagaggccggccgcagcaaggaagccgagcagcttaatgacctgctggaccgtcttgaggatcagtatgccgacgaggagattgacgaaaacagcgacgacgtggtgattgaccacgatctcgaagacatcaccgacgactccgacgtgctcgagaagctcggcatcgatccggacgaagcgcagtacgccccggatccggagcaggaatacggcgatgaggacgacgaggctgaagacggcgatgccgagtctgatgaggccgatgtcgaaaatgctgagtccgaggatgcatcggaagaatctgaggaatctgaagccgaggagtcttccgagtccgctgacgatgccgttgaaccggctgagtccgacgagaccgagaccgaaaccgaggagtgagcggcgtaatgacccgtttcctcaaaggcaccgatcgcccgctcgccgaggcctatcagcttgcgctgctggacctcgacggcgtggtgtatcgcggcaagaatccggtcgaatacgcagccgattccattcgtgcggccgaagccgccggcatgaccatcgaatacaccacgaacaactcctcgcgcttccagcacgtggtggccgaccagctcaagggcttcggcttggacgtggagccgtggcaggtcatcacctcttcggtggtggccgcccgtgtggtggccaaggcgttgcccgccggcgcgcgcgtacaggtattgggcgccgagcatttgcgcgatgaggtcacccgcaacggcctgaccatcgtggacggtcctcaggaccgcccgcaggccgttattcagggctggtatccggatatgacttggcagatgatggccgatgccgcgttcgcggtcgaggccggagccacgtatttcgtgaccaaccgcgacctgacgattcctcgtgaactgggcatcgcccccggttgcggatcgatgattcgcgccgtgatcacggccactggcgtcgaaccggtcgcctccgctggcaaaccggaagcgtacatgtacgatgaggcccgcgaactgaacgccgccgaaggccacgatctggtgcccaaggaggcgtccatcgccattggcgaccgactcgacactgatatcgaggccggtaaccgcggtgactatgattcgctggcggtgctgaccggtgtcaccaacccgaccgaactgatgctggctccggcacacctgaggcccacattcatcgcccttgatctgcgtgaactcggcgaagcccaaccggagccggtccgcgacgagagcggtacttgggaatgccgcaaggctagcgcttggtttgaaaacggccaggtacacgtcagcgaccccaccagtatggacggcctgcgtgccgccgtatgcgccgcatgggaagccgccgaccaaggcgcacagctcagcgaggccacggtaccggtgttcgccatcgaggcatagtcctatgcctacggatagcgaacacgcgccggtcaccgagcgataccccgaacttgcggatattgatgaacaagacaacgaccgcaagcttgagacctatcgcaacgtgctggaatcgttacaacacgagcttgataacagccgcagctagcagaggagattcattctcccgccagcggaagatgacgtgaagtgctggatggtgggtccatgccgagccaccccgttggtggatggtgggtcgaaaggaaggtatatgaccgagcaacatatcgatcccgcgaccccacttgatcgcctcgacatgatgctcgtggcttcgggactggtcgaatcgcgggccaaagcgcagcgactcatcaaagccgggcatgtgcgcgtggacggcgagaccatcaccaagccatcgttcatggtcaaagccgggcacagcgaactcgccgtggataagggcgacgactacgtctcccgaggcgcttacaaactcttgggcgcgttcgagacctttgccggcaatggccttaccgggccggaaagcttggaatgtctggatatcggtgcctccaccggtggcttcaccgatgtactgttgcgcgggggagcggccaaagtcgtggcgctcgacgtcggccacggccagctcgacccgcgcatcgccaatgacgagcacgtcatcgaaatgagcggcgtcaacattcgcgaagtagaggccgacgacctgccttaccggccggcgatgatcgtctccgacgtctcctttatttccctgacctatgtgattccggtaatcgcgcgcatcgcggctcccggtgcgcagattgtgttactggtcaaaccgcagttcgaggtcgggcgggcaggactcggcaaaaacggcatcgtggaagatccggcattgcgggagcgggcattgcacgacgtggtcgcctgtgctgaacagcacggacttgacgtggtggccactgccgatagtcccatcatcggcacccacggtaatgaggaatacctgctttacgctgtcttgagatgaatgcgttggcagtctccgttcaccagcagcacgctggaggtacggtcgatgcctattgcggtggcacacgtggcgctttccaccgcactgccgttgcgtagcatggcggagtccgccgtcaaagtccggcattgcagatggttggcttcaaccgtgacggctgtgatatggcgaaccatgctgccatcctcatacccatccatatcaaaacgagaaaacatcgtactgcgcagtggatgaacttccagagccctgctgttgacgtcatgacccttcaacacgccgttcaagcggactgtctgaccgctaatatgacgggtgcctagggagccattgacggacagatttccggaacaaacgatatcgctgttgcatcgcagtttgccggtaaaggttatttcatcgcaaataatgtcgccgccgacttcgatgtcgccgctgccgttgatgctggatacgcgaatatcaccatcacaccgcacaatgccactcttgatgaccagtttgtccccttctataactgaggcctcgagggtgctggtcacaatcatggtgtgaaaatgcgcgccatcggcaagacgggaacgttggtccactcctatggtgccgtagactcctttgcctatcaacgtgcaattctgcgtatgcttgcccatgatgataaagccccctcaatatggacgtacagctttatggcttattgccccaataatgagcgcatccatgttgaggggggttatatcggtcacgatgtgagcagatagggggggtatagcgagcgcagttaggggggttagccttggatgaagtggtcgatctgatcctgcttgcccatgaggatgagttcgtcgttgcgatgcatgaccagttccttggagccgtactggaactccttgcctggggccttgaggcccaccacggtcacgccgtatttgtcgtgcacctgcacgtcctcgatgctgcgacccaccgcgtataggggcgtgtggatcttgacgacggtgtacgggccgtcgatttcgatgtaatccagataattgccggccaccagatgacccacgcgcttgccggcatcggtctccgcattgatgatgtgacgggcgccgatgcgctgcagaatgcgcgcatgctcctgggacacggacttggcccacagatcggaaacgccggcatccagcaggttgccggtgatgatcaccgaagcctcgatgctgtcgccgatggccacgacggccgtgtcgaactgggaggcgtcgatctgctcgatggccagcacatcggtcatgtcggcctgaatggtgggcagatgcgcggaccaacgggccacaagctccgggttcttatccacggcgagcacatcctgacccatctggtcgagggtggcggccacggacccgccgaaacggcccaggccgatgaccagcacgcttttgttgccgctcggttttgctgccatgatgatggtcctctctatgccggatttctgtgtgccgattgaatggccgatcagccaacgataatgttttcctgcggataacgaataggttcgggagccatcggtctgctgatggagtaggcgatggtcaacgggccaagtcgtccgacaatcatctcggcggacagaataaacaggctggccggattgccggcgcttgccacgcccaccgaataaccgcccaacgagaaggccgagcaggcctcgaacacggcgtccacgaatgcgcagccggtggtgaacatcagcatcatcgcaccgaccataaccagcgcaaagcaggccgtggtcacggacacggcggtcatctggatgcggcgggggatacggcggcggaacacggtgacatcgcgatggccggtgaatgcggcgcggcaaatcaagagaatcaccgcgaacgtggtgacacggatgccgccggcggtggatgaggagcctgcgccgatgaacatgagtatgctcatgaacaccttggtctcattcgtgacttcgggcacccaggaaatatcgaaaccggcggagcggggcatgacggcggcgctcatcgcacggcgcatcttcatgccgggaccgtctgcggggaacaggccggtattgccccactcgaccagcaggaaccaagccagtgaggtggccaccagcacagcggtggtcaccaaagtgagtttggtgtgcaacgtccaacgtttcgggctgagatgtcggcgtgcgcactgcaccagattcagcaccacggggaagccgagcgttcctatgaatgcgctgatgagaatcggcagtcccacgccccaacggttcacatgcaggccggtggcgtcaggcgtgaaaccggtgttgttgtaggccgataccgcgtagaacagcgcctgccacaatgtacgtcccatattgccgtggttcacgcggaacaggtcgggcagcagcagcacgaaggtaagcacctcggcgatgatggaggtgcccaataccacggtgagtacgcctttgacctcggaaagcttcgtggtgcccagttcgttcgcggtaagcatgcgctgggagaccttgagtctgcgggaagcgccaagagccaccatcgaggcgaaggtcatgacgcccaggccgccgaactggatggagaataggatgacaacttggccgaacgtcgaccagtattcgccggtgttcaccaccggaatgccgcaggtggacagggccgagacggcggtgaagaacgcgaccgggaagttggtgaagatgatgtccgatgtggagatcggcagcagcagcaagccggtgacgatgatgatcagtgcgccgaaatacaccatggacagacggcccgggtgcctgagcagacggtcggtgatgctgatgcggcgaatgcgcttggcggttttatcgtttttgtctcggctcagtacatcggccgaataccaccatgacaggcccttcgaggcctcctcattggcggaggattcgtcgaagtcattggccatgggtcctcaagctcctcaactgatactgctgtatggtcatacggcatgccatcgcgctgcgcacggcacgcgtacggtgatcgcgcggctgtatgccattgtatgccgaagccttacgttaatcgactctgcggaacgttgtcggcgacgcgccacgaagcggcatttttcgaacacctgtacgactgatgacggtgtctgcggctagaataatgagcagtgcgaccgaatcgacaggaggatgccatggccaagcgcaacgcggtggtggtgacgcataccaggctcaggcagaccggaaccgtagtggccgaggcggtgagccagctgcgagtggccggtttcgaagtcaccatcatcgacaacaccgaggcccccgatttcggcgtgcagccgccgtgcgtgtcggacgacaccgaaatcgtcgtggtcctgggcggcgacggcacgatactgcgcgccgccgaactcgtccactgcacccaggtgccgattctcggcgtgaacatggggcatgtcggcttcctggccgaattcgaaagcttccagatcgacgaggcgatccgccgggtcgccacccacgactattcgatcgacgaacgcatgatcgcccatgtggatgtctggctgcctggcaccaccaagcccattgaggattgggcgctgaacgacatcacgctggaacgcgccgaccggggcaagatggtcgaactgtccatccgcgtggacgatgtggagatgaactcgttcggcgcggacggcgtcatcgtctccacgcccaccggttccaccgcctacgccttctccgcgggcggtccggtcatgtggccgaacgtcaaggccctgcagctgattccgttggccgcgcatgccctgttcgccaggccgctgatcatcggctccggttcgacctttaccatcgatattctggacgattccatgtccgaaggctggatttgctgcgatggacgccgtcagcgcgccctgccgcagggtacgcgcgtcatggtgcgcgaatcgcgcgataccttgcgcctcgctcgactctccggcatgccgttcaccaaccgtctggtctccaagttcgatctgcccgtggtcggctggcgcgagcacgcgcgcaatgaggcctcgagccagccgctgcatcacgggcacacgctcccggcggccgcgtatgcggctggcgttgccggtgacgctggcgtcgctggtaccgatcccgacaagccgggcgaacgtgacggcaaggcaggagcctgatgctcgaagaactcgatatccgcaatctggggccgattcgagaagccgccattgcgccggccgcaggcatgaccgccatcaccggtgagaccggtgccggcaaatccatgctgctctccgcgatccgactggtctccggtggggccgccgaatcctcgcgcgtctcggccggggcggacgaggcttgggcccaggcgattttcgcgctcgcggatgatgccgtcgcatctgaacattccggcgacaccaacgatgccggtgacgatgccggttctgacgattctgacagcgggctcaccggtgctgccgtggccgtggccaaggcccacgacgcgggcgtcgaccccgaagacggcgaactgttcctttcccgcaccgtacgcgcttccggacgttcgcgggccgtgctcggcggcaagtccgtaccgcgttcggtgctgggggccatcgccggcgaactggtcatcattcatggccagaccgatcagctgaaaatcgcggccgccgcacggcaacgcgagtttctggaccgggtggccggagacgaagccgaactggccgcctaccgcaaggcgtgggatgcgctggccgccatggatgagcggctggaacgcctgcgctcgcaggaatcctctgcccgccaacaggccgactacctgcgcgaatccatcgaccgcatcaaccgaaccgacccgcagccgggggaggacgaggagctgaaggcgcgccgcgaacgcatcgaaaacgcggccgacatcgcccaaggcgtgggttcggcgctgggcgcgctgga

SEQ ID NO: 1849 - DNA, 23936 bp, Unknown
  MAG_14  MAG No. k141_54292
ccaatcaaagtattgcgcgactaatggccgattcaagccaagctgttcgcgcaactgggccacgcgctcgggcggcgagttgacgccagccatcacggaggccacgtcgccgggcagaatgcgcaatgccgcgaaaatcaccacggacaggccgagcagcgctacgacaaacaacgccagtcgtttgagcacgaatcgcataatgcctactttactcggggttactttcctttggctcccctcagtcgcctacgatgacggctccccctctctgaggggagctgtcgcgcagcgactgaggagaggtcataggaggaggaggatgactgaggccatcctcagtccgcttcgcggacagctcccgccagcgggagcacttatttgtagggaaatcctccagttcaaattcgttggacagctcccgccagcgggagcctttattgattctgtaagaaagtcgtctcagagcatttccagcgttcacccagtcgagtaagatatgttcggcactggaccgtgagccgaaacaagccgaaccgggggatgtataccgatgaccgcaaccaacgagacgctgagcatggctaccgaagcgcaactgaagcgcgatctgccacagagcatcgtcattccgccaatccgtggcgaaatggtgcacctgcgccccgccaccgtcgaggacctggctcgtttggatgaacttgatgccttctatggcgcatccaagatcaccggcaaggatgcggtcaccgaacgcgccatcgtacacacatgggtccgccgctcccaagcctgggaagccggtcaggcacccgccgaatccggcgtgggcgacccggaatcccgccgcaccatcgcatgggccgtattgactgacgccgaccatgacgatgacggtcagctcgatgcggccagcaccgataatgtcatcggcatgattttcctcatcgacatcgacggctggtccaagtccgcccgcatccagatcatcttgggccgtgagtaccgtggccgcggctactcccgtgacgccatgccgcgtgtgatgacttacggctttgcgcccgaaccggccggcctgggcatgcaccgcatctgggtgagcgtaccggaaaagaacagccgttcgatttcggtctaccagtcgctcggcttcgtgccgtccggcacctcgcgcgacgcgttgtgggatgtcgaaaacaacaaataccaggaccttatcgtcatggacacgttggtcgacgagtacgacccgattcgttcgcttgacgcttttggtatgcacttgattgaggacaacccgggtgtcaaggaagcgctgtccgcgcgtgagcattccatcgccatccagcagaacaagccggaacccgagccggcacagcgtggtgaggcagccgccgtcacgacgagtgacgtgcagtcccaggcccagacgccggcggccgcacagccagtcgagccacaggccgggcaccacgacgatacgcagaagaacacgcgccacagtctcgaagaggaaagcaactggccgtacggccaggcggaacgcaagccctcaaaggaagcatggtggcgtacgctgggccgcggccgcaaacgcgatacggaaagtgagtgagtaaacaagcatgagtgccgaggatctcgacaattacgaaaccgacgccgaactcgcgctgtatagggaatatcgtgacgtcatcaagctgttcacctatgtggtggagactgagcgtcgcttctacttggcgaataaggtcgatttcaacgtgcgttccgctggtcaggacgtgtatttcgatgtgcagctgactgacgcatgggtatgggatgtctaccgttccagccgtttcgtcaagtccgtgcgcatcgtgaccttcaaggacgtgaacgtcgaagaagtccagaaaaccgatatcgacattcccgacgatattcactgacaggcaatcgtctgatacagcctgtattgacaatgcgcggcattccgtcatcttacggcggggcgtcgcgcattgttcatacaacgcatagcaaaagttcagattcgtaaccttgccatcgtgtgtcttgtttgcttgcggttgatagaagatgatgctgcttgcacttgcaggaatctcgctgaatctatggaaggttcgtcgctgacgaattagcccaagaccaaaccgattcgccgcgctgtgcgtgacgcagcgttgccgaatacccctacctcacgattggatgcgtcgcctttctgctgatggaagacggcgcatcggtcgtatatcgggagaattctgtaagcattcgctcatctttcggtgtgcgattccggggcttctagtaaactgtctctgattttgcgtttataaggagcataatgaccgacaagcaatccgtagtgattatcggcggcggtccggctggacttaccgccgcatgggaactcgtcaaggatggcggcgcggaaaactatgacgtgaccgtgctggaggggacccgcgaattcggcggtatctcgcgcaccgtgaagcacaacggcaaccgcatggatatcggcggccaccgtttcttctccaaagacgaacgcatcatggattggtggaagaccgttctgccgttgcagggcgcaccctcctatgatgacaagaagctcggccgcgaccacgacatggagccgggcggccccgatccggagacggaggacaaggtgatgctcaagcgccaccgcgtgtcccgtatcttctggaaccgccacttcttcgattacccgatttcgctgagccccaacacgttgaaggccatgggcttcaagctcaccatggtggccggcttcagctacctgaagtccatgttccacaagctgccggaagacaacctggagaacttctacatcaaccgtttcggccgcaagctgtattcgatgttcttcgagggctacacggagaagctgtggggccgccacccctcccagatctccgccgactggggcgcccagcgcgtcaagggcctgtccatcatgggcgtgctcaagaacgccttccagaagcttagccccaggaagcgctccaacgcggaggtcgagacctcgctgatcgaggagttctggtatccgaagtacggtcccggccagctgtgggagaccgtcgagtccaattgcgaggccgccggcgtcaaggtgctgaccgacgccagggtggtcgaggtccgccagaccgatggcgccgtgtcttccgtggtgtacgaggattccgagggcaaccgcaccgagctttccggcgaccagttcatctcctcgatgccggtcaaggacctggtcaacgccatcgacgcggccggcgacgatcccgaggccgctgattccaagcccgccccggccgatatgaccgaggtggccaacggcctgccgtaccgcgacttcgtgaccgtgggcctgctggtcaagcacctgaagctcaagaacaccaccaacatccccaccctcggcaatccgccgatcgtgccggactgctggatctacgtgcaggacccgggctacaaggtcggccgtctgcagatcttcaacaactggagcccgtacctggtcaagaacgtggacgacaccgtgtgggtcggcctcgagtacttctgcgaggagggcgactcgttctggaacatgagcgaggaggacgtcaccaagttcgcgatctccgagctcacccgcatgcgtgtgatcaacggcccggacgaggtcatcgactcccatcgtgagcgcgtcaagaaggcgtaccccgcctacttcgacacctacgagcacatggacgagctcatcgagtacctcgacggcttcggcaacctctactgcgtgggccgcaacggccagcaccgctacaacaacatggaccactccatggccaccgccatggaggccgtcggcaacatcaagaccggcaagacgtccaagaagaacgtgtggtccgtcaacaccgaaaagtcctaccacgaagaaaagtgaataaaccttgttgagctccctcgtcacagagggagcttttttggttttcggcgggccgttttgcgttggtcgagttggcgttgtacagtaaacgaagttcgtgaaaactcagagacgcagcgaacattcatgagcggtgcaaccgcaataatcattcttaacgcctggataggcatgggtctgttcggtatggaaagggcaaccagtggcaaatagccagaatcttgaggatatgaagctgcctgagctcaaagagctcgctaaacagatgggcctgcgcggcacgtcgaccatgcgcaagcccgagctgctcgccaccctgcaggcggcgcgcaatggtggagagccgccggccggtgtgaccgtgcgcgctcccaaggccgccaaaaccgccaaggtcgtcaaggctccgcagtccgatgccgctgaggccaataccacagacaatgctgacgtggccacccagtcgccggctccggctccggccgccacggaaccgcagctcgatttgccgcttcccgtggccgacgatgccaagaaggacgagaccgaaccgcgacgcacccgtcgtaaggccgccgatgatgccgcatccgaaccgcgtgcggcccgccatcgtcgcgatgacgaccagtccgatttcgctcgccgcaagccgcgcaagaaggccgatgaggccggcgatctgctggccacgctcgatttgggagatgcagcgcctaccgagcgtcgccgcgagcgccatgaggacgtggaagttccgctgattcgccgagtccgtgatgatgaggacgagcagcctcgccgccgtcgtcgcactgcggaaaacagcgaagaaaccgtgcgtgacctcgacgatatcctggccacgctgcccacgcagaagcacgaggaaacgtccgaagacggcgagcagaacgacgatcacgagtttgtgcgtcgtaaccgccgcgaccgtagcgatcgcaacgatcgcgataaccgtaatgatcgcaacgatcgccgtaaccgccgcatgcgtggccgtgatcgcgacaacgccgatgatgatcgtcgctatgatgatcgcgataatcgtagcgatcgcaatgaccgtgatagccgccgcgaagagccgcaggaggatctggtgccggtggccggcatcgtcgacgtgctcgactcctacgcttttgtgcgcacttccggctacctgcccggcccgaacgacgtgtacgtttccatgggccaggtcaagaagtacggcctgcgcaagggcgatgccgtccatggttcgattcgcgccccgcgcgaaggcgatcgtcgcaaccaacgccagaagttcgtgccactgcaggccatcgattccatcaacggccaaagcgttgaagaagcgctcaaccgtccgcagttctccaagctcacgccgctgtacccgcaggagcgtttgaagcaggaaaccgccccgaacaagctcaccggccgtatcatggacatcgtttccccgatcggcaagggccagcgtggtctgattgtctccccgccgaaggccggtaagaccatcaccctgcagaacatcgccaactccatcgccgccaacaaccccgaggtccaccttatggtggtgctcgtggacgagcgccccgaagaggtcaccgatatggagcgcacggtccagggcgaggtcatctcctccaccttcgaccgtccggcctccgatcacaccacggttgccgaactggccatcgaacgcgccaagcgtcttgtggagctcggccaggacgtggtcgtactgctcgattccatgacccgactggctcgcgcttacaacatcgccgcccccgcctccggccgcatcctgtccggtggtgtggacgcgcaggccctctacccgccgaagaagttcttcggcgcggcccgcaacatcgaaaacggcggctccctgaccatcatctcctctgcgctggtggaaaccggctccaagatggacgaggtgattttcgaggagttcaagggcaccggcaacatggaactgcgcctgtcccgcgagctggcggacaagcgactgttcccggccatcgacatcaacgcttccggcacccgccgcgaggagctcatcaccaatccgcaggaactgccgattatctaccgtctgcgtcgactgctgggcggcatggagccagagcaggcctaccagaccctggtgccgcgcctcaagaagaccgccaccaaccgcgacttcctcgccgccatcgtgcagcaggccaacaccggcaacgcggtcaacggcaactgaccagaccgctgaacaatagtgtaagggctgcaccccgattgatacggggcgcagcccttgccgtatatgatgcaaatacatcaactatcacattgcagttgtagtattgccgtcaacgttcacatgcacgctgacgatatatgagatgaaagatgtatcaatgggttcgattgttttgggagtgggcaatggtgcggccatgttcggcgatgcggatgccagccatatcccctacggcgactatgacatctgagatatctgactttgcgcatcgtgcaaagccgcaatcgggagtatcctcgaatctatgagcgaaacgagcagcggctggcaaaggaccaccatcgactccgcccaggcggcggcccacccggaaaccgcacaagcggtggcgcgcatcaaagcgctgcgccaaaccatcgataacatcgattcggcggccatcgcattactggccgagcggttcaaggccacctcgcaggtcggcgtgctcaaagccaacgccggattcgcgcccgaagacaccaagcgtgaggactatcagatcgaacgcctccaccgcatcgccatcgatgccgggcttgatccggaaattgccgaaatgtaccgtgaattcgtggttaccgaagccaagaagcgccaccagcgcatcgccgatgccggtggcgacccgggcgtactcgacgtattcgcctgattcgcccgcagcgaatgggcacctttcggatattcgtctatagggcaagttgccggcagcgactacattaatacgggaatggaatgcccatagtggccgactgtatgaatgggatacgtagatgagatgtggtgccgcactggtcagttgcgcattgtgcgtggcttcgattctcggcggtgcttggatgtctcgtccgactccggttgattacggtccggtgctcgctacggcaagtgatatgtacgccgtcgccgatgccgaaggggagccggtccgttggtatgtggtagggaagggcggcgccggcaatggcgccagtgccgattccggcaatagcggttccactgataccgattccgccaatagtaattccggcacgtccaaggtttctcgtatccccgcttccgccgccaccctgccatggaaagtcagcgtcacctactcgcttgacggtccaaacgtcgaggcaaacgaggttgccggcgcatctggactgatcggcgtgtatatcgatattaagccgcaaaccaaggaggccaaccgtacgatcccggttgtcgcctttaccgtgcctacgcaggtagccgatgatgtttccgctgacaactccattacggtaaccacgcaaggttccaataccgtagtcgccgcagctggaaaagccgcaaccggcttggaattcagctgctatatgaacgccaaagacttctccatgagttccgtggcgctcgccgtattgccttccaattccagcagtccggtagttggtgctaatcccgatgccgcgaatgccgccgcacagcctgctgccgatacggatgtcgcccaactcgtcgcctctgccgccatactggtcgattcactgaccgacgccggttccggggagcatcaacagctcatcgagcagcttcaaaccctgcgcgataatgagcgtgcgctggacaagtccgtagtggccgaacgcgaaaccgcccataagcggacgtttgaagactatatggccgcgtatgtgggctcatataccacgcacctgtctggatcgattggtacctccacccagttgccggcgttgatgggcacggccggcgaactgtccggggatacgcctttggcgcaagccgtactcgacttggccaacgcggtgaacaacgtcagtgccgcacatcagcatgccggtgcggtcgatgcgttggatgaggtgattcgccgcatccagcagcaaggcaccaccggactggtggatgatctgaccgccgaggcttcggaggaagccactcgaggctccaagcaatacgccgatggccagagccagctctccgccgcaatgattccgtattcgatgaaatacacggacgtctacacggccaatttgagcgccctgaccggcggcacgtcttcgggcgccaccgcttacgagagccaagccatcgccgaaaccaacggtagcgatgaactcgccgacgctcaatccaaggtcgatgccgcgatgagcacgcttgccaccgcctccgagcatacgggcaaagccacggccttgcgccagattgtattgcgattctccgatcagttcgaaggagtcgcgtcctcggcttccggcagcgatggcgatggctcgtccggtgatgtctcttccggtccggtgaccgaggctcaggcactgactggcctggtcgattcgcaatcgcaatcgttctacggcaagacccgggccgcccaagccaagcgtaaggccgatgccgcccgtaagcaggccaaagccgcgcaacagcagcagtcgcagcattccaaggcctcactggtcgatgacaccatgtccatgtctgctggcgatgtgatgaactatgcgggtggtcttacttcggccatcggtggtggaggtaagttcgattcgtccaagagcgatggttcgggaacgaacgactcagccaagtcgagcgatactggcgattccggcaacaatcttgacaccgctccagtactgttcggctttggcactggcggcacgctgctcaagcatgacatgagcgcgctgatcaatgagaccgtggagatcagcgatgctggcacgctcttggcgcaggccgtcgcgcagctcgatagccccaatacgcaacaaaaaaccgccgaaacccgatacctcatcgtgattccgacggtgtgatggtgtatgcgggaaaatccgcatgcgacaggtgcccaatatgcgtaaagtgcgttatcggtgtgggacgccgcatcaaaaactggctttttcgatgcggcgtcccacaccctcttgtaagtcagagctaactatagtttgaagaatggctaaattccaaggatctgttgattcggtctgtgggacgccgcgtatataaaacgtttgacacgcgtggtggcccacgctattgtgggccgccagcttacaatgcgggatatttgcgtgccgtcccacagtcgtgtcatccgaacgtcaaaaaacaaaagaggggaacctcaataggaggttcccctcttttgttgttgtgcgcaacgctcagtgctttggcttcttggctggcggctcaccgagctcgctggcttcgacggcgacctcggtttcgggcgcgtcttcggcggcggattcctcggcgtgcttggccaccaagtcgaacttgccgaccacgcgaccggcctgcgcgatatcgcccaaggcggcgtgaatcgcgttcacaccttccgaagcagcggacagtgccacagacaggattggggtcttcatggagaccttggcctcggacttgatcttacgcagctgctccacggccttgccggcccaagtcagcagctcgggggaagcaccggtggcggcctcgacatacgggtccacgaccggccaggcggcgcgatgcacggaaccggaaccggcgtgcatccagctccacacttcctcggtggcgtacggcaggtacggggccagcagacgtgcgaaggcgtccaagcccagacccagagcggtgcgggcggacttcacagccttctcggacggcacattgccgtgctcgtccggagtgccataggcgcggttcttgaccagctcgatgtagtcgtcgcagaactgccagaagtaggattcgatgacttccagcgccttggaatgctcgtaggattccagcgcctcggtggcctgacgcaccaccaaagccagcttggccatagcggcgcgatccagcggttcggtcacatcggccgggttccacgaggtctcggcggcagcgcccacgtgatggttctcgtcctcacggccgatggccagcgcgaacttggtggcgttcagcagcttgatggccagtcgacggccaatcttcatctggccgatgtcgtacgtggcatcgaggcccaggcgagcggcggcggcccagtaacgcacggcgtccgcgccgaacttctcgatcggctcgttcggcaccacgacgttgcccttggacttcgacatcttcttgtggtcggggtccagaatccagccggacagcgtggcatgggcccacggcagacacttgttctccaagtgcgcgcggtccacagtcgagaacagccaggtgcggatgatgtcctgaccctgcgggcgaaggtccatcgggaaggtggaagcgaacagggccttggaggcctcgtccggctcggcccagtgggtcacgatctgcggggtcaccgaagaggtggcccaggtatccatgatgtccttttcggcggtgaagccgccgggcacatcacgctgggactcgtcgtagccttccggcacatcgatggtcgggtcgatcggcagacgatcctcgctcggggtgatcgggcgatcgtaatccggctcgccggaagcgttcaccgggtaccacagcgggaacggtacaccgaagaagcgctggcgggaaatcagccagtcgccgttcaggccgtgcacccagttctcgtagcgcacgcgcatgaagtcggggtggaactcgagttccttgccgcgctcgataagctcggcgttcagcttggcgtcggtaccgccgttcttcaaataccactggcgggaggtgacgatctcgagcggcttgtcgcccttctcgtagaagttcgtcatacgcttggtcggggtcggctcgccgtccagatcgccggactcgcgcagcttgtcgacgatgatcttgcgggcggagaacgtggtcttgccagcggtttcggcaaagacctcacggccggccgggtcggtgatccaatccggggtgtccatcacgatacggccgttgcgctggatgatcgggcgggtgggcagcttcagatcgcgccaccactcgacgtcggtcacatcaccgaacgtacagcacatggcgatgccggcacccttgtccatttcggcggccgggtgagccagaatcggcaccttgaccttgaacagcggggagtagacttcctggccgaagtactgcttgtaacgttcgtcattcgggttggcgatcagcgaggtgcaagcggccagcagctcggggcgggtggtctcgatgtagattggggtgccgtcctcaaagcggaaagccaccttgtggtagaagcccgggtattcgcgggactcaagctcggcctgagccactgcggtctggaaggtcacgtcccacaggccgggggcgtcctgctggtaggcctcgccgcgggcaaggttgcgcaggaaggccttctgagccacgcgccgcgggtgctggccgatggtgtggtaggtctgcgaccagtcgatggacaggcccagcttgcgccacagggcctcgaacagcttctcatcctgagcagtcagacgctcgcacagctcgatgaagttcttgcgggaaatcggcacctgatccttggcgtcgatcttcttgccatcagtgccctcgaacggcggcttgaagtccgggtcgtaaggcagagacacgtccacgcgcacgccatagtagttctgcacacggcgctcggtaggcaggccgttgtcatcccaacccatcgggtagaacacgtcgtagccgcgcatgcgcttgtaacgcgcaatcacatcggtgtgcgtgtaagagaacacgtgacccacgtgcagcgaaccggagacggtgggcggcggggtgtcgatggagtagacggccttgcggtcgcgggtattgcggaatttgtaggtgccgtcttcatcccagacggcgcgccacttgtcctcaagtccgtccacaccgaccttgtcgggcagcggggtgaggttggcgttgatgatggatttgccttcagtcataaagccaaagtttatgcacgttgcatgacaagccgaactgtacagtaaacagcccagtaggctgttcgcaggcgagatacgaacgatcgaacgatagtgagccaaggactatcgggcgtagcccgtccgtgactgaaggttgcctacttcaccgtcaacccggccagcggcatgcgacgattgatcatcgaggtcgggtagccggagaccttggtggacgccacagtgaagcatttgcgggtatacagccaatcactggccgcatcctcgctgatcagccgggcgtacgccttcattcgtgcctcataatcggcgtcattagtggcggcgcgagcatccgcataggcctgttgcgcttcggtatggtcgtaatggaacatggaatcggggtcggcgaatatgccggcatcatccgtgccgtccatgctcatcacggtcagttcccatttgccgtccttgattcgtttggcataatcctcatcggagagcacttcaaggttcaccgtggggcgcggctgccgctcgatctgctgcttgatggtttcggccaacgaccggtattcttcgggaaccaccagattcaccgtagtcagatattgcgcaccgaagtaggagaacatctgcccagcttggttttcgtcatgcggatacagtccggtcaaatcttcgtatccgggttccagcgggctgatggggccgcccaatgctccggctgcgtcgggttgggcggaggcgatgccggctgcgtcgatttgatagcggaaggctttacgcgcctgttcgtcggagagcagcgaatcgatgccgttgttgtaggccagcagcaccttatccgtagtggccccctccttgacggtcaggccatccttgccgttcaaaccggtggccgtcgaagccgaaaccggtgccgccatatcgagactgccgtcggtcagggccttgctgagcgcatcggcgtcggagtattgcataaattcaacgatattgctggccgcttcggtgccatggtaggtatcgctgcgcgccagcttcagggaatggccaggctggaaatcggccacggtgaatggtccggaacctatggccttgcgttgataatcggcactggacgactcggaatcgtagacaatgccgagtttgccggacagcgctcgcagcagcgtcggattgggcttggcaagcgtaatgaccaccgtggtggcgttcggattggcgaccgacgtcagatcgcccaattcgtcgacgtccgccaccttgttggtcacgttctgttgcaacgaccacacggcgtccgaggcgtccaacgtatgaccgttcgagaaggtgacgcccgattgcagtgtcagggtgacggtcagtccgtcatcggaagtcttccagcttgtcgccagtcccggctgaatcttgttgtcttgatcgacggtcactaatgtctcatacacattgtcgacgagcaggcgctcggctgccgcagaggaatcggaccgaatatccaaggattgcggcatatcgtcgatgccaatggtcacatcggcatcgagggatgatcccggctggaaccggttttgcatgaacgtccatcccgcaaccacgagtgcgccgagtgccacggcgactccgagaaaaatcccccacttggaccatgtattgttccgcttgctgtgctgcatggttttcagtctagcggtggattcagcctagaatccgcaattcaccatgatgaggtatgagttagcgcttggacgtgctcttgccggcgggcggcgcatagctagggcaggtgtcggacagcgggcagttggcgcagtcgggggtacgtgcgtggcaggtggcccggccgaacagaatcagtcggtggctgagattcgtccactcttcgggcggaaaacaggcggtgatttccttctcgattttcacgggatcagggtgtgcggaccgccaatccgaccgccaacgcagtcgtccggttacgcgcatcacatgcgtatcgaccgggaatccggggatatcgaacgcgttgccgagcacgacgttcgcggttttgcggccgacccccggcaagctggtcagttcatccatcgtgcgcggcaccacgccgccgaaccgttcgtccagtgccgtggccagtccgatgagatgctgggttttcgaacggtagaaccccagcggatgaatgatgtcttcgacttgggccgggttcgcggccgccaagtcacgggcggtggggtaggtggcgaacagttccggggtgaccgtgttgacacgcttgtcggtggtctgggcgctgagcacggtggcgatcagcaattcgagcggattcgagaaatgcagtgcgcaagcgggtgccggaatcacctggcgcagaatgtcgtattcgtcatgcatgcgcgtgagacgcgcggatttggtttctctcatcgtatggacctaagcggcgtaatgtcgatgattgatggtttgtagcgctgctggtctgtcaggcggcggtgttgagatcgggggtatcgtcatcggtgccgatggcggcagaggatgctttggcggcctgctgtgcggcggcagtttccttatccgtctccggcgggtcgaatcggtagcccacgttgcgcacggtgccgatgaggtgttcgtattcgccgccaagcttggcgcgcagacgacggatatgcacgtcgaccgtacgagtgccaccgtagtagtcgtagccccatacttcctgcagcaactgggcgcgcgtgaacacgcggccggggtgctggaccaagtacttgaggagttcgaactccttgtatgccagatcgatggggcgtccatgcagggaggcggtatagccgttggtgtccacaatgaggtcgccggagcgaatctggccatcttccaccgtggtggtggattcggcgggagaaccggctgctgcggctgcgggagcgttgccgcgctcggagaccaatcgcaatcggccctcgacttcagccggggaagcggtggcgaccaccacatccgcaatgccccactgggagttgaccacggtgaagccgccttcggtcagcaccagcacgattggcgtggacaggccggaagcgtggatgagacggcacaaggttttggcggtcgccagatcatcgcgtgcatccagaaacagaatggtgttctccggcatcttcaccaagctggctgcatccatcggcagcacgcggacgcgatgagaaagcagggcgagtgatggcaaaacggtggcggggtcgctggcgaaagtcatcaacgtaagatccgtcacgctaatccccctttatcctgcaatgtgttacgcaattgcttggtgtggctgtacgagtcgtcagcggcgttatgccgctttcgcgcggtttttcattattctacgcgcttgtagtggacacatgggttacaagtttgcggaatatggaacggcagacgtccatcaaccgatgacacggccgagcaccagtgcggttgcggcgatggtcacgcccatcagcattaccggcatcaggccggtaccgatccacggatagcggatatccgggtccggatcggcgtcacgcacccacaacgtggaggccacggccaaggccagtcccaaaacgatgaggatgatcagggcaacggttcccgcaacggtgcccttggcgagcatcgcgcccaaatcaggcaggaagcaccagccggccacggcgagagccgccacaccggaagtcacggcgtgagagagtgcgcggataagatgttcgcgcttctcacgagccatctggcgcccgaaggagaagaccaccagcaccaccagcagcaggcccatggccagtgcccatgaataccaaggaagtaccgagccatccgcagcggtctgatccggcggaaccttgccggtcgggaaaggtacgatgacgaaaatcagagaaatcgcgccaaacaccaaagtgacgatacgatccagcatgctgccgcggaacggccagaacacgacaaatgcggccaacgtcagagcggcgataatcaaagggatgatggggacggtgccaggggagggaatgaccgtggctgcgatgagcagtacataggacgtcagttgggccaacaacatgctcagggctttgttcttccaaccctcctgggtgatctcggtcatgatacgcctctcagataatcgaatttccatcccaatcctacgtcgggcattggaacggtgaaatcaaacaaaatagccctttctggtgaaggggcttatgacactaaatcagaacgcgataacgcccaaatgctccaacagcactttgacgccaagtagaatcagcaccacgccgccggcgatctgcgccggctcctgccagcgggagccgaacgcgcggccaatgtacaggcccgcagcggagaacagtccggtgaccacaccgatgctgaggatggcgaatgccatatgggctttggtgaacatgaaggtcaggctcacgcccacggcgaacgcatcgatgctgcaggccacggccaggggaagcatatgcttccaatcgaactgggcggtctccttggagttttcctcatcttcttcgaaggcttcgtgaaccatgttgccgccgatgaacaccaacagggcgaagatgatccaatgatcgaatcgggttacgtatttgctgaatgtagatgccgcgaaatagccgagaatggggaacagcatctggaatccgccgagccagagggcgcttttcgcggcgtcttgcactcgtacgcgggatacggccagacctttgccaatggatacggcgaatgcatccatagctacggaaacagaaataagcaggatttgaatgattatcggaatcatggtgcgacagaaggttcatcgccggattaccgtgcgatgggcctcgaccagcgttcctacacgccgcctacgcctagctgaaaaatacaccagcactatatcacgcgatgcacgtcgaatcaaaaaggcgggaggcctccggagaggtctcccgccgacgattcggaatcgaatcacttgccttcgttcgcgagacgctcacgagcggcaatgatttccttctcggcggcgtcagcaccggtccagtagtcgcccggcaggacttccttgcccggctccaaggccttgtactgctcgaagaagtgcttgatttcggccttgtggtactcgttgacgtcgtcgatgtccttgatgtcatcgaaacgaacgtcggcgggcacgcacagcaccttgtcgtcgccgccggcctcgtcgaccatgtggtacaggcccacggcgcggcactcgaccacgcagcccgggaacacggagttcggaatcatcacgagagcgtccagcggatcgccgtcctcgcccaaggttccgtcgatgtagccgtagtcatccgggtaacccattgcggtgaacagggtacggtccaggaagacgcgaccggtctcgtgatcgacttcgtacttgttcttggagccgcgcggaatttccacaacgacgttgaaggtttctgccatgtcatttctccttgaaaatcgacagttacgttatcgtctcaccacaataccctgtttgcgcctgcaaaacaggtgcggaactcaagaaaccgtgctgagattatgccgacactatgtctaaacagacgaaatcctcccctcaaggggaggatttctagcggtttacgcacacgataaacccatgcacgtcaacggcatcactgttgcattaccgttgcactaccgcatcactgcacggacaggatgtgggccacatccgcccaaggagccagagacacgtagttgtcccaaccccactggaattcgcggccggtcagctcgtcgcgcacgttgagcgggcggtcggtgggcagacccagctcgccgagttccaggtgaatcatcgactggtgtgcgttgtgtccatcgaggttcacgaccacaatcagcgtgtccgcttggccggtaccggtcagttcggccggcgtgtggcgtgcgaaagccagaatattctggtcggacgtaggcagcacggtgaggttgtggtagctcaacgcggccgggtgggcgcgacgaatcttgttgagcgcggtgagcatctcggccacgccgtactgcttggccttgctccaatcgcgaaccttgacctcgtacttctcgttgtcgatctgctcttcgaagccggggcgctgcttgttctcgatgagttcgtaaccgttgtagataccccaggacggcgagcccatggctgccagcaccgcacgcacgcagtggccggctacgccgttgtctcgcacgtaagcggtgagaatatccggcgtggtgggccagaaggtgttgtgctggtagtagccgtcgtcgccattggtgatcggcagatactcttccagttcgtccttggtgttgcgccacgggaagtagcagtgggactgggtgaagcccacgtagctcagggcacgcatcatgcccgggcgggtgaatgcctcagccaggaacaggatctccgggtgcttcttggtcacggcggcaatcacgtcctgccagaaacgcaccggcttggtgtgcgggttatcgatgcggaagatggtgacgcccgcctcgatccacagattcatgatgcgttcgacttctttttcgatgccgggcatgtcggcgttgaagtcgatcgggtagatgtcctgatacttcttcggcgggttctcggcgaaggcgatggagccgtctggcttgtgacggaaccagttcgggtgggccttgacccacgggtgatcgggcgagcactgcagtgcgaaatcaagcgcgatttccagacccagttcatgtgcacgctggcacagggccttgaaatcgtccatggtgccgagcagcggatccacggtgtcgtggccgcccagctcggagccgatgccgaacggcgagcccgggtcatcggggccggcgaccagcgtgttgttgcggcccttgcggttggtcacgccaatcgggaagaccggcggcagatagacgatgtcgaagccttcggcagcggcgcgttcgaggccggccatcgaggtcttcagcgtaccctgaatgatcttgccggtgttcggatcgatggtggcgccttcggaacgtgggaagaactggtaccaagccgcgaagctggacttcgggcgttccaccttgaaacgctggggctggctgggggagatgccatcgcgcagcgggtgagtctcgtgcagggcggcgatggtagggttgtcgccggcggcgaggcgatcctcggcgctcagcgtctgatcggccatggtctcagcggccttctccaaggtcttgcgatcgcgtgcggtcaggccggcgtccggggttgcggcccaacgggccagcagctcggcaccggaattgagcgcgttgtccacgtcgtccatcacacgcaccttgatacgggcgtcatgcagccaggagacgtacgtgtcttcccaaccttcgatggtcacggtccattcgccgagctgacgcttgacggccgcgtagccatcctcccaaggcttcagatcgctgtgttcgccgcacttgaccatcacggtccaacgatcgaggccgggatttacgcaggtcatggcccggcgcatggtttccttgccgcgcgggttgcgcacgatggcggtggcacccaccttggtacggccttcgatgaacacttgggcggtcatctcaaacggttcgccgagttccacacgggcggggaagatgccacgctcctcggcgggagtgatgtccatgacattgatgcggccgaactggccgggctcgtttgcttcgatggacggtgcgggggcttcgacagccaggcctttcagcgctgctgcggcgcgtgccgtttcggcgctgactctcttgcgcttggttgcggggctctttcgggcagaagtcgtctttgacttcgtcttcgtggtgttgttatcggtattactagtgcgcgtggtcgcgcgatgttgtactgctgccataaggccctattctagaggcttttgaacatatgttgcacattgtggataacttgcaggtaaacgttcggtcaaccgcatgaggtggataactcggcggaagagttatccacaactcgccgacaaacggcaagctcggaccacataggccgaaaaatcggctgtagcgaatgaaaatctgccatgatcgtggcctacccgcacacagtgcagtatgcggggaacgtaccaggaaaggacgaatgatgataacgacatggcggcaacggggcatggccatcgtagcgatgctgaccggtctgataataatggtgggagtggtgttcggctcggcgaatacggcgtatgccgcgacgttgacgcccgccgacgaaagatatcacgtgacgtttccatacaacgatatggaatattacgtcggtgtcgcggggctggacgcttcgggcaacaagtactactgcatcgaagcggggaaactgagcgactatgtgataggccccaccacggtgcttgcctccgatgagaacgcccggcgtatggcatggatccttgaccggtaccgcgacacggatgccgccacccatgcggcgatcggcatcatcgtgcaggatcacttcgggcgcgatcgggacgagtgggcgagacagatggcggtcattcaaggccggtatcccgagatcgtggcgaaggcggcccggatatgggatcaatcggccggcaagacgcctgcgggcacgacggtggaacgcaccgatgccgaggctttgcgcagcggttccatctcggtgaaagtggtgaaccgcgacggtgacgcgatcgcgggagtgccgttcactgtcaccttgcaggggccggcgcggttcatccaaggcggcaacacgttctcgggggtgtcgacgagcgccggatcctcgatcgcgtgggaggcgaccggcgccggcgaggtgacggcgaacaccacatacgagtatgggcggatgcacgtcatggacagcactcaggacatgctggccttcgattcgatggcttccgccggcggttcgtcgtcgacgttccaggtgcgcaaggatttcgttccgtcggtgtccacgcaggtgtccgataaggtgcttgatgcggcttcgccggtgttcgatgatgtgaccagcggcgtgggggacgagggcagtcattgggtgcccggtctgaagctgcaggcgcgtggatactatttcgacgggctcggcaaggacgatctgggcaaggtcatcgcgccgaacgcacgggagagcgcggacgcttttctcgcccggctggcgtcctcgggttatgagccgagtgcttatggcaaggcgtccttcaccggtgtggggcagcgggttcgtgtgcgggccatggccaagccggacggtgacgccgcctatctgactccgaagaccggcggctttggcacctgggtgtgggtgttccggcggagcgagcaaagcaaacgggcgcaggaataccttaccggcgactgggtgagcccgttcatggaggcttcggaaagcaacgtggggcgcgggaaggtcgaagtcatgtcgacggttaccgaacattcggcggatatcggcgccgaactcagcgacaccatcaccgtatcggggttcccggcggaccacggccagttcatgggtgatgaaacctatggtttcgcggcggatcagccgtatgcgacggtgagcgtatggtggtccggcgatcccgacaacccctccaacgatgaggcgtacaagccatccgggggagaggtccccacggaagacgacaaccaccggttgctggccacctgggagattcccgcgatgaacggcacgttcaaaatcggcgccggggcgttggacgcgcatggcgctcccatgcatctgaccgccgaacggcatggatggtacgtgttcgtttggcggttcgagggggatgaccgtgtttccccggcgtccagccggtatgacgatgcctgggagcgtgtgcgggtgttgcccccatgcgagtcggagaaaccgtgcgaaccggagaaacccgagacgccaccggcgccggcggaggcaaccacgcccaaccctcgcccgtcactgcccgtcacgggtggcgatgtgtcgcttgcctcggttctggccgtgtcagctctggcgataggcgccatactgtccatcgtcgttcggtggcgtcgttgctatgaccgatccaagcactggacgatgcgctggccgatacgttgacccgctgcggcatgatgccgatgatgtcggctggatggtgaaccgcactccgcttctgagcagaaggacgggagctgggcacgaagtcgattgtgacatacgacttgtgcccggcttccgcttcgttgagaaacttcacgcctgtcgcctcccgtggattagacaactgaaggtccgcgatgaaaacgacgagacgtttatgatcgccgacttccctgggcaccgtagctgcctgatcgcctttcatccatatcgccccggtcaggtcgtcacctacaacggcggcggcagcgtcgccaccggcagcaacgccccaccgtcccgtaccgtgaccgtccgtgcagaccctcggccccgtatggggctggacgtgggccgatccggccgcgacgaccatcagcgccgtcgccctgaccatcggcgtcgtcatcggcgccagcgccctcaaggccaaggcatccaaggccgaataacaagaagcccccgaacctgaaccgtatcacgcggcaggttcgggggcttttcgccgtatatgggtcaggccatcgcgggctgtgcctgattggcggtcaggtatgcggccagtgccttgcggatcagagcgctcttgccgatgtgctctcgttcggcctgtgcccgcacctgtgcgtccatgtcgggcgtgaggtatgccttgtagagcacgtcggccttccggcggggctggtcggcgagggggcggccggcgaagatgtcgtcgatgtcatccatcgtgatcgccctttgcgggcggatggtctcgccgatgatggcgggggtgtgctcggtgtattcgtccgagagctcgtcccagtctgtttcgttgctcatgatgtcctccttggtgttttttagtcgtcgaacttgtagagccattcgcggcggcagtccatcgcgtggaacaccttgcgggtgcgctgggataccagcagctccacggggcgttccctgaactcgtccgggtgtccgaggatcgccatgaccctgtcgccggcgtgtctcgactgcacctcgaacacggccaccggatgccggaatatgtagtcgatctgtggctgtgtgagccagtgcttgaaggctgacggctcgcattcgatcatgcttattatggtaccataatttagtaccacaatcaatttagtaccacaatcaagtcggggaaacggaacatcgtgatcctcctaggcggcgaggcgcggggcttccacggcggcgcgcagctggtcgtcgggcatggcgatgtaccgttgcgtggtctcgaccgaggcgtggccgctccaccggccggggaacagatagccgttggcggatcggatcagcagggcgaggtcgtcgccctccacgtccctagatcgcccttaagcgccctcgacaatgcgggcatctggcatcggcgcgtgccgatcgtgttgggggagtagcccgccgccttgagggagtcgagccatagattgattgattctgcccagagcgggcttggatgttgttttttcacaggac

SEQ ID NO: 1850 - DNA, 13197 bp, Unknown
  MAG_14  MAG No. k141_54527
gcgattctgcatggatctcctatcggagacaaagcatggactggccccgtcccctgcaacatcaccggagaactgtttcctggtgaatggagaaccggtatccgttgcgcaaagcagtgagaacgccacggccatcgtgcgtaatctgcttgatgatttgattcaggcttctcacgatttggaaaaccttgacgaagaggacagcgctctggtccgtgaagcggaatccgtccgttcccaactggctgaaacgcgattgggagctgatggaagagtccttgaatggaacgacgaattcatcgaatccgatccacagcaccgccatctgtcccacctttacgaactgcatcctggtgcaggcatcacgtctaagactccgcgtctggaggaagccgcgagaaaatccctcgaagtgcgtggcgatgatggttccggttggagcatcgtatggcgcatgatcatgtgggcacgcctgcgtgttgcggaccgcgccaaacgaatcataggcatgttcctacggccggtggatgcgaacgctgaaaccaatctgctgggcggaggagtgtacgacagcggattatgcgcccacccgccgttccagatcgacgggaaccttggattcccggcggccttgtcggagatgcttgtccaaagccacgatggctggattcgcgttcttccggccctgccggaggattggcatgagggaagcttccatgcgctccgcgcaagaggtggaatccaagtggatgcgacatggacggatcagacagtggaatatacgttgcgctgttcgaagcctacggagattacgctgaacgttctggggactgatatgggacgtgtcgcattgtctccggataagccattcaagggaaccatccggcgttaacgtattgcgttatatccgttactaaatgttgcggaccgtctttcctaatagaggaggacggtccgcaatctttttttgatgggaaaggagattccgccattttccacgattggtatgcgcagatgaacctgtacagtgaaagctatgcgtgtaatttctggacgattcaagggtgtggcgcttgctacgccgaaaacgggtacccggcctaccacggatcgcaccaaagaggcgattttctcgcacctcgactcatggggagtgctggatgatgcccgtgtactggacctgttcgccggtactggtgcgttgggcatcgaagcgctgagccgtggcgcgcgagaactcgtggccgtggaaagttcccggcctgcggcggcgctgattaccaagaccttgtcgcagttacagaagaatcgttcgtgggatgcctcgctcaaggcccgtgtgttcaccaaaaaggccgagcaagtggctggcggctttggtgaatcctttgacgtgatattcattgatccgccctacgcctatgagaccgctgaatgcaatcagttgttggccaatctggcggtgggcagcgccaccaacgagaacaccgtgattatgctcgaacgctcggtacgctccgacacccccaccgcccccgaaggctggcaaatcactgaaagccgcaactacggcgaaaccgccgtcttctacatcgagcccgcggatgacgactcggatatagagcgttccgacgattccgccgcgtagtgaatctcccaccgtgtggtgaattaatcggcgagccggcgcggatgggcggcggagacctcccagcccaaggccatcagggtcttgcggtcggccttatccagcgccttgcaatccagtgccgcgataaggtctggccggatctcggcggtgcgggccagcgcttcgttgcggcgaaaacggtccaccttgccgtggtcgccggacaacagcacgtccggcaccgcaataccacgccacacggccggcttggtgtactggcgatgttcaagcagtgcgtcctcgccggtgtaggattcctcgacaatcgaatctgggttgcccatgaatccgggcatcaggcgggtgatggcctcaagcatcaccgacaccgccacttcgccaccgttcagcacatagtcgccgatcgaatattcgcgtacgtcgacgccctgggagcggtagtagtccgggatgcgcgcatcgtagccctcataccggccgcagccgaacagcagatggtcggcatggctgagctcggtggcgtcgcgttgggtaaacaacggggccgatgggttcgggaagatgagcaccggtgtgccggatagggcggaggattcagacggccgcgagaatcccagcagttcgtccaggcattcgctccacacctcgggcttcatcaccatgccggccccgccgccgactggcgtatcatccaccgaatgatgcacatcgtgggtccagtcgcgcaggttgtgcgctttgatctccaacaatcccttggcctgggctttgcccatcaggctgaggttcatcacctcaaagtattcggggaacacgctcacgatatcgatcttcatgttatccagcctaacggtagccccgcccgcattacacggccaccactacactattgcggtgatgaatacgacgatgaacctccccacccgcaaaaagcccgaagtgttgtccccggccggcaacctgaggggcctgaaaaccgcggtcgattatggtgccgacgccgtctactgcggcggcaaagccttcggcatgcgatcggcccccaaaaacctaagccttgaggactttgaggaaggctcgcgctacgcccatgaacgcggcgcccgcgtgtacgtgacctgcaacgtgctgccgcgcaacaacgagatcgaagccatgcgcgagtacgtcggccagctcaaggacaccggcgtggacgcgctgatcgtctctgacatcggcgtgatgatgatggcccgccaagtggctccgaatctggaactgcacgtatccacccaggccggcgtcaccaattaccaagctgcgaacgccttctatgagcttggcgctcgccgtgtggtgttggcccgcgagatggacttgcaggccgtgcgtgatattcgcgccaacattcccggtgacctcgacatcgaatgcttcgtccacggtgccatgtgcatggcgttctccggccgttgcctgttctccaactatctgaccgggcgtgatggcaatcatggcgaatgcgcgcagccatgccgctggaagtattcgatcgtggaagagaagcgccccggccagtacttcccgatcgagcagaccgagaacggcgcctatctgttcaattcgcaggacatgaatatgctggggcacttggatgatttgattgactccggtgccaccagcctcaaaatcgaaggccgcgcgaaaagcgcctactatatcgccgccatgaccaacgcctacaaaaccgcggttaatgaatacatgattcaacgcggttttgaagacgctgatggcaatgttctgaagcctttccgtgaccgtgtgattcgcccgggcgaccccgattttggccaaggaaccgaagatcaagtaatgagcaatgccgatgccgcgttcgccggtgtggccgatgagggatatgaccgtggctctgatactgcggttgccgattcggtcaccggctcggttgccgcagaacgtgaccgcgtgacggttgctgatgccgccgactcaactgcctctggtacgtcggccggcaccgccgtcgaacccgacggcatgagctcccacgcccgctccacgcgccgcaagtccaacaccgcggtcgaacagatcgagaccgattggaagcatgcggccgttcgcccggccccgcacgtcgaactgcccgaatggctgctcgaggaaaccgacaaggtggcccaccgcgactactccaccggcttctattacccggagcacaaggtcacacagaacaccgaccgctccgcctacttccgctcatggctggtagtgggcgaagtgctgagctggagcgcggacgaaggcggacgtgtcacgctgatgagccgtaacaagatcgagcccggtcaacaggttgaattcctgctgcctggcgagagaccattggtctttaccgtgccggaaaccggcctgcgcgatgccgatggcgcgccagtacccgccatcaataatccggcgcacgtgttctcgatgccctgcccgcaccaggtgcccatcaacgccgccatccgctcgcgcaccaaaaagcccaccctcaaagccgaataacctaccactccgcccccgctgactgggggtggtcatgggaatcatgaacaccgcccgcacccaagaaagaatgccttatgcctgaatacagcgaagaaatcctcgattccaacagcatcagctctaccgataaagccggtcgccctattccggtgaccatccccatcgcactggcccccggcatcaaggtggtgtacaccacgcgactgggcggactgagcaccggcgattacggcaacctgaacctcggcggcaagtccggcgacgaacctgaggccgtgctgtcgaaccgcatcgcactcgccgaagcggtgcaagcccgcctatcgctggtctcccaagtacattccggcgtggctgtggacgtggacgactcgttcgtcatcaacacccccttcggcttcgacgtgtccggcacacatggtgagactgacactccgcacgtcatcgaggcggacggccaggtcaccgcacaatccggcatcgccctaggcatgttcgcggccgactgcctgccggtgctgctgggcgacccggtcaccggcatcatcggtgcggcccactgcggccgtcgtggtctggagcgtggtgtgatcggcgccacggtagacctgatgaagagcaagggtgccgacccggcgaacatcgtggccacactcggcccgcgcatctgcggcgactgctatgaagtgggcgacgagatcgccgaccagttcatcaagcgcttcccgctgaccaagacgaagacccgtttcggtggtgccggcatcgacatcgccgaagccgcgatgatcgacctcgccttcgccggcgtacaccaggtggtcgattcgatgccgcgcgtgcacgccgccacccagtaccttgaggaagacccggaactctccgaactgtgccgcacggacggcgaaggcccggccgagctcgcggagcgcatcgacaacatcagccacagcatgtgcacgctcgaaaacccactgtggtactcgcaccgccgcgccgcgctcgccaacaaaacacacgaaggccgcctcctcgccctcatcgtgcgtgactaaacggagaatgcgggcacattccgtggagaagatgtgatgcagttcacggacggccagccctcaccctacggtggtgcctatgactgagagagatttcgatacccccgtcgagacgcctaccgtccagccggcccccgctcggggcgccaaaccggcacaaaccgtgccggtggtggccgtggtgctggccgccggcttcggtacgcgcttcgaccccgacaatcccaagcagcttgtctccgtgggcggcaagcccatcgtgtgctggagcattgatgcctttgaacattgcgatcgcgtcagcgacatcgtggtggtggtcaatcccaaggtgcgcggtgaagtggaaacgttggttggcgagatgggctacaccaaggtccgcgtcatcattgacggcggtgacgaacgtgtggacagtaccgccgccgcgctcgacatgctggctacggctggcattccggacgatgccaagattctgatccatgacgccgtccgtccgttcgtggaacagtccgccatcgacggttcgattgatgcgctcgaccagttcacggccgcgaccgtggcctacacctcaaccgacaccgtgctgttgaccgaggatctgggcgatttgaaagtggtcaagtcggtgccggaccgcccgaacaccttccgcgcgcagaccccgcaatccttccgcttcgcgacgattcgtcacgcttacgatctggctgccgccgacccggacttccatcccaccgacgacacgcgcgttgtggtcgattatctgcctgatgaacccgtcgccattgtctccggtgcggaaaccaacctgaagatcaccacgctggaggatattcccacagctgagcgtatcgccgaggagattctcggtcgtgatcccaaggaagaggcccgcgcccgcatgcacgccctgctggcccaagcggccggccagatgcatcgctagactggcattatgcgtgaactcaatgttgtgatctccggcttcgaccactatgacggcgtggaggtcaatcccgccgtcgaagtgcccaaggccatcgccgagcaggggttgggcgtctcctctgctccggacgatccgttggagcaggtcgccgtcaccgtccatgccgtcagcatcccggtgagcttcgccaaagcctggcccacgctgaaagagacgattgaggccaccaagcccaatatcgtcatcgccaccgggctcaagcacgcagcccgaggcgtgatgcttgaacgatgcgccaccaacctgatggacgcgatcaagccggacgcggacaacgtgaccccacgccgcgaacccatcgaccccaatggcccggccgcctattggacccgcctgccgttgcgctcgatcctgaatgatttcacggacgattcgattccggccaccctgagctcggacgcaggcacgttcgtatgtaattcgctgttctacaacttgctgaactggaccgccacccaggagcgggtgctgggcggattcgtcagcttcccgccggtcgtgccggcggattccagccagcatggtctgccactcgaccagcagatcgccgctggccgtgatgtggtgcgcgaagccgtgcgctactatctcaagccctccagctccggcatcctcatcgcctagcacgctgcgcgccacgccggaatagaacatggttcgcacgcattgtaacgattgcgcgtcactcaacgcccagcgctagtgcgatgcgctacagtgcttcaaggatgtgccaagagctttatgcgtgtgcgaaaggaataaacagcgatggtggatcgtttcccggtggtgctgcgaggatatgacaaggagaaggttgatgctgccttcgacgctactcaggagagtgtgaagcgtgcgcagcagacgttggccagcatgcgtgagcagattgcggcggatgacgaccgtattctgcaactgcaggcccagcttcaggaagagaagaacaagaagccggaaggcaacagcttcgcttccctgggggcgaacgcccagcagatgctcgcctccgccgagcagacgagtaccgaactgttggaacgcgccaagcaggacgcatcctccatccgtaccacggctcaggctcaggccgaaacgctgatcaacaacgccaagctggatgcccagcatattgttgacgacgccaatgccaaggccgcctcgattctgacgaacgccaacaatcaggccgaatcagtgaccacctccgccaacgaggacgccgcacaactgcgctccgaaaccgccaagaccatcaccgaacagcgtcagaccgtcgagcttgagctcagcaacgcgcgcgaagagcacaccaagaagatggcttccgaacgctccacccaagagcgcgaaatcgccgatatgaaggcggaagctacccagcaggttgccgcaatgcgcaaaagcgccaatgaggagatcaccaagcttaagtccgattccaacgatcagattgaggcggcgctcgccgaggccaacaagaagctcgccgacgtgcgcgagcaagtgtccaagatgatgaccgaagcccagcgcaaggccagcgaaatcattgatgcggccaagaccaagggtcaggaaatcactgatgaggccgaggtcaagcgcaccagcacgatgagccaggtcaacgccgaagtcgagcagatccgtcacgacatcgccgctcagcaggatgaggccacgaagaaggtcaacgaactcctgcagcacctcgaagagcgtcgtgtggcggccaagcgggaagccgatgagttggtcggccaggccaagaacactcgcgaccaagccgattcatatgccgcgtccaagcgcgaggaggcggacatccaggccgccgcaatcgtgcataaggcgggcgaggaagccgatgcgcagatcgaggagcgtcgtgccgccgcccaaagcgagcttgacggtctgtccaagcgcatcgccgatctgcaggaacgcgagtccgtcatcacccagcgtgtttcggaactgcgttctatgttctcgcaggcgttctccggattcgctttcggtggtaatgcggcggcctctggtcagagtcaggaagccgctgccgtggcgtcattgccggtggtcgcgcccgtcccggaagtccagcctgtacacaacgaggccgatgatcagccgggtgagttgagcggaaacgagtcggctgccgacgatcacaatgagacagatgcggcaccggctgattcggctgattcagctgcgcagaatgagcagtccgaatcgtctgagccgtccgagcaccagacacagggcgaaccggaggccccgactcaggagaatccagccgtatctgagcagaacggcgaatgacaggccttcgattagactactagcggtaagaattacggcacctgcgctttcgagccaggtgccgtattcgtttggatctgcgccacaagcgcaccatcacagaaggagtatgacatgagtgaattgacgcctctgaccggcgaagcattgaataccctgcgcggcgatttcgcacagagcggcaccaaccgtctggccatgaacgcggtgaccgccgccggcatcgacaaggtggctcgcaattatgaccgcgctcgtctgatgcagcgccgtttctccaccatcgttgacaatggcgaagccacccatcaggatcgctccggccgctgctggctgttcagctccctgaacgtggcccgtttcgtggccaagaagaacatgaacttgaaggagttcgagttctcccagaactacgcgatgtactacgacaagctggagcgcgtcaactacttccttaaggatgtggccgctctggtggctgccggagagccttccgactcccgcctgatgcagcacctgctcgctgacgtgatgggcgatggcggccagtggaccatggccatgaacgtgtacaagaagtacggcgctgtgcccaaggacctgttcccggagaccgaatcctccaagaacaccggtgaaatgaacacccagctgcgccacatgctgcacaccgccgtggcgcacatgtacgccgctgacggcgatgcctccaaggtcgaggcgattattgccgacgccactgctgccggccaccgtattctgaccatccacctgggcgagccgccggtctccttcgactgggaatggaccgacaaggatggcgaattccaccgcgacggcgagattacgccggttgagttctggaagaagtacgtgggtccggctggtcttgaggactacgtgtgcctggtggatgatccgcgcaccgagcacgccaagggcaagaagatcggcatcgagcacctcggcaatgtggctggcggcgacgccaccgagtacctcaacgtgccaaaccagttcatgaaggactgtgtcaagcagattctcgttgagcagggcatcccggtatggttcggtgccgactgccacccgttcatggaccgtgagaacggcgcttgggccaccgacctgttcgagtacggccgcgtgtacgacgtggacttcgatttggacaaggaagcccgcgtgcgcttcggtgactccgccatgaaccacgccatggctttcgccggcgttgacgtggccgacgacggcaccacccgccgctggcgagtggagaactcttggggcaccaagatcgccgacaagggctacttcaccatgtccgacgactggttcaccgaatacgtctacgaggtagccgtcccgaaggccctgttgccggaggaataccagaaggccctcgaagagccagccaccatgctccccgcatgggacccgatgggcgccttggcctgacttcgccagcctcccggaatcggcctgacggccgatgctgtgttttttcgcagcctgccggctgctagggtctctccctctgtcagcgcgaagccgctgacggggggagaggccgcggtcgcaggccgcacaacaacacagcatcgccgcaggcgagtccacgcaggcgagtccacgcaggcgagttcacccaaagtccataaccgccggcccaacaagcagtccccgtaacagactgctatagttgggcttttgcgtctatagcgccataccgacggtacgtatacaaggaaaggagtcgagcaatggcagcactacgtggtccggatagttccgaggatgaacgtcgtttgggggagcaggccgtctttcccgagaccgtcgatgtcaacattcgtcagcttgaccccattcccgcgccgcgtgccttcctcagggagcagccgctcaccgatgagatgagcgagctcgtgctccactcgcggcaggaaatccgcgatgtgctcaacggccgcgacgaccgactgctcgtcatcgtgggcccctgctcaatccacgacccgaaggccgcgcacgagtacgcagaaaagctggctgccgtcaagcgcgagctggaagaccgactcgtgatcgtgatgcgcgtgtacttcgagaagccacgcaccaccattggctggaaaggcctcatcaacgaccccgatctggacggtcgcttcaatattcgtaagggcatgtggctggcccgcaaggtgctcaccgacgtgctgagcctcggcctgcccgccgccaccgaatggcttgaccccatcaccccgcagtacatctgcgacgcgatcagctggggtgccatcggcgcgcgtaacaccgaatcccaagtccaccgcgaactggccagtggcctgtccatgccggtgggcttcaagaactccaccgacggctccatcaaggccgccgccgattcctgcttcgcggccggcttcgagcatcacttcctgtccattaacttggacggtcgcgtgatttccgccgaaaccaaaggcaacccggattgccatctggttctgcgcggttccagccacggcccgaactacgatgccgaatccgtgcgtcaagctctggaagacctcaaggtttccaaagcgtccggcccgagccagcatggcctcgtcatcgatgccgcccacggcaactgcggcaaagacgaaaaccgcgaagccgaagtcatcgaagagatcgctgagcgtctggcgcacggcgaacaaggcatcaccggcgtaatgatggaaagcttcttggtcggcggtcaccaaaagccggccccgctcgaccagttggtctacggtcagtccgtcaccgactcttgcgtgccgtgggaacgcaccaacgagctgctgcacaccctagccgacgccgtcaccgctcgcagctcggctaaatagctttgtctttgtaaaaatgctcactgagacccactcagtgagcattttttgccaataacggtggtcatgtcagtttgttcccgtgacaccttatccttgggaaagatactgacccaaggagagatgttatgcagcagcaggaggaagcagcacattcgctgcatccgttgcaagtcggtccgcagccgttgaacaccccggaagagcttcgcgccattcgtcaggcgatgggggaggggaagaacccgctcgttgccactgatgtgccgcgctgggaagatcaggtgggtgtcagtcgcatcatcaaccgccgcgtattggagctggagccgctgcccacgcccgcgcaagtgctcgctgaactcccgctgaccgatcaggctcaggaaatcgtcgcctactcgcgtgatgagattcgcgcgtgcctgtacggccaagacgacaggttgttggtcatcgtcggcccctgttcggttcatgacccgaaggccgcgctggactacgcgcaccgattggccaagctgaaggacgagctcggtgagcagctgctcatcgtcatgcgcgtgtacttcgagaagccgcgcaccaccatcggctggaagggcctgatcaacgacccggatattgatggcagccacaatattcgcaaaggcctgttgcttgctcgcaaaaccttgcttggtgtgctgaaggaaggattggcggccgccacggaatttctggagcccaccagcccgcagttcatctcggacgcggtgagttggggcgccattggtgcgcgcaacacggaaagccagatccaccgccaattggccagcgggctttccatgccggtcggcttcaagaacgccactgacggctcggtgaaggcagcggtcaacggttgcttcgccgccgcccagcagcacacgttcttcggcattgaccatctggggcgtgcctgcgcagtcgagacccttggcaacccggactgccatgtggtgttgcgcggctcgattcacggcccgaactacgatgccgagtccgtggccaaagccatggaagacgtacgcgccgaaatgcccgccgaatccgcagcctcgcacggtctgattgttgattgctcgcacggtaactccggcaaggacgagcatcgtcaggccgaagtcgtgcgcaatattgccagcagaattgcagctggcgaacagggtattaccggcatcatgatggaaagctttattgaagggggcaatcagaaggccgcgccgcttgatcagctggtctatggcaagtcgattaccgacaagtgcatcagctgggaagaaaccgaggccttgctgcgcgagcttgcggaagccgtggccacgcggcgttggcactgagttgcgtcatcggctctctcgggggggggcaatgtgacgaaacgtctgactacccctcagcccgccattcggcggccacctcccctgacatgggagtcgaaagcgttgtgaaaggaacttacatatgggtatgaaaactgtagctattattggcgcattggatgaggaagtggcgctgatcgccaaatcgctcacgcatgtgacgcacaccgccaagggcagccttgacatcgtgtccggcacggtcgactccttcggttctgacgtcatcaaggttgccgcaacggtaggcggcatgggactggtcaatgcggcc

SEQ ID NO: 1851 - DNA, 3497 bp, Unknown
  MAG_14  MAG No. k141_55105
aggacaaggcttctgaggcggctggacaggacccgttcgccatcggcgtggccaagtcgaagagtccgctcggcccgtggaaggatgccatcggcaagccgctgctcaccacatcgcaaacccagattgaaaccatcgatccggcattctttgtggacgaggatggcaccggatatttgcactttggtacgttcggcactcagctcgccatcaagatgaagaaggacgccacaaccggccgcacctcatacaccgaggtggaaaccaaggctgatggcaccacgccgaacctccacaccatgaaggacgcggacagcaacgcgaacggcccgaagggattcttcgaggcggcgtgggtgttccgtaagggcgatacctattacaacgtgtacgacggcggtaagcccggttcgggcacggccacctgcgtggaatcgaactatcaagcttgcatccagtactccacttccgacagcccgctcggcccatggaagtaccaaggcgtaatcgtgccttctggctcggccaccacgatgcacccctcggtgctccagttcggcgacaaatggtatgtgacctatcacaccggcgacaaggaaggcggcaccgatttccgccgtgccgtgtgcattgatgaagtcgattggaccgccgacggccagatggtttccaccgcccatccaaccaaggccgagaaaacgcagccctccaccaacgtggctccgtacgcaaaggtgagcgccacgttcactgaaacgcctgcttggaagggttcggtgaacgacggccgtgtgttgcaaaccgctgtggtcccgccgaatcactggaccaactaccgttctatcccgcaatcgcagtccggcgattctctggtctaccaatgggatggcactgtgcgcgtcaactcgtctaaggtttggttcgacgtggattccaacgctctgcgcgcgcccgcctcgtggaagattcagtacttggacgcggacggcacatggaaggatgtcgccaacccgagtgcctatacaacgaccacaggcaaggccaaccccaacgccgtcaccttcgatgcggtgaccactactgccttaaagctcgacacgaccggtcaagctgtggatggcggctatgcctccgtggccgttgctgaatgggaagtcggctccgactccagcgaatcgccggcaatcactgcgccgaagagcgtgaccaccgccaccggtactgcgcctactctgccggccacagtggatgtgaagtacgggaacccaaccgttgcctccccagtaatttggcgtccagttgatgcttcctcgtatgccaaggtcggttcgtttacggcctacggcgtggtcgccggcgtgcccggtgaggcaagcgagcagggcaatgtgtcggtaaatgtcaccgtgcaggacggctaccagcctgccgctgataccacgaagccgactgtaaccgttgccgttactgctaacgcaggcaatagcgagtggctcaccaccgctccgttcgccaccgtgcaggccacggacgacaccgcacctatcgccaagctggagatttccgctgatcaaggcaagagctggaccaccatcgccgcgaatgcaaacgcggccattgccacgctttcccagcagggcgatgtcgaagtgtgggctcgcgccaccgatcaggccggcaacgtttccgacgtggccaaggccggcggcaaggtggactccgccgcgccaaccgtgaccgccgccgccgataaggaggagcgcacgctgaccttgaccgctgatgacggcaccggttccggtgtcgcatcaattgaataccgcattggcacagacggtcaatgggccacgtacagcaagccgattgctgcaccgagcgcgtcgcgcgccaccgtgtactaccgcgccaccgataaggccggcaacgtgtccgcttcggcgaaaaccgacattccatccgacacttccgtgccgctgaccggctacattgagggcgatgccaccgccaccgatgtggacggcaaggcatccggctgggtcaagggtgccgccgcgttgaacgacggcaagatcattcccgatatcaccattgccaacgaggatgtctggggcacttggcccaacaccggtgagatgcgcctcgactacgagtgggaccgtgaagtgactatcgactctagccgcgtgcaattcacctcggatgatggcggattgggtattccggcatcgtgggaattgcagtactgggacgccttggcgaacaacggtgccggcaacttcgtggatattcccgacgccacctacactgtgaccgccaattcaccgtctgctggctgggccaccggcgatgccaaggggtggtctgatggcacgtggaacactccggtcaagactaccaagttgcgtatggttatcacgtccggctcggcttctccggctgttgccgaatggcaggttcatgccattgacgacagtatgcctgagccgcctgagcccacaccgatcgacaagaccgagctcaagcaggcgctcgctgactcgcctaaggctgacgatgcctccaagtacaccgagacttcatgggcggagtacgcggcggtattggattcggcgcagcaggtgtataaggctgaggatgccaccgaagctgcggtggtggatgccgcaacccagctgaagcaggcagcgaagaagctggtgcttgtagctacggtgcaagatcgtgccgcgctgagcgctcagctcgatgccgctgctgccgtggatcgcacaaagtggactgatgaatcgctggccgtgcttgattcggcagtcgctacggcgaatgcgctgacgagtgatggtcaggccgcccagtctgacgtacaggctgcgactgaggcaatcagcgatgccatcgcgggtctggttgagaagagcaccacgaagcctggccagggtggcgataagcccggttccggcacggacaagcccaaccaaggcaacgattccaaccagaacaagggtgatgcagactccggcaagcacaagaagatacctgacaccggtgcagccgtgcttggtgttggcatcctcgccgtggtacttgctgttgcgggtgtaatcatcctcaagcgccgcaagtccggtacctgctagtcccactcgctcggcctagcatcaccaagcccccgcgcatgaacagcgggggcttcacttttgttcaataacaagcattatgtgcgcgtatgagactacgatggtggggaatctacgaacaggggcagcaatgacggcatacatggaccataaggatctcgccaacgaagttatcgatcaggcgcgcgcacaagagattactgatggtgtgcatcgcgtgcttgaccggattgcctcagcggagtccgcagccgggcgtgctgccggttcggtccaattgctggctgccaccaagacgcgcgatgtcggcgagattctggcggctatcgatgctggtattcgcgtgattggtgagaatcg

SEQ ID NO: 1852 - DNA, 3675 bp, Unknown
  MAG_14  MAG No. k141_55772
gatgtggtttccccgctgtgggccatcgtgatgggcgccatcgctggtgttctgacctgcctggcctgcggtctcaagttcaagttcggttacgatgactccctcgacgtcgtcggcgtgcatggcgttggtggtttcaccggcactgtcctcatcggcttcttcggtgaaggcactggtctgctggctggtggcgactggaagcagctcgtcgttcagctggtcatcgctctcgtcgccatcctctactccgcggtgatcaccgcgatcatcgccttcgccctggagaagaccatcggttggcgcgtcaccgaagctcaggaagtcggcggcatcgatcttgccgaccagggcgaacgtgcttacgattttgctggtactgccagctctgttctcaaggaggtgaggtgagatgaagctcatcaccgctatcatccagccccataagctcgacgacgtcaaggaggccctcgcggccgccggagtgcacggtctgaccgtgtccgaggccaacggctacggccgtcagcgcggccacaccgaggtctaccgtggcgctgagtacaccgtggacctgattccgaagattcgcgttgaagtgctgtccgatgacgcggatgccgagacgctggtcggtgtgatcatcaagtccgccggcaccggcaccatcggtgacggcaaggtgtgggtcgctccgctggactccgtggcccgcgtgcgtaccggtgagaccggttccgccgcgatctgataacacagacgtccatgcctagaaggggatggactgcatgggaaaggtccccgcacgccgcgaattgacgccgtgcggggacctttttggcaatgaaagatgaagcaatgacttcagcagtagatggcttgaaacaacgattcatggatatgagccagccggatgacgatggtgtctaccggaatggtgcgaccaagcgtaaagcccgcacggaactggccatgcaatgcctcacggagctgtggaatgcggcctgcaaggatgtctctttccccgtgcccgactccggcatcggcttcgccgcggtaggctcgctggcacgtggtcaactgggccccagctccgacctcgacttggtcatcatctacgagcctcgcacgttgaacgaccagcagctcaacgagttggccaacaaactctggtacccgctatgggacagcggtctggacctcgaccactccatccgcacgcgcgcccaatgcgaggaagtcaccgaccatgaccttcccgccgccatgggctggctggacgtgaagcccatcgccggcgacaccgctctgattaccaccaccgccacatccatcctcgaacgctggcgcaaggccgcccgcaagcgcctgcccgaactgctcgactccgccaaagcccgactcgacgaattcggccgcctccaatacgtcaatcagcccgacatcaaggagacccgtgggggtttgcgcgattcggtgctcgtctccgcgctcgccgtctcatggctggccgaccgcccgcacggcatctacgacgaagccgtggaacgtctgctcgacgtacgcgactgcatccatctggtggccggcaaggataccaacctgatgctgacgccctatcaggccaaagtggctgccatgcttggccttgccgatccgacttggcccgaaaacgagcgtgccgcctactcgatcgacgatttgcagacgctgcttgcccgtatcggccggcgcatctccttctcgcttgattccaccgcatcccgcgctggacattcgctgacccacgaaaagccgcgattcgcgttcttccagatgttctctcagcgctctggcggcaagcgtgaagccccgcaattcgacgtggtggctcccggcgtggccaagcacgaaggcgaattggtgttggcacccggtgccgagcctgccaaggatgccaagctggcgttgcgtatggccgtggcggccggcgaattcggtttgcccatcaacccgtctaccttggttaatctgaagcactgcccgattcacgacaaccagtgggatgacgaatcgcgcgagctgtttattcgtctgcttgcatgcgggccgaatcttatggaagtgtgggagagcatcgacttcgtggacattccgggtcgatggatgccggaatggctcggcgtccgcaaccgtccgtccgcctcggccgcccaccggtacaccatcgatcggcatatggtggaggtcacgtcgcgtctgggtcgtgagacaccgtccgggggacggtatgatgacgatcatttcaaggcgttgctgttggccggtattacccatgacatcggcaagcgcgcgttcgtggccgatcacgccgccgagggtgcccgccatgtgccggtgattctcaagcgtatgggctacgcgccggacatcgtcgactgggccaccgtgctggtgcgtgagcatttgaccctatccgaatttgccacgggtaaggacccctatgatccggccgtggcggaggagttggccgaccgcttgcaccacgacaagatgctgttggatatgctgttcgacctgacccgggccgacggctcctcgctcggtgccaccgccggtgagaccatcaccaagcaatacggctggtccaagtggcgcgaacaaatcgtgcgcggcatgtattccgccgctcgcgccgcgatgtaaacggaatcgcccagcacttcgcgcggccgatacctacttcatccatgcgtccgagcgcacgcgcagcccgttggacaggccgcgcccgcccatgagcaccacgttgaacgcggcccagagcacggcggtacgcatcaggtcgctcgtcagcgccggcgtcaccatattggccagtatgagtatgagcgtcacatacaccacggcggtcagcgtgcaggtgcctgccagatagcggtagtcgcgcgcgccgataagaatgccgtcgattgccatcatccagccttgcagtgggaagaagatgcccatcgtcaccatgccaacggcaatcaacgtctgaatatttggcgtaggggagaagaagtgcccggcgaacaggccgactaccgcaaaagccgtgccgattaccgcgccggtgaccagccccgcacgcccggtcgcccgcgtcaaccgccgcgcctgctgcacgctgccagcgcccagcgttgtggccaccagcgtctggccggcgatgcccacggaatccagcatgttcatcgcaaaattccaagaggagttcacggcctgaaacccggccaacacggcagtacccatgcgcgcggcacaggcgaccgtagccaccatggccgcacgaatcgccaatgtacgaatgaacaatggcagtccgtcgcccccggctgccgcaataccggccaaacgaggccgcagactcgcaccgtccgcccgggaccacagaatggcggggattaccaggaacagccccatgaaccactgagctatcagcgtcgccactccggagccggcaatgccccaattcagcacaataacgaacaacacatcaagcgccgtgttcaccaccgcgccgcccaccgcagcgatcagcgtgatacgaaccttctgcaatcctcggaaaatgccgttcgccgcatataccatcagcatgcctggcgcacccagcacgattgcgcgcgtataggtcacggcttgttccaa

SEQ ID NO: 1853 - DNA, 2680 bp, Unknown
  MAG_14  MAG No. k141_56011
ccgtgctgcagaccgtcttttcgccattgtccgtcctgctgcagatcgccgatctgccgctgtacccgggtgacgattacgccaccgcgacgctccgcgtcgaagatctgatcttcgatcagcctggtgtcgccaagctggcgctcgccaacatcgcccgcacactcgcctcctatgcgcgtgcgttggttcgtcccgagtccgaaggcggagcgggactcgacggcgtgttctacgcgctcaccggcacggtgagcgagggttatttcgacgcgcaacgctatcttgaattctccgaaccatacgatcgcatcgtgattgacgcggtgcatcgcgccaacccggacgccgtggtgctgctgcacacctgtcgtgctgaatcccacccgaattggttcgacgtgaagggtgtggacctgctgcagtgggatcagtatcaaccgggaaacccgcaggtggatgccgacctgacggctgtgccggtcgccggtgccccgtacgacctgttcgcgccggacggtgacgtcgaacaggtgcgccgcgaattggccaagaccatcgcgcttcgtacgggcaaaccgtttttgctggcaccaagctgcacggttccgaccccagcgggcgacgaggcgctgcaggcgttgagcgacatccgcgtgggctgagccggtccccatttacgcttcatgattattcgaatagagaagggaacatcatgaccatcaagacaatcatccgtacggcgatcgcatccgtggtcactgcgggaacactgattggcgtctccgcatgcggccttggcggggatgccgccagcggttccagcgacgacaccgtgaacatcggagtcatctatccgaagaccgggcaatatgcgcaatacggcaaactgttccagcaaggcttcgatctggcggttgccaaggtgaacaaggatggcggcgtcaagggtaagaagcttggtcttcgatactatgacacgcagtccgatgccaagcaagacgccgcggtggctcccaagatcgtgtcggacaagtcgatcatcgccgtggtgggtgactatgcctcgcccgcatcctcggccgcgtcgcctatcttccagcaggccggcctcgtgcattacggtttcaataattcggcacccacctttaccgataccggggaccacgtatggactccccaaatcggtcaggacaagtatcagaagaccaacgcggatatagtggccaaaaaagccaagaggatcgcggtggtctacatcgagaacgactggggcaaacaggcctatcggtacttcaagcaggaggccgagaaaaacggtacccagattgtgtacgagtccagctatctgcccgactccaccgacttgtcgccgattctgattccggcgcgcgatgccaagcctgacgcggtggtcgacatcggctacgggccggacggtgctctggtgatcaataccctgcgcgacaagctggggtacgacggcctgtacttcggtggtcaggaaaccaaggagttcctcgatctcgccggcaaaaacgccgagggttcgatcatcaccggatccttctccgccactggcaccaaggacgccaaggcccagcagttcgtcaaggacttcaaggccaagtacggcaacaacccgggcaatttcgaagtgaccgcctacgaggcgatcatcgatctggcctatgccgccaacaagaccgaaccgacccgtgaaggcatacagaaggcgctgcagaccgtgacggatttcccgctctaccagggcaatggcggcacgttcaaattcaatcggcagagtcgtcgcgccgataacatcgatccgattctgctcatcgtcaaagatggcaagttcgaacaatacgaaggttgattccccgggctttcccatacaccacgaacgaggtaacgcacacaatgtttgatgttcttttcgccggactgatacacggcagcgcctatgcgctggtcgcagtcggcatgtcgctgatcttcggcgtcaccaacgtggccaacttcgcccaaggttccatcgtggccgtgggcatgatgatcgcctggtggctcggttcatcatggggatggggaatcgtgcccacattcgtggcggtgcttgtggttaccgcactgctggggctggtcatgaacatggcgatcatcgctccgcttgaaggccgtaaaccgattgcggcgctgctcgccaccattggcgtcggccaggtgctcgacaatggtctgcaggtcgtcttcgggccacagacccgaccattcccgaaactgctgcagacctataacctgcaagtcgccggcgtgcgcttcggcacttcggacatcgtgatggtgacgcttgccgtcctctcgatgcttggcttatgggcattcctcaagttcggcaaagcgggacaggccattcgcgccacttcccaggatcccgaagccgccatgcagatgggcatcccggtgaaggccatccgtaacctctcctttgtgatcggtgccgtactcgccggcgtttccggcatcttcgtgggcttgttcaacggcaacatcaatccgatgaacggcggcaccattggtatgacggcgttcgtggcggccacgatcggcggtctaggctccatcccgggagctgtggtcggcggtcttgtgctcggtgtggtggaagcgttcggca

SEQ ID NO: 1854 - DNA, 6767 bp, Unknown
  MAG_14  MAG No. k141_56893
cgccaccgacgtggtgctcggccgtctcgccacccaggctgcaatcctgctgcgcggcaagaacaagccgacctacgctccgcacgccgattccggcaaccacgtgatcatcatcaatgccgacaagattgctctgactggcaacaagatgggcaaggaactctactcgcactccggtcgtcccggtggtctgcgtcgtgactcctacgccgagctgctcgagaagaaccccgagcgcatcatcaagaacgctgtcaagggcatgctgccgaagaaccgtctggccaaggtgcagctcgaccgtctgcgtgtcttccgcggcgccgagcacccgcacaccccgcagaagccccaggtcttcgagatcgcccaggtctcgcagcaggccaagtgaaacctgagaggagataagaatcatggctgaaaacaccaacgactcccaggttgtcgagaccgaagaggagctcaccaactacaccaccgagaccaacgctggcgctggcaccggcacctccgcgatcgagccgggctacggcaccggtcgccgcaaggaggctgtcgcccgtgtccgtctggttccgggtgacggcaagtggaccatcaacggccgcaccctggaggagtacttcccctccaagctgctgcagcgtgaggtcaactctccgattgttctgctcaagctcgaaggcaagttcgacgctatcgtcctcgttgacggcggcggcaccaccggccaggccggcgctatccgcctcggcgttgcccgcgctctgaacgccatcgatcgtgatgccaaccgcgccgccctgaagaaggctggcttcctgacccgcgacgctcgcgtcgtggagcgcaagaaggctggtctgcacaaggcacgtcgcgccccgcagttctccaagcgttaatttcgcttgtcctgtaccgagcatacaaaggctctccgtggaattccgcggagagcctttgtgtttgtgtcgtgctgttttgagtgtgactcacacctgtttcatcagcgtgatgctcagcgccggcatggtccagacattgtcgtcgacgggagtgtccggcgtatcatccacaggggcatcaggcatatcatctgatacctcatcccgaggcgcggacgaggtgccgtttgcggcgtgatccgttgctggcatcgcgaattcgatggtatccgcttcatcctcagtcgaggattccgtgcgctgcatggccacttcttcgaccagcgtgcgtaccgtctcgctggcgtccggtacatgctgcgtccaaacggtggtgtcatcgttcaaatcgcattcctcgacctgaatgccatgcccggctcggcggccgttgatttcggccgagcaccatttaggcgtccagtgagtgtctggcggcaggtggaatgtgcggtcgtcagcggtgccgttgaccacaatgcacacgtccacctcactgttggacagcaatcgcatggtgaagctacgtacgcccagatcgaaccagtcacgctccatcggcgtggtgccgtcgggcaggaaccactgcacgcggcttgagggcttgagtaggccgagttgggtcagtcgggtgaagaagtcctcgtggtgatacaggtccagtgatttacgtagcgccaccagtcgagacacggttttcaggcgacgcatttcgcgtgtcttgttggtggaatacatccaatcccacttcagccacgtgatgtcgttgtcttggcagtaggcgttgttgttgccgtcctgtgtgttgcggaattcgtcgccggcgagcatcatcggcgtacccagcgagagcagcagcacgccaatcatgttcatggccgcctgttcgcgtgccgtgatgacgtctggatcatcggtgacgccttcgacgccgaaattggcggaatggttcaccgacgagccatcattattgttctcgccgttggcttcattgtgcttggagcggtatctggtgaggtccgtcagcgtgaaaccgtcgtggcaggacacgaaattgatggaggccggagcgccgcgcccgggttcggtggcgaacagatcggccgagccgcagagtcgcgtggccatctcctgcaaactgatacgaccgaaatcggagccgccatccacatcctcaagccagaaggtgcgggccgtgtcgcggaagcggtcattccattcggcgaacggcacggagaattggccggtgcgccagccgaggttgcccagatcccacggctccataatgagcttcaggttgcccagcagcagatcggaacgcagggcgtagaggaatgggtgatgatgggtgaattcgccttccaggcgggccagcgtgacgccaaggtcgaaacggaaaccgtctatgccgatacgcttggcccagtatcgtaatgagtcgatggcaaaggtgaccacatgcgtgttggtgaagtccagcgtattgccgcaaccggtggtgtcttcgagtcgaccggtattggatttttgatggcgatagtaggccaggtcgtcgaggccgcgccagcagaccgtcgggccttcgacgccgccttcgcatgtgtggttgtagaccacgtccatgatgacttcgaagccggcctcgtgcagcgcgcgcaccatgtctatgacttcttggcgcacggcggccgcgcccttctcttgggctgctttggtggcataggagggttcgggggcgaagtagctgagggtggagtagccccagtagttcttgcggccgtgttcttgcaggaagagctcgtcctgcttggccataatcggcagcagttcgatggaggtgatgcccaatccctgcagataggcgagcgttgtggggtgggcgagtccggcgtaggtgccacgcaacgctttgggcagccacggcgcgttggcggtgaagcctttgacatgcatctcgtagatgacggttttgcgccacggcacatgcgggtgctgcgggtcgccctcatgcttatggatatcgcgatcgtcgatggccacggacaccggcacatggccgagcgagtctacggtgctcatggcaccgtatgccgagccggttaccttgcgatccacgacatcgcattcataggagaaggcggcgggggtgagctccatggagccgtcgatgcccttgccatacgggtcaagcaggaatttgtatggattgaagcgcacgccgtgtttcgggtcccatgcgccgtccacgcggtagccataacgcatgccgtcccatgctttgggcaggtgcacgtaccacaggccgtagttcggtccggtcatgcggaacagggtctcgcgcagatacaaatgttcgataatgcgcgtgcacaccggaaactcatggatctgctggatgaacgaggcgttcgggtcttcgaacaggcggatggcgtcttggaagaaggcgccgggctcgtcaatgggctccagcacacacagccaaacctgatcggcagtttcggaacgaacaacgacgtcagccccaccgtcgtcagtgaagtacagccctgggcgagtggcgtaacgatgcaacggtgggtttttcatacctccattgtagacgtgttgtcacttctggtggaagcccttgatttcctgccgcgttccgcagcaccacagatatcgtcgagataattctcggcgaatcgcaatgcggcaccgatgatgttctggtcttcggcgcagtagctcttgcgcagattgaaatggtcggtgccgaacggactgcgtgcgatgacgcgcgccttcagatcctcgatgtcactgtcttcaagatgctgggctgcttcaccgccgacaatcacgtcgcccgcgatgatggatcgcgcgttgacgatggcctgcgccacgtaatccagccattcgtccatgcgctcgcgatgatgccgttcaccctgctcaagcacgctgaagaagccgggaatactttcgtaatcctcgggcaaggtctccggcgagcagtaggtgtccatgcaaccgcgctggccgcagtagcattcgcggccgcccggcaccagcgtcatgtgttcgatggcgccattgcacatattcggaccctgatacagcttgccgcccacgatcaccgcgccgcccgggcgtcgctccagatagacgcacaccgcatcggtgagcgtggagtcgaaccatagctcgaccatggcggaggcatcggaatcgtggatcatcatgcacgggtaatggaccgactggctgatggtttcgagcgtaagccccgtgttgcccataatggtgccgaaggtgatggtggtggcgtcgggggagaggatgccttggatggcgaacgagacgccgagcactttgccgtgcttcttttcgacgtcggaggcgaagttgttgatgatgccgccgatacgctggtagtaaacgttggtgttgcggtaaggcagggcatcgttgcgtttttcgatgacgttgccgtacaggttaatcgcgcacaggcgcagttcgttggaccgcatcactacgccgatggcagtgcgatgatcgggattgaactcataattttgcgccttgcgcccgccggtggaatcctgcagttcgcctttgcggatgagtccgtcatcttctagggcgcgcagattttgggtgatggtgggcaggctgaggccgagttcgcgttccagttcctgcttggtgacatggctatggccatacagatactgggtcatggcactgcggttgtgcgctttcactgcggtcgatggcattgccctcatatttacccctttgtgcgatgagatatatgtaagtatactttatgaaagtggctttcatgtgcctcgacgcggagattatgaggcaacaatcgtatatttgtaggcgattttgggcacttttttaaaccaattttctagaaatgtggggaaaatgagtacttttggaaacttgatttaagaaagttgtcggattgcgttgtttgcaagcatgtgattttcggtaaaaagtgaacaaaaagtaccaaatcgccgaataaagtgaggatttgttcgatatttcgcacaactcttaacaaaaactgttcaatatcgcacgtgaaacgccgtcgattttgtgcgtatgcatcgcgccggaccgttcggtatattgtgactcaagtcacatatgcaatgtgacaacgcatcaccggtcattttcggttactgaggcggtatcccgctggtgcaactgaggtgacgaggcgatggcccagaactttgccatataccccaagaagatcgaggaggaccccaagtggcagaagcaaagaagaaagtcgaagctgccaatccgaccccagaagagaagcaggccgcagctgaggccgaagttgacgcgctggttgcccgcgccaagaaggctctcgacgaattcgagaacctcgaccagaagcaagttgatcgtatcgtcgccaaggcctccatcgccgctctgaacaagcacctcgttctcgccaagatggccgtcgacgagaccggccgtggtctcgtggaagacaaggccaccaagaacatcttcgcctgtgagcacgtcaccaactacctggccggccagaagaccgtcggcatcatccgcgaagacgacgtgatgggcatcgatgaggtcgccgagcccgtcggcgtggtcgccggtgtcaccccggttaccaacccgacctccaccgccatcttcaagtccctcatcgccctgaagacacgctgcccgatcgtcttcggcttccaccccggcgcgcagaagtgctccgtcgaggccgccaagatcgtgcgcgacgccgccatcgaggccggtgctcccgagaactgtatccagtggatcgagcacccgtccatccaggccaccggcgcgctgatgcagcacccgggcgtggccacgatcctcgccaccggcggtccgggcatggtcaaggccgcttactcctccggcaagcccgccctcggcgtgggtgccggcaacgccccggcctatgttgattccgatgtggacatcgtccgtgccgccaacgatctggtgctctccaagcacttcgattacggcatgatctgcgccaccgagcaggccatcatcgcccacaaggacgtctacgaccagctcatcaaggagctcaaggtccgtaaggcctacttcgtcaacgccgaagagaaggccaagctggagcagtacatgttcggctgcaccgccggttccggcgtcaagcccgtgctgaactccgtggtgccgggcaagtccccgcagttcatcgccaaggctgctggcttcgagattccggccgacgccaccattctggccgccgagtgcaaggaaatctccgacgacgagccgctgacccacgagaagctcgctccggtgcaggccgtgctcaaggccgacaacaaggagcaggccttcgagatgtgcgagaagatgctcaagctgggtgccggccacaccgccgccatccacaccaacaaccaggagctcgtgcgtgagtacggcgtccgtatgcacgcctgccgcatcatctggaaccagccttcctcccttggcggcatcggcgacatctacaatgccatcgccccgtcgctgaccctgggctgcggctcctacggcggcaactcggtgtccggcaacgtgcaggccgtgaatctcgtcaacatcaagcgcattgctcggaggaacaacaacatgcagtggttcaagatcccggccaagacctacttcgagccgaacgccatcaagtacctgcgcgacatgtacggcatcgaaaaggccgtcatcgtgtgcgataaggtcatggagcag

SEQ ID NO: 1855 - DNA, 3291 bp, Unknown
  MAG_14  MAG No. k141_57341
caatgccacccaatccgggttgggcaactggtcggcctgtgcgattgcaggcgtcacggctagcgtggccgccaacgccagcggcgcaatggtcgcaatagcaaaaacggaggataggtgccggaacatcttcatatgttccaacctatcctccgtgaaggctacgtagccggagcccagtcaaacactcagtaaattcttcgtgccggcttagcggcgattgagctgaccgtcaggcctctggcttgtcctcaggcttttgagactcctggaattcgccggtttccgggtcaacctgtgactcgggctgggtggcgtcatatccctgttcatagcgggtgcgccgccagttgcgaatcgaggcgttggtgccacggtgatgcacatggtatttgcgcggcgtaccgcccagcggcagctcttcgacctccttggccacagcgatctggttgacattggacgggtcgccggcggcgatcggcgccacgggctcgggttcggcgggtgcggccgtacgctgctgcatgcgcgagggcagccattcggcgagcctcgacaacagccagcaggcgatgaagtaaatcaccgcggccatgaccagcgtctgcaggatgttgaagtacatcgagccgagtcggcgcgattcctgcagcaggtcggtatacatgatgatcgagcccagagcggtgtccttcaacaccacgaccagctgggtgacggcggccgacagcatggcgtagacggcctgcggcacctcgatctccatcagcgactgcgtttcggtcaggcccaaagcgagcgaggcctcacgctggccgcccggcagattgccgacgccggagcgcaccagttcggcgaccaccgaaccgttgtacagcaccaaggccagcaccacggcccaataggacgggctgggcaggcccgcgaacgcgaaccatcgccagaagaagatcatgagcagcagcaccggcaccgcacggcagaactcgacgatcacggcggaaacgccacgtaccaacgggttcggcagcagtcggcccacgccgaacaccaagccgaacaccacggcacccaccacggccacgatggtggccttgatggtcatccacagtccgggcaggtagaagtcggtccacgcctctcgttcgacggcgggcttccacagctcccagctgagctggttctcgccgtccggcgggttgtgcaggcgcatgaggataaacacgagcaccaccgcgaacagaatgcccgcgatccagttgacgatgcgaatggtgcgccggcccttgggacctggcgcgtcgaacagcacggaattcgaagtatcggccatatccgtcacctccttacggcgagtttgttggacaggtacgtggtgagcatgccgatggggatgatcaggatcacgtagccgagcgcgaagatcaggaagatttggatgatcacgtcgggacggaattcgatcatctcgctcatcagcgaggatgtttcggtggccacggatgcggcggcggccacggtggagttcttgagcagggcgatcagcgtgttgccgagcggtgccacggagcctcggaaggcctgcggcagaatgatctcggtggcggactgcatgaagcccaagcccagcgctcgtgcggcctcggcctggccaatcggcacggtgttgatgcccgaacgcagagattcgcacacgaacgccgccgtgtacaggctcaggccggtgaccgcgagccagaagaagttcgtggtgaaggtgtcggagaagctgagcttcagctgcgcgtaggcacccagcaccatgaacaccatgatgatggtcagcggcaggttcttgaacagttccacatacgcaccggccacggccctgagcgaggaaatcggcgagatgcgcatcaccacaaggatcacgccgaggatcagggagaacagggcggaccatagggtcagttcgatattgaccagaaacgcgccgagcacgtcatactggctgaagagttccaggaatccgctcatcaggcctcctctccttcgtccggggtgggcgggttgtagcgtacgtcgggcgtgtagttggtgcccttggtgttatcgctgatggcgttctcccacgagccgtcctgaatcatgtccacgatggcgttgttgattttggtggccagctgcgtgtcgcccttcttgatgcccacgccgtagtattcctgcgtgaacggtttgccgaccaccttgagcttgccgcgcgaggcggaggccaggccggccaggatgatgtcgtcggtggttaccgcgtccacgatgccggagaacagggcagtggcgcattcggcgtaaccgggctgttccataagctggacttcggaggcgaacttctccttgacggtggcggcggaggtcgaaccggtgacggagcataggcgcttgccgttcaggtcttcggggccgttgatggagttgtcgtccttgcgcacgagcagatcctgtccggccacgaagtacgggccggcgaaggagacggccttcttgcgctcgtcggtgatggagtaggtggcgaggatcatgtccacgtcgccgttctgaatcatggcctcacgctgcttggagggagcttccttccagatgatctggtcttcggaatagccgagtttcttggcgatgtacttggccacgtccacgtcgaagcccacgtaggtgccggacttcttgaagcccaggccgggctggtcgaatttgatgccgatgcggatcttgccggtttcgtccgcgccgcaggcggccagcgacattgtgcaggccacggcggcgagcgcggcgatcacgcggcaaaccttccgtttgaacgtattggtgaatgtcattggattgcgtacccgtctttcagtgggctcgtcagtgggtgaggatcttcgagaggaagtccttggcacggtcggtctgcggatgctcgaagaactcgtcgggcgtgttctcttcgagaatctggccgtccgccatgaagacgatgcggtcggcggccttgcgcgcgaagcccatctcgtgggtcacgcagatcatcgtcatgccttcatgcgcgagttcgaccatcacgtcgagcacttcgttgaccatttccgggtcgagtgcggaggtgggctcgtcgaacagcatgaccttggggcgcatggcgagcgcgcgggcgatggccacacgctgctgctggccgccggagagctgggagggcatcttgctggcttgggagtcgacgcccacgcgggcgagcaggtccatggccagttgctcggcttccttcttgtc

SEQ ID NO: 1856 - DNA, 6317 bp, Unknown
  MAG_14  MAG No. k141_57377
cagcgcgccctcacggtgctgccgcgcctcggattccaggtcatcgtctccgccccggaaagcaagaccggcgaaatcctcgaggtctccaccaaggcctacgtgacctacaaggaccccgacaccggcctcacctccctgcgcgaggccgtgctgcatcagaatgacatggacgatgaatcatcgtcaccaagcatcgcaccataggcacctctgtcgagctgatctccaaagtcgtcgttcctgacgaatcaatagccatgcgtgtggttggtcgtacgctggcggcggaatatcgcgaagcgcaccgtcgcacagattccactgacaggattcagcggcaaatggctgaatgagtcaaaaaccaatcgtcgtaaggccatttgccgactgctcggtgtcgaaacgttgggtctgtcaaaacggccgaccgaactgcggttccgttatctcgatccgggccacgacgattttggtaccgatcgtactgaacgcagcgcgaagattgctatgcgggagcctaagccgacgcccggccttcaatcggcggagcgacgtctttatgaacgactgtgtgctgacaaaaccatcgcttatcggcgtatcgaacaggaacgcattcccatgcgtgatgcagttgacgaattacgcaagcttggcatccccgtgtagtccattgaagattttgtcccggttcgaacatcaatcgtttgacggacgtaccggggcagaatccgttgtcccggtttgtgatttcgggtgtttttcgcgaaccgggacatgttgtgttgccccggtatgggcgtcaatcgtttgatgcgagaatcgggacaacatggcgattctgagattggctttattccgccgtttccgttcgcgttttatgtggttcgtggaaactggaatgtcctggttctcgaaaacaggccaaaatcacgaaccgggacagcgggttttgccccgatgcggacgtcaaacgattgacatgtgaaccggggcaaatcagaggaggagaggtcttcgggatagagcttgactggggctgggcgcacggttgatgtcgcgtgggccggctcttgcgtttcggtccactgatggtccggaattttgcatactatggttcggttttccggcctgacacgccatcgaacaagcgttcgaatttggtcgtgtgttcgggtatccttgggacagatttggcgcgcgcataaccgtgcgcgcgggaacggtgagatggaaggtggggtgtggctgtggcggcaacgcggactggcgcaaggcgcgcaacaagcgcaaagggcgcgaaaaccagcaagggcaagaacggtgaggtcatcgtcgaaaaggtgatgaccagcgactccttcctgagccgggaaatcaaaaaggcgccgctgatcgaacacgatggttcgctggtagctgatatctcgcacatcccgaacgatctcaagatcacgattcagggtgcgcgcgaacacaacctcaagaatgtcgacctggcgattccacgcaaccgtatggtcgtgttcaccggcctgtccggttccggcaaatcctcgctcgcatttgacaccctgttcgccgaaggccagcgacgctacgtcgaatccctgtccgcctacgcccgccagttcctgggtcagatggacaagcccgatgttgacttcatcgagggcctgagcccggccgtctccatcgatcagaagaccaccaaccgcaacccgcgttcgaccgtcggcaccatcaccgaaatctacgattacctgcgactcctcttcgcccgcaccggcatcccgcactgccccgaatgcggcgagcccgtcgcctcccagaccccgcagcagatcgtcgacacgctgctcggctacccggagcgcactcgattccagattctctcgcccgtggtcaagggccgcaagggcgagttcgtggacatgatcgagctgctgcgctccgacggctacgcccgcgcgctcatcgacggcgagatgacacagctgtccgacgacatcaaactcaccaagcagaagaagcacaccatcgaggtcgtggtcgaccgactcgtggtcaaggacggtatccgccaacgtttgactgattcggtggaaaccgccctcaagctcgccaacggcagcatcgtcatcgacttcgtggacgaggaggaaggcagcccggcccgccgccagccgttctccgaacaccgcagctgcccgaacgggcacacgctcgaactcgatgaggtcgagccgcgcaccttctccttcaacgccccctacggtgcctgccccgcctgcaccggtctcggcttcaaactggaaatcgacccggacctcatcatctccgacccggacaagtcactggccgacggcgtcatcgaaccgtggagcggcaccaagatgacctcccagtactacggccacatcctcgaaggcttggccaaggaaatgggcttctccatgaagaccccttggaaggacctgccggacgacgtcaagcacgacatcctctacggccacgacttcaaggtcaacgtctcctaccgcaatcgctggggacgcctgcgtgaatactccaccggtttcgaaggcgtgatccgcacgctcatgcgacgccacgacgaaaccgattcgcagtccatgcgcgaatactacgagtcgtacatgcgcgaagtgccctgccaggtctgccacggacgtcgtctgaagcccgaggtgctctctgtcaccgtggacggcaaatccatcttcgacgtatgtgacatgcccgtcgtacgcgaactcgcctggatcaacggcctgaaactcgaaggctcggcacagctgatcgccggcgaagtgctcaaggagatcaaggcccgactcggcttcctgaacgacgtcggcctcgactacctgaccctctcgcgcgcggccgccaccctgtccggcggagaagcgcagcgcatccgactcgccacgcagatcggctccggcctggtcggcgtcatgtacgtgctcgacgagccgtccatcggcctgcaccagcgtgacaacgaacgcctcatcgaaaccctgcaccacctgcgcgatctcggcaacacgctgatcgtcgtcgaacacgacgaggacacgatacgccgcgccgactgggtggtcgacatcggccccggcgccggcgaacacggcggcgaagtcatctactccggccccgccaagcacctcatcgaagccaagcgctccatcaccggcgactacatcgcccaccggcgagagatcgccgtgcccgccaagcgccgcaagatccacaagacccaggtgctcaaagtcgtgggtgcccgcgagaacaacctcaagaacatcgacgtgagcttcccgctcggcgtgctcaccgtggtcaccggcgtctccggctccggcaaatcctcgctggtcaacacgatcctctacccggtgctcgccgacaagctcaacggtgcacgcatcgtacccggccgccacaggcgcgtggaaggcgtggaccaggtgcgcaaggtgatccacgtcgaccagaacccgatcggccgcacgccgagatccaaccccgccacctacaccggtgtgtgggacaagatccgcacccttttcgccaagactcccgaagcccaggtgcgcggctacggccccggccgcttcagtttcaacgtcaaaggcggccgatgcgaggcctgccacggcgacggcacgctgaagatcgaaatgaacttcctgcccgacgtctacgtggactgcgaggtctgccacggcaaacgatacaaccgcgagacccttgaagtcacgtacaacggcaagaccgtggccgacatcctcaacatgcccatcgaggaggccgccgacttcttcaaggcgtacaccggcatctcccgatacctgaagaccctcgtggacgtcggcctcggctacatccgactcggccagcccgcacccaccctgtccggcggcgaatcgcagcgcgtcaagcttgccaccgagctgcagcgccgatccgacggcaaaaccgtgtacatcctcgacgagccgaccactggcctgcacttcgaagacgtgaacaagctgctcaaggtgctgcagtccctggtggacaagggcaatacggtcatcgtcatcgaacataatctggatgtgatcaaggaggccgactggctgatcgatctcggtccggagggtggcgacggaggcggcaccatcgtcacgcagggcacgcccgaacaggttgccgaatgcgaatcctcatggaccggcaagttcctgaaatccatgctttagccttccattgcagctgacctcgggtgggttggggtggtatgttgctggacacgctccgggccgctcaggccaagtctttacggtccagcagcacataccaacccgcccaatccctgatgattggttttgcttaatagcgaggaggattatgacgaacgatattgagcggcatagtccggatgagtggcggaagaccgcggcggcgttaatgccggaaagcgtagctgtgggcgccggggaaacgacggcgaaggtgaatgcgaatggggcacctttgctgggggattctcgcgacctgttccgacccaagacctcggatattcccgccaaacccggtgtgtacaaatggcgcgacggggaagggcgcgtcatttatgtgggcaaggcgaagaacctgcgcaacaggctcaccaattatttccagccgctgtatctgctgcatccgcgcacgcagaccatggtgctgaccgcacgcagtctggagtggacggtcgtcgccaccgaactggaatcactgacgttggaatacacgtggatcaaggaattcgacccacggttcaacgtgcagttccgcgacgacaagacctatccgtatctcgcggtcagcacgggggagcgaattccgcgcgtgtgggtcacgcggtcgcgcaaacggcgggatacccggtatttcggcccctatgccaaagtgtgggaattgcggcacagtcttgaccggttgctgcgcacgttcccggtacgcacctgcaccaccaacgtattccacaaggcgcaactgaccggacggccatgcctgttcgcctccatcggcaaatgctccgcaccctgcgtgaaccgtatcgaagcggacgaacaccggcggctgtgcgaacagctggtcggcgtgatgaccggacgactcggacggccatacatcgcccagttgacccgcgacatgaaagaggccagcgccgaactcgaattcgagaaagccgcccgactgcgcgaccagatccaaatgctggaaaccgtggtgcaacagaacgccgtcgtcttcgaccaggatgtggacgcggacgtgttcggcttcgccagcgacgagctcgaagcctcggtgcacgccttttatgtgcgcgccggctctattcgcggcgaacgcaactggagcgtcgaacgagttgaggacatcgatgacgccgacttgatggccgaccttctggtgcaggtgtattcggactccgccggggacaatcacccccagtcggccgcgaccatctccaccaatcgcgaggccatcggctccacacagaccatcacggccacggacgctgtggcacgcgcccaggccacccgagaacgcaacacccgtcaggagaccaccggacgcgcggacctgctggcacccatcgcaccggtaccgcgcgaaatcatcgtgcccgtcgaaccggcccgccgcgaggaactcgaaggctggctgaccaatctgcgcgggggcgcggtgaccatccgcgtggcctcgcgaggcgacaagaagcagcttatggaccgcgccaacgagaacgccagccaagcactgcaacgcagcaagatgagccgcatctccgacatgggcgcacgcacccaggccatgaacgatgtggccaaggcattgggactcgcgcaagccccgctgcgcatcgaatgctacgacatttcgaacactgtgggcggtgccttccaagtggcctccatggtggtgttcgaagacgcgatcgccaagaaatccgaataccgacgcttcgccgtccgaggcaaggacggcaaaggcgcggtggatgatctgtccgcgctttacgagacgctcacccgccgcttcaggcacggcaacatcgccggcgactccggcgaaagcatcgacgcggaacagcgcgcggcctcggccgccggcaagatgaccactgccgtggcggcggagacaatcgttgcgaacggtaacgacaatggtgagggcggttccgacatcagtggcaaggggcacgcggtgccggtcggagtgcagaacgatgcacgggagtc

SEQ ID NO: 1857 - DNA, 4711 bp, Unknown
  MAG_14  MAG No. k141_58348
aggaagccgctgagcaggcgaagaaggagctctcctcctccacctccaccagcatttccatgcagtacctggccatgacccctgacggcaccccggtgcacctggacgagaccctgacccgtgcgcacttcgaggaaatgacctccgacctgctgggccgctgccgcacgccgttcaacaacgtgctgcacgacgccggcatctccgtgagcgacatcgaccacgtggtgctcgtcggtggttccactcgtatgcccgccgtcaaggacctggtcaaggaactcaccggtggtaaggaagcgaaccagtccgtgaacccggatgaggttgtggctgtcggtgccgccgtgcagtccggcgtcatcaagggcgaccgtaaggacgtcctgcttatcgacgtgacccctctgtccctcggtatcgagaccaagggtggcatcatgaccaagctcatcgatcgcaacaccgccatcccgaccaagcgctccgaggtcttctccaccgctgaagacaaccagccgtccgtgctgattcaggtctaccagggtgagcgtgagttcgctcgcgacaacaagccgctgggcaccttcgagctgaccggcatcgctccggctccgcgtggcgtcccgcagatcgaggtcaccttcgacatcgacgccaacggcatcgtgcacgtgtccgctaaggacaagggcaccggcaaggagcagtccatgaccatcaccggtggttccggcctgccgaaggacgagatcgaccgcatggtcaaggaagccgaggctcacgaggctgaggataagcagcgcaaggaagatgccgagacccgcaaccaggctgaggccttcgcctactccaccgagaagctcgtcaacgacaacaaggacaagctctccgacgacatcgtcaaggaagtcaccgacaaggtcaacgctctgaaggaagccctgaagggtgacgacaccgagaaggtcaagactgctcagaccgagctgatgaccgccgctcagaagatcggccaggtcctctacgcccagcagggtgctgaaggtgccgcggctggtgccggtgcggccggcgcttccgctggctccgcctccggttctgacgacgacaccgtcgaggccgaggtcgtggacgacgatgacaacaaggacaacaagtgatgtccgagttcaacaaggacgactacctgaacgacctgccggatccctcagatgctgaggctgccggccaggccgctcaggcctcttcaggggctgacgcctccgccgagtccgactctgcgcaggattcggctgcccaggctccttccaatgaaggagccgacgcggctcctgccgcagctgagggagagaagtcggatgccggagagaagactggcgaaggccagtccgattccgaagacaccctcacccccctcggcaaggccaagaaggaagccgcagactacctcgaagccctgcaacgcgaacgtgcggagttcatcaactaccgcaatcgcacgcagaaggagcaggagcgcttccgccagcacggcatcatcgacgtgctgaccgcgctgctgcccgccctcgacgacatcgaccgcattcgcgaacacagcgagatggacgactcgttcaaggccgttgccgccaagatcgacaaggctttcgagaagttcggcgtcgagaagttcggcgaaaagggcgaggacttcgaccccaccaagcatgaggcaatcctgcacaagccggatgccgatgccgacaaggaaaccgtcgacaccgtggtggaagccggctaccgtatcggcgaccgcgtaatccgcgccgcccgagtagtagtagcctccccgcaaaactgataacggccagctcgttaacgagctgacattaccttggctcccgctggcgggagctggcagccgaaggctgactgagggtggtcaaacactgaatataaaccaccctcagtctcgcttcgttcgacagctcccgccaacgggagccaaccataaagactcttcaagaaaggagacatgaatggctgaaaacgaatggctcagtaaagacttctacaaagtccttggtgtctccaaggacgcttcggacgacgacatcaaaaaggcgtaccgcgagctcgcccgcaagtaccgccctgacgtcaacaagaccaaggaagccgaggagaagttcaaggacatctccgaagcctacgacgtgctgagcaagaaggaagatcgccaaaagtacgacgcgattcgccagttcggcatgggcggcgcccgcttcgccggcggttccggcgccggcggcttcgacgcttccggtttctctgatatcttcggctccatgtttggccagggtgccggtggcaacggttcgcgtatccgcttctccacttcgggcggcggccccaacaacatcaacgacatcttctcgatgttcggcggtgctgcaggtcagggcggccagtcgtatggcggctacggccaatcgccgtacggcaatgccggcggctatggctatgaggaggccccgcgccccgaaaacggcgaggaccgcaactccaagatcagcctgaccctgcgtcaggcggtcaagggcgctaccgtgtccctgtccgtggacggcaagaagttcaaggcccacgtgcctgcgggcgtcaaggacggccagaaaatcaagcttgccggcaagggcaagccgggcatcaacggcggcaaggccggcgatttgtacctgcacgtcaccgtcaagcccgatgccgcgttctcgatgcgcggccacgacatcgtcatggacctgcccgtaactgtgggccaggccgtggccggtggcaaggtcgaggccaaggatatcgacggcaatcccgtcaccttcaaggtgccggcaggctccagctccggtgccgaggtcaagctcgcgggacttggcgtccagcgcggcaaccagccgggcgacctgatcggccgcgtgcagatcatggtccccgccaagccgggtctggccgtcaagcacgccgccaaagaattcgacgaaaaagccggcgactatctcagcctgtaatcaggaggtgaacaatggcgcggttagccaaccaaatgaagcagttgtacgcgatgtgcgcaaccgcgctggtgatgggcagggccgatctcgacggagccgatgacgtcggcttcgacatcgaactgcccatcttcaccgtcggccaggcagccgaactgggcaacatccacccccagaccctccgccagtacgaccggctgggtctggtccgtccgcagcgcaccgatggcggcgcacgccgctactgcctgcgcgacatcgcccgcctgactcgagctcagcgcctaagtcaggatgagggcatcaatctttccggcatcgcacgcattttggccctcgaagaagagaatcgccaactgcgccgcgaagtcaaacgcatgcaaaccggcgaccaggagagcgttttcgccgcaggccgtgacggcaatatcgtggaggtacaacgctccaaccgcgcccgcctctggcgcaacgccatccgccgcgaaacccgcgaactgcccggccgcgataccgctgctgacaccacgcgcgaatccgactccacccccgccgattccaaatccatggtcctgtggggttggtgatttgctgttcggctgtcgtgcggagttggtgagataggtatatcgaatacgaatagttgaggattcactgcgacgtacggaggtaaccatgctgctcaaggccgtgttttgggatttggacggaacgcttatcgattcggagccgctttggcatgacggtgaaatcgagatcgcgcacaacaatggcggcgagtggaacgaggacctcggttgggagtgctccggcactccggtgccacacgtggcagaggtcatgattgcgcatggctgcacattgagcgttcccgaaatcgacaaacagctcaaggattatgtgttcaaggcggaggtcgaacgtctgccgtggattcccggcgtattggacgtgctgcactcgctcaaggaggccggcattccgtccatgctggtcaccacgtcgccgcgccgtatggcggagaacatcatgaagcagtccgagggactgttcgccggctacgtctgtggcgacgatccgtacgaacacaagccgaaccctgcgccctatctggccgcagccgacaagcttggcatcgcccgtgaagacatggccaagtgcgtggtgctcgaggattcctcggttggacttcaggccggtgcggcatcgggcgcgactctgatcgcgcagactggctggattcgcacggatacttccggcctgggccagttcgcgtccatcgaatcgtatgacggtatcgatgcggccgcgctggacggtttcgtgcgccagcgtcttggtgagtaattgattacatcaccgcgcatgcagttctcctcatgagcggtggaatgtgttgacgatataccagcgaagcacgccatatttgtaaagaagatggcagtaatggctgctatgaggttccggtggccccctcttgtatcggggcgactggtagagtggttgacggttttcagacgaatgtctggttcattggacagattgttcacacatatagacgtataggactcataggaatcacatgggcttcgttaatttcatcctcgaactgctgaaggatccgcgtgccgcgattgccggttggattgccatgggcg

SEQ ID NO: 1858 - DNA, 12463 bp, Unknown
  MAG_14  MAG No. k141_59011
agtctcgtttcacgagacagctcccgccagcgggagccagaagtaccgatcagtggaagaagtgacgggtaccggtgaggtacatggtcacgccggcctgcttggccgcttcgatgacctcctcatcgcggatggatccgccgggctgcacgatggccttgacgcccgcgtcgataagcacctgggcaccatcggcgaacgggaagaacgcatcggatgccgcgaccgcaccggtggcgcgatcggcaccatcggccagcgtgttggcgcgctcgacggccaaatggcaggagtccacgcggttgacttggcccatgccgatgccgaccgtggcctggtcgtgggccagcaggatggcgttggacttcacgcagcggattgcacgccatgcgaacacgaggtccttcagcgtgtcggcgtcggcggcatcgccggccacgagcttccaggcgtccggatcgtcgccgacggcgttgatcagatcggtgtcctgcacaagcaggccgccatcgatctggcggatggcctcgtggcccttcggtggctcggccaccttgaggatgcgcaggttcttcttcttggtctgcagcagttcgagcgcggccggctcatagtcgggggcgacgatgacttcggtgaaaatcgggcgcacgctttcggccatctcaagagtgaccttggagttgcaggcgatcacaccgccgtaggcgctcatcgggtcgcaggcgtgagccttcttgtgggcctcggccgcggtcgcgccgatggccagaccgcacggattgttgtgcttgactacggccacggcaatggcgggagccatatcccatacggtgcgccaggcggcgtccgcgtccacgtagttgttgtagctcatcggcttgccgccgagctgctcggcgtgggcgaaaccggtctggttgagcgggtcaatgtagagggcggcctgctggtgggagttctcaccgtagcgcagggtgtgcgcacgatcccaggtgcgggtgaactgggccgggaacttggcggaatcgacttcagtgccctgatcgtccttgtccacctcgacggcgtccagagaggccggcttgggccagtgcttggcggtccactcgttgatggtggcgtcataggcggcggtgtgcgcgaaggccttggctgcaagccacttgcgctcgtccagagagaagccggtgccatcggccacgcgggaggcgaccagtgcataatcggccgggtcggtgacgatggccacggtggcgtggttcttggccgcgccacgcaccatggaggggccgccgatgtcgatcttctcgatggtatcggcctcgttggcgccggagcgcacggtgtcggcgaacgggtacaggttgacgaccaccaagtcgaacggcttgatgccgaactcctcgagctgcttggcatgctcggggttggtcatatcagccagaatgccggcgtgaatgtacggatgcagcgtcttgacgcggccgtcgaggcattcggggaatccggtgacatcggacacctcggttaccttgacgcccagctcggcgagcttcctggcggtcgaaccggtggaaacgacttcggtgccggccttcacgaacgcttccgcgagtacttcgatgccttccttatgaaagaccgagaccagtgcccgacggatcggtcggttcgtgtttgtcatcctgttcctccttggattcttgtggttgtgacgccagggaccgcgcctgacggacgatgacggtcttcggggtcgcggcggtggtgcgggaatcattgatcctcccaaccaaccagcctatcgaaaaaacgagcactgtgccaatcagcgcgagcagccatgccgcggtaaatcccaatgcggtcgaatgaccgacgactctggtggaggccatgacgtcgacgccaatgtgagcgagacgatgatcgccaagcgatccattggacagagcgaacagcaatgtggatgccagtgagatcagcatcgcgctcaggcagaatgacccggcggagtagatcagcgaaaccagtactgggccgcgggtggacgcattccgtatattcaacggtctgcaggcgaatccttgcggcaggaatacagccagcaggcccacgagcgcagcgatggcgagaggcgcgttcaaggcaacggtacgccatagttcgctgctgaccggttcgggcagaataccgaatgccggtattgcaggaagctctttggattggccgagccataacgtgaaactggccaaatcaccgatggcgaatccgccgccgaagagccaggaaacagcccagagcatgacgttgggtagccagatcagcatggcgacggtggtgagaattcgtgaaccggtttccatcccggacaattcgaacaacgatacgacagcggcatggttacgtaccgaccatacgatgacggtaatcaatccaattgccaggtatatgcccagtatcgcgacggccaagacgacgccgattttcaggcagtggcgtatgtccgccggcacctgcttgcgagtccagtccctgaatgctcgcatcttggctgattccggtacggctgcgcataggaaaccgatcgagaatacgatggctgctttcagcaacaccagccactggtcatcgacaagacctaggtgtacggattgccggaatgcctcgttcaacccgagccaaacattcaatccggcaacatacgcatgcggcccgtatgctttgattcgcatggtgagtgcattgatcagccatatcagcagtatggtcaacatcaatggcgtgatggtgagggtgaacgaatcggttctagagcccgatccctcactcagaagcacaacggcctgtgtcagcgaggttgtgccgacggtgagattgtcgccgccctcttccatggagacaaccaataacatcagcgctgtatagcaacctaatgcaacggcatagatggccatggatgcgagggcgactatggctccccgcacccattggcgaatcacggctttcatcacgattggttggaaccgatcagtcgatgttggccttggcgagtatgtcgcgcatgatttcagcggcctggcccggggtcttgcccacggggatacccgccgcttcgagcgcgttcttcttgtcctgggcggtgcccttgcctccggagacgatggcgccggcgtggcccatctgcttgccttcgggggcggtgaaaccggcgatgtaggcgacaaccggcttggtcatgtgctccttggcccatgcggcggcgtcctgttcggcgaagccgccgatctcgccgatcatcatgacagccttggtgtcggggtcggcttcgaatgcctgcagggcttccagcagcgtcgtgccgacgatcggatcgccgccggcgccgagacatgcggtgaagccgatatcggacagttcgcccatgagctggtaggtgagggtgccggatttggagaccagtccgagcgggccgcggccgacgatgccgtcggggatgatgcccaagttgacgccagggttgccgagcgtgatgaaaccggggcagttcggtccgatgatgcgcacgcccttcttgagcgccagctcgacgaagtatgcggaatcggccaccggaatgccttcagtgatgaccacgatgagttcgatgccggcttcgacggcttcgaccacggcggacttggcgaacttcggcggcacgaacaccacgctggccttggcgccggtggcttcacgtgcttcgccgcaggtggcgaacacggggatgtccacgtcggcaccgttcttggcaccggggaaggtgacggatgtgccggccttgcgcgggttcacgccgccgacgatattggtgccggccttgagcatgcgagccgtgtgggtcatgccctgatggccggtcatgccctggacgataacgggagcgccgtcttcgatgaacagcatcagcgaacctccttggactgggtcgcctcaccggcgagctgcgcggccttggctgccgcgccttccatggtttcggacacatggatattcggattgttggcggaagcgaggatatgcagaccctcggcggcggcgttgccatcgaaacgcacgacgatcggcttggaaccgccgagcttggcgaccgcttcgaggatgccgttggcgacttccacgcaggaggtgatgccgccatagacattgatgaacacggattcgacctgagggtcggacagtacgatctccaggctttcggccatgacggctgcggaggcgccgccgccgatgtccaggaagttggcgggcttgatgttggtgccctgttcctcgccagcgccggagacggcatccagggaactcatgacgagtcctgcgccgttgccgatcacaccgacctcgccgtgcaggtgcacgtagtgcaggccgtgttcgcgggcgcgctgttcgaaggggtcgggaacgatgagatccacgaaacgcgcccagccatcatggcggaaggaggcgttgtcatccaaggagatcttggcgtccaaggcgctcagctgcttggtggattcgtcatccgggtcgccgatcttggcgagcggattgatttccacgagcgtggcatcgttgtctttgaagcagcgccacatcttgagcagaatctgcgcggcctgatcgacgtccgcgtggtagaagccgatgctctgtgccatttcggtggcagcggccaggtcgaagtcgccgagcgcatcgatgtgcaggcgcttgacggcctccggatgttccttggcgatttcctcgacttcggtgccgccgttggcggtggccagcacgtcgaagtcgcgcgaggtgcggtccacggagatggacacgtaatattcgtgcaggatgttcttggcttcggccacaagcacgccggaaaccttgtgcccgtggatggtcatcggcaggatggactcggattcaagaatcgcctcgtcgcggttatgggcgatcttgacgccgccggcctgaccacgatgaccgatcttgacctgcgccttgattacgcagggatagccgattttgtccgccgcttcggcgacttcatgggagttctgggcaaagatggcgtccggggtgggaatgtcctgttcctcgagcagctgacgcgcctggtattcgtaaagatccatcgatccttccctgactatgtaattggtccggcatataactgtacacagtacatgccggaccttgaaaactaactgtacgttgggtgagacggaatctcaggccggcatcgcgatcagcgagctgctgggcttgccgccgagcttatccagaccgtcgagaccatcgagccgcatcacaaaactgaagcccaccacagtgccgcccgccttttcgataaggtcggtgccggctttggcggtgccgcctgtggcgatgagatcatcgacaatgagcactcgctcccccgcctgtacggcgtcggtttcgatttcgacgctggctgtgccgtattcgaggtcataggattcaccgatggtttcgggcggcaatttaccggccttgcgcacggcgatgaaacccttgcccagatgggcggccatggccgggccgaacaggaacccgcgcgattcgagaccggcaatggagtcgaattcgctcggggacaccggcagagccgtttcaagcgccttgagcagaatcttcaagcccttggggtcggcgagcactggcatgaaatcacggaagataatgccttccttgggaaaccccggtatggaacgcaccaaggacaccagatattcggcgtcctgttgcccgaccttgctcaatgcgtcgatggtgatgtccgactgtgccatagtgctcgccccttttatgcctttgcgatgcgatactcggatggtgctaccgaatcgaacagcttacttcgtcttggtttcgttgtcgtcaccggtctcgtcagcggtgtcttcctcggacacgacggacgcctcgatcggaacctgaccagcctcatcgttagccggagcctcggtgtcttcgtcgggcagcgggttgccgttctcgtcgacctcatcatcggacacataggccgggcgggtgtactcacgggcgatggcgttgaagccgaaacgcagcttggagccttcggagtcgatgacgatctcctcatactgctcgtcgacttcgacgaccttgccgatcacctggccgatggtgatgacctcggtgccgggctgcaggttgcgacggaagtcctgcttctcctgctgttgctgcttggccttcttggactgccaccacatcatgccgccgaacacgacgacgatcacgatgagcataatgtactgttgttccacgaaacaactccttcaaacgagcgacattgacgaaacgccgccaagtgtgcaaacaggagaaagtctagaagagcttgctgacatcatctttgggcgtaattcccaaatgctgccatgccttctcggtagccacgcggcctttgggcgtgcgaatcataaaaccttcgcgcacaagatacggctcgcacacggtttccacggtttccgattcctcgcccaccatggccgccagattgttcaggcccacgggtccaccgttgaagttgcgcacgatggcattgagcacggcgatgtccagccggtcgaggccttcggagtcgatctggtacagggccagcgcctccttgacgtcgtccggccgcaccacgatcaggtcgtggacgatggcccagtcgcgtacacggcgtagcaatcggttggcgatacgcggcgtgccgcgcgaacgcaacgcaagctcatgagcggaacccgcatcaaggtttacgcccagtacgttggccgaacgttcgatgagcttttccaactcctcatgcggatagaagtcgagatgtgcggtgaagccaaagcgtgcgcgcaacgggcttggcagcataccttcgcgcgtggtggcaccgatgacggtgaatcgcggcagggtcagcgggatggagcttgcgcccgggcctttgccgaccatcacatcgacgcggaagtcctccatcgcgatatacagcagctcttcggcggcgcgcggcagacgatggatctcgtcgatgaacagcacttcgccgacgtcgagggagctcagaatcgaagcaagatcaccggcatgttgaaccgcagggccggaagtcacgcgaatcggcacttcaagctcattggcaacgatcatggccaacgtggttttgcccaagccaggagggccggcaagcagaatatggtccggtggcacatcgcgtttgcgggccgcgtccaggaacagttgcagctgggccttgagccgtggctgtccgataaagccttcgagaacatgggggcgcagctcctcgtcgctgaccggctcgttgccgatcggctgggaggagaccatgcgcaacgactcttcgttggcaccggtgtttgaggtaccgtaatccgttgtctcgctcatcagcggcccctatccatcagcgccaaagccagacgtagcacacgcggcacatcgtcggtggcaagcggcgtgggaatatcgttttcggcgcaagcctcggcaacggcctgctgggcgtcctgctgacgccagccaagtgaaatcagtccttcgacaacctgttccgtaccggtatccaccggagacttggatattgccgcctgagcggaagcaccctcgatctgactcaaatcaatagagcccttaagctcgaggatgattttctgtgcgcccttcttgcccagccccggagccttggccagcgcggtggcgtcgttgtcggcgatggcgtgggccagctgactcggcgtcagtgtggagagtaacgattgggccactttaggtccaatgccggagaccttgatgagttgcagaaaggttttcttggcgtcccgatccaggaatccatgcagggtaatggcatcctgagagaggttcatataggtgaagacgcgggtgtcttgcccggcgtgcagacggctcaggtcggtggcggacatgcgcacttcgtagcccactcccccaacatcaatcaatgcggtatcggtttcgaccgattcaacccgcccggtcagcatgccgatcatacaggtactccttcagggctccaggattcaagactcgaacaactgttcgaaagtatactacatgcctcggtcgtgattgatgcggcggcgcgtggatttctgtgcggcctcagcccactggcgttgcgcggcggtcagatgttgttcgcgttcgccgccctgcaatgcgcctgccgggcgcagcgcatggcaaatggccaaagccaaggcatcggcggcatcggcgggagtcggcattttggtgaggttcaaaatacgtgtcaccatacgctccacctgaatcttctgcgcctgcccgttaccggtgatagccagcttggcttcggtaggcgtatgcaacgccacgggaatattgcgttgcgcggcggcgagcatggcgaggccggcggcctgtgcggtaccgagtacggtgttgcggttggattgtgcgaacactcgttcgatggatacggcatcgggtgcgaagcgatccattttctcggacaggccgttgtagatggccagtagacgcagatcctgggtgatatccggtgaggaccgcaccacgtccacgtgaataaacgaaagccggcggtgctcgccggcttcgatcacgccgaccccgcaacgtgtgagcccggggtcgacgccaaggataatcacgaggattactcctcgtcgagctgggccatcacctcgtcggaagcggtccagttggagtagaagttctgcacatcgtcgaggtcatcgaggttgtcgatgagcttggacaccttgcgggcatcgtcgaggctcaactcgacctcgttcttcggctgcatgacctggtcggcggaatcgtagtcgaagccggcgtcctgcagagccttgcgcacggtgaacaggtcggacggaccggtcacaacggtgaacacctcaccgtcatcggtaacgtcctcggcaccggcttcggcggcggtttcgaacagcttgtcgaagtccacgccctcggacggcaccacgatctggcccttgcgctcgaagttgaaggacacggagccggaggtggccagggagccgttgcccttggtcagggtggaacggacttcggcggccgcacggttgcggttgtcggtaaggcattcgatgatgaggccaacgccggcaggagcgtagccctcgtagacgatgtcttcgtagttggcggcgccgtcttcagcaccggcaccacgcttgacggcacgagcgatgttgtcggccggcatggaggccttcttggccttgtagatggcatcgtacagggacgggttgccgtccgggtcgccaccgccgaggcgggcggcgatttcgatgttcttgatgagcttggcgaagagcttgccgcgcttggcgtcgatggcggccttcttgtgcttggtggtcgcccacttggaatgacctgacataatgctcctagcaattattgaaacggatgatgtcaaacgaaacgattgtaggccgttaatcagacatacccgtgatgtttccgatgattgtcttgttatgcgtaccgataagaccggtcacgcggggtgccgcacctgtgttaggcaagcggcagatgatactgcggagccagctgttcgaatgcctgggcataggcttctcgctggtcggacagcagaataggcatggtgcgtgtctgggcgacgatgggcatgaagttcgcgtcaccattccagcgaggcactacatgctgatggaggtgagcggcgactcctgcgcctgctacttcgccctgattaatgccgatattgtaaccgtgcggacgggagacggtttccatcaccttcatggcgagggtggtggccttctcgaattcgaacagttcggcatcgtcgagttcggtgatgaatccgacgtgacggtacgggcagatcatgagatgcccgacattgtatgggtagaggttcatgatggcgaacacgtgcgtgccacgccaggcgatgaggccgtcttcgtcggatttcttgggtccggcgcagaacgggcattccttcgtcttgggcttggttgggcgatcctcgctgttgcgcagcacataggtcatgcgctgcggagtccacagtcgttcgaccgtgtcctcctgaggcggaaagtccgccggattatcgacacgcacgtcagtcattttcgcaccctttcttggctcccctctctgaggggagctgtccgtgaaacggactgaggggagtgcgagccatgcaggactcccctcagtcgcctacggagccagctcccctcagagaggggagccagtaccattcacatcactcagccacagcggcgttgaagtcgtcggcggagttcacctggacgcgcttcttgatgacggtgaggatctgctcgcgggccttgtccaccggaacgccgttgagctggctgccgtcacggaagcggaagctgaccgcgttgttgttcatgtcttcctcaccgacgatgaggatgaacggcaccttggacttggaggcgttgcgaatcttcttgccgaagcgatcgtcggagtagtcgatctcgcaacggaccatctcgtcctcaagggacttgacgaaaccggccagatgcggggcgaactcgtcggcaaccggcacgccgagcacctgcacgggggccagccacgccgggaaggcgcctgcgtagtgctcgagcagcacggcgaagaagcgttcgatggagccgaacagggcgcggtgaatcatcaccggacgctggtgggtaccgtccttcgcgatgtactcgagctggaaacgctcgggcaggttgaagtcgagctggatggtcgagacctgccaggtgcggccgatggcgtcgcgggcctgcacggagatcttcgggccgtagaaggcggcgccgcacggatcgtcgacgagctcgaggttggattccttggcgacctcggcgagcgtgttggtggcctcctcccagatctcgtcggagccgacgtacttgttcgggtccttggtggacagctcgaggtagaagtcggtcaggccaaagtccttgagcaggttcagcacgaaggtcagcaggctggtgagctcgtctttcatctgctcgcgggtgcagtagatgtgggagtcgtcctgggtgaggccgcgcacgcgggtcaggccgtggacctcgccggacttctcgtagcggtacacggtgccgaactcgaagaggcgcagcggcagctcgcggtaggagcgctgacgggacttgaagatcaggttgtgcatcgggcagttcatcggcttcaggtagtagtcggcgcccggcttggtgatgttgccgtccgcgtccttttcctcgtcgaggtgcatgggcgggtacatgccgtccttgtaccagtgcaggtggccggaggtctcgtacaggccgcccttggtgatgtgcggggtctgcacgaagctgtagtggtgcttgcggtgcatctcacgggagtagtcctccatcgcgttgatcacggcggcgcccttcgggtggaacacggccaggccggggccaatttcatccgggaaggagaacaggtccatctcggcgccgagcttgcggtgatcgcgcttggcggcctcctcgagacgggtctggtaggccttgaggtcttccttggtggcccacgcggtgccgtagatgcgctgcatggtcgggttcttctcggaaccacgccagtaggcggcggcggaacgctcgatcttgaaggccttgatgtagcgggtgttcggcaggtgcggaccgcggcacaggtccttccaaaccacattgccatcacggtctacgttgtcgtagaagctgagctccttttcggagatctcggtggcggcggccgggtcgaggtgtgcttccttgtcttcgatcagttcgatcttaaagggctggtcggcctcttccttcagagcctcttcctcagtcacggaacggcggcggaaggactgggaggacttgatgatgcgctgcatgcgcttctcgatgtccttgaggtcgtccggggtgaagggctggtcgacctggaagtcgtagtagaagccgtccttgatgacggggccgacgccgagcttggcgttcgggtagacttcctgcacggcctgggccatgacgtgggtggccgagtgacgcatgattgcgaggccgtcttcggagtcgagggcgatggggtcgacggtatcgccatcgttcagcggcgtgtacaggtcacggttctcgccgttgatcttgaccgcgatgatgttcttgtcttccgcgaacagttctacgccggtggtggttgcttccacctccttcgcttcgccgttgacggttatggagatggtagcttgcgccatgatttgtcctttgctatcggggcccacggtactaatgtgcaggcctggactggttaatcaacgtaggacacgataggttgg

SEQ ID NO: 1859 - DNA, 6697 bp, Unknown
  MAG_14  MAG No. k141_59151
cctggactggttaatcaacgtaggacacgataggttgggcgtgcgacaaataccaccagcatctgaaccaatacgaaaaaaacctcgccgaagcgaggtttcgttgtggagcggacaacgggactcgaacccgcggtctcaaccttggcaaggttgcgctttaccaactaagctatgtccgcgtgtgtttccttggcgaggtctccctgccgaagcacgagtgtttactatactcacatgcgtgtagttcgtccagctgcggcgtgtcgcctgtaattgcatactctcgcttatggctaaagcgtgcgcttcgggcaatgaattccagttactctagaggtatgagtgaagcagcgaaggacaccggcgcagtattgatcgccgcattcgagggatggaatgatgcctgtcaggcggcgacgaacgcggtgcgccatctggtcaagcgatatgagtcccgcgagattcgtcatattagatgtgatgatttctatgactatcaggttgcccgtcctatgctgtgccatgttgcgggacgcaccaatcttatctggccgcagaccacgttctacgacatcacgttggacgcaggcaagcatatctatgcgcagatcgcccccgaaccgaactatcggtggaaggaatactgtagccagagtctggccattgccgatgagctggatgtcaatcggatcattacgttaggttcgatgttctccgattgcccgcatacccgtccgttgcccatcgccgtcagcgacggagactgtcaatgcgaaggagaccggtcgtataacggcccggtaggcattcctaccgttttggatgtggccgccgcgcagcaaggttttgctcattcctcgatgtgggtgtccatcccccaatatttgggcagcgacgaatgttctgccggcactatgcgattgctggatgcgttgggcaagcatatcggcttcaccttcgatacggcagatctgaagcagaaagccgaacagtggaaggcgcaagcctcgatactggttcgttgtaatgaccagcttcacgattacgtggagcatttggagcacgactacgacttgcagcagaaagccgaggcggaggcttccttgggagcgccccaggccgaacaactagtcaaagaagcagaagcgtttctgcgccagatgggcaattagcccatatatggcgtgctcccgctggatgaacagccctgtggacaattcatagcagtgcaccatgtgcacgtcgcacaaaatgtcgggagctggctcgcgtagcgagactgagggtggttctgctggcatattccagtgaccacccccagtcagcttcgctgacggctcccgccagcgggagcaccattatattggagtcgtctatcgacccgtcttatgccgcagccgccacggagggatcgatggccggcagcacgcccacaatcagcagcaaggcgacgaccacagccaaaccgatgcggtagatggcgaaggccttataggagaagttcgatacgaacttcaggaatccgatgatcacgatgtagccgagtacgaagctgatgaccatggctacgagggtcggcccccagccggggaacatcgcatcggttttgtagttcttcacggccttgatggcttcgagcaaacctgagccgaacaccgcggggatggccatcaggaagctcagacgtacagcggcctcacgcgtgtagcccagtgcgcgaccgacggtgatggtgccgccggagcgggacacaccaggaatcagcgccatggactggcccaaaccgaagaggaacgcatcacgatacgtcatatcattcatggttttgttctggcgagccttggcatccaccatccacagcagaatgccgaataccaacagcacggttaccgtaatccacaggttgcgcaacgaggtctcgatgacgttctgcagagtgaagccgaggatgataatcggaatcgagccgacgataatgttccagccgagtgtggcgtaattgtcgccgcggcccatgcgggccttccaatccttgccgttcttgccgaacaggcagctgaaccagtgagtaaggatattgatgatgtcgtgacggaaatacagaatcaccgcaagttcggtgccgatttggatgatggcggtaaacgccgcaccgggatcagagcccagcatcaaatcgccgaaaatacggatatgcgcgctggaggataccgggagatactcggtcagcgcctgaacgatgccgagaatgatcgcttggaaaaaattcataacccctcgtgatttctaagtatttgatgtgttatgacgatgaacaccctacccaagggggtgtagaacaacactaagaatcggtaacatccacggcttctacaatgaaagtggatatagtacgtaagcgacgaagggagcattatggccacgtatcgcaaaagcagggcattcgcaccggaaggattcttcgaatgcgagggtcgaggactcgaatggttgggagcggctcatgcgcagggcggcccgcgcgtggtgcaggtatacggctggggcaaggattatctggatatcgaacgtgtgggcagcgcgtcccccacgcctcaggcggcacgagcttttggtgcggctctggcccatatgcatgatgtgggtgccgaatatttcgggtctgcgcctgacggatataacggcacatgctatttcggaccattgcaggacccagtgaaaatggataccggcgagtggaccgacccgatcagctatttcgctgatggacgtctgcgcccgatggtcaaccttggtgtgaggcgtggcgagctggataagcgcgatgtcgaactgaccgagcgcgtgattgaagcgttgccggatctgatgggccgagccgcgtccgacaagccggcgcgcatccacggtgatctgtggagcggcaatgtgatgtggaccgccgattccgggcagcccgaggctgtgctcatcgacccggcggcacatggcggtcatcgcgaggaggatctggctatgctgcacctgttcggcatgagctatctgagcgaaatcaccgagggctaccagtccgtgcatccgttgaaggccggatggcaggagcgtatcacgctctggcagctctaccccatcgccggccactgtgtcttcttcggcggcggctacgtcaacgaataccgctccatgtgccgctccctgctgaagtaacagacttggctcccctctctgaggggagccaagaacgcatccactctcagctcagcgcgtccttcaacttgctgaagaagcctttcttttggccagcctgtggacgggatgcctgggagacgtgcgtggcgcctgaatcgtgcgaggcggcgaactgttcgatgaggccgcgctcggtttcgttgagcttggtgggaatcagcacattgacgtgggcgatgaggttgccgcgctcgtccttgttgcggatgttcgtgacgcccagtcccttaagcgtcacagtgtcctcaggctggcagccggccgggatggacacggtcttctcaccatcgaacgtgtcaatggacagatcgtggccgagcacggcccagctcatcggcacctgaatccagcagtgcaggtcgtcgccatcgcgggtgaactgcttatccgccttgatgcgaatgtcgatgtacaggtcgccggcagcgccgccgccctcacccacttcgccctggttggccaaacgtagacgcgcgttgtcgttgatgccggcgggcacggtgacgcccacggtacgtgtggtacgcacacggccgtggcccatgcagctggggcacgggttcttgatgatggtaccgtggccctcgcaacgttcgcagggggcggaggtcatcatctggccgagcatggtgcgcacgaccttctgcatgaatccctggccgtggcagtcggggcaggtgaccggctgtgcgccgccctgggcgccggagccgccgcactcctggcacagggagaacgtgctgatcttgacgtgcgcggtgccgccgaacacggcggtcttcaggtcgatggacgcggaggccagggcgtcgcggccgggctgggtacgcggcaccgggccctgtgagccaccaccgaacgcggaaccgaagaacgtggagaacacgtcgctcatatcgccgaagcccgccccggagaagccgccggcaccggcgttcggatcgttcgggtcgacgcccgaatcatacatacggcgcttgtccggattggacagcacatcgtaggcgttgttcacttccttgaacttgtcctcgaattcagggcccgcgatgtcggggtggtacttacggctgagcttgcggtatgccttcttgatctcgtcgtcactggcgccgcgttccacacccagcgtctcgtaataatctgccacttgattgatcctttgtgttcgtttggtctgcgggtcattgtgccacagacggcggtcagtcttgggtccggccctcggagaggaaggcggtcaaatatctggctacggccctgacggcggccatagtggccgcatagtccatgtgggtcggccctatggagccgacgaaggcgatgggttccgtgtcgttcgtctggctctccgtctcggattcggtttcgggttcgcctacgggatcgttccccgccggttcgcccgccgcaccgctgcgcccatagccactgctgaccacggaggcatgcagtaggccgggggtgtgcatttcggagccgatggccacgcccacgccggatgcattcgtctcctcgcccaggttgctcatgagcttcatcagcacgacctgttcttccagcgcgtcgaagagcggggccagatcggccagggaccgggagtgggccaggtgcgaggtgccggacatgtacagttcgtccgcgcgttcgtccaatgccatcgattcgaaggcgtcggccagcgcgtcggccacgccgcgcaccgactcgtagccggcgctggcggcgatggatcgcacggtctccgcggatttcgatagggacagtccgacacattgttcgttgacggtgttggagagccggttgatctcgtccacggcgggcatggatgcgatggtcaggccgtgctgggccacgcggccggtgtcggtaatcaccaccgcgagcaacgtggtcatggcaacgggcaccatctccacgtgccgcaatgtggccttggccagcgatggcgaggtgactatggccacttgaccggtgatttcggacaacagtcgtgccgaacgctgcagcgcgtccttgagactcaccgatccggacaggaagctgttgatgccgcggcgctgcgcctcgctgagcggcaccacggtagcaagtcggtccacaaagtatcgatagcccttttcggtgggcacacgaccggccgaagtgtgcggctgaatcagatatccttcatcctccagagcggacatgtcgttacggatggtggccgaactgacgccgagatcatggtcgcgcgtcagcgaagtggagcccacgggctcctgagaacggatgtaatcctccaccacggcgcgcagcaccagcatgcgtcttgattgcgtcatgcgcgcctccttatatatgcatacatattcatatcagtcacggttcactcagggcgtaccccgacggtcggttcgccacgccgcgacacgcgggaacccagaaatattgcctctttcttggctccgccacgtgcaggtggcgcacttcaccttagaacattgtattagcactccttaggcttgagtgctaatgcgttcgtttgcagcgtagcaatgttcactgtgaacgctaacagaacacaaactaccaaaacacgccaaaattgcaccgcaacgtcgcaaaccgacgctagcatggtaatcgcaatgtgagggcgtcaagcgcccggcacaagccggatacgcggcccgaccaattggaaggaaagtaatccatgaccgaattcaaggagaccgagctcgacgagcgcgccatcaagatggcgaaggtcctttcggctgacgcggttgagaaggcaggctccggccaccccggctcccccgtctccctggcgcccgtcgcctacacgctgtaccagcacttcatcaagcacgatccgaatgatcccaactgggaaggccgcgatcgcttcatcctttccggtggccatgcctccctcacccagtacgtccagctgtacttctccggctacggcgtgaccctggacgaccttaagaacttccgtggcggcgctgccacccgcaccccgggccacccggagtacggcctgaccccgggcatcgaaatgaccaccggccctctgggccagggcttcgcctccgccatcggctttgcctacggcgagcgtttccagcgcggtctgcttgacccggagaccccgaaggaagattccccgttctaccacaagatttgggccatctgtggtgaaggcgacatcgaggagggcatctccggcgaggccgcttccctggccgccaaccagaagctcggcaacctgaccgtgatcttcgacgccaaccgcatccagatcgaaggcgacaccaacctggtgctggccgaggacgtgctcaagcgcttccaggcctacggctggtacaccgacgagttcagcttcatccagcccgacggctcctacaaggaggacatcgagggtctggccgacgtcatcgccaaggccgaa

SEQ ID NO: 1860 - DNA, 2757 bp, Unknown
  MAG_14  MAG No. k141_59348
cagtattccgccgacctccgactcgtcggaatcatcatggcgcaacacctgcagatccagcagcacatcgatgccgtcccggtcggcgaacacgcgcggatgctgttcgcgcacgcgcgccaacaatccggcaacaagctgcgggtcgaggtcatcggtcgtggcgccgggtacgatatccagatcgtaggtgggctgcagatgctcctcgatgagccggtcgacctcataggaggtcatgcgccggtcgccgtcgccggtgcggatgaacgagccgccgtgcggtccgagcgcggtggtgaagcagggcttgtcgcgcggcagcatttcgtcgatgcgcgcgaacaccagattcgcgccttcgaacgggcaggtgacgatcacgggccgcaccaccggcgtcatcttctcgcacgcctggctcagcgcctcctgcatggcgcgcgcgtcgaatccctcgaccggcgtgaacccgttcttttcggacaggccaaggatgatccagccgccggagccgttggagaacgcggacagcgtatcggtgatggtcgaggagatcttgcgcttgcattccttgacctcgcactgctgcgtatcgttgccgatcagacgcatgagttcgatcagctcagtcattttggcagtatagtcatcgaccatggcggcctccttgacaccattgtgccccataatccgccgcccgctcgcctccagacccgccggttcaccccaattcatccagaattcatgggttactggtcaaagtacgaatgattgccgaaaggctgtcgtatatgcgcaatagcggctgcaaactgtgttgcgccagagcgttcaagtcttttagcaaagtcgggaatgtttatcggtggccgatgtcgagaatcgataagctcacgtatggcgctagctgtggcttccggatttcgtctaagtaatacacagagcaaatcatctggcgtgatgacctgaatggagaaagagtcaagcagtttctggggaaaatccttgatattgcgcgtggccagtgcgtctgcttgtccctgtgccgcagccgcaagtacgtgacgatcatccgggtcaggcagatcgaattggctccattccgattcctcaacatgtatggaggattcggggaatgcctggtccatcattatcagtctttttcggaaggcttgttgtgcggcgtcaggcagtgttcgggaggcggcttcctgtgcttcttgtaatacgttaggcgaccacaggggaagaaaaaggtcatgctcggccaaggtgagcagaacatcggtcaaggtgatggaatagatgacattggcatcaagaaacaccgacagcatcggcccgtactctccttacctccgataccgcatgcatggcttcctgcggggtcggctcgggcaggtcgtacaattcggcgtcttccccgacgccgatcatttggctcagggcgcaatccttggtgtgtttcgaggctcgcttgtattcaagcaggtcttccagccggatgcgacggtgattggacggacgtgaaaaaggaataagtcctttatcaagcagtcttatcagtgtttgccgcgaaatgccgagcattgccgccgcctgttcggtagtcagatcttgttcggtggcactgatcgttacacttttgccttcggcgagaaggatggccgtctgcctgacggcgtcgcaaagctgcgaaggtaggggagtctccacgccgctggcatctttgatgaagatccgctcatcaagaaatcgtgcggtgaatgcctccaatgtcgtcatgtcgtcaatgttgatggatggaaggattgttcgtggaatggtgagtttgtcggattctgccatggtgacctcctttttatctatcacagtataaaacgtccaaagcgaccaaaacgcctaaaacgttcaaactatgcgaattgacgatggttatcgagttttcgaataggggttgctactggccgctaacgaggtcgaggagggcggactatgttgggtggcgtgggaatcttgcgtgtgattgatgctgccgttgctccgattgagggtatgtgggccaagggccgggtgaagttggcgtccgagccgaagggcaaacggttcggtttgttcgatgccaagggtcgcgtggtggatatcaaggcgccgatcggccccgattggaaaggcgcgaacggcgtgaagccgattcgtgccgtcatggtcggcgattcattggtggccggatgtggcgtggacgaccagtcgaaaggcattatgccgctgcttgccgcgcgcgtcgcaagcgtaccggtcggccggtggcctggcgtacggtcggcaagctcggcgcgaccgcccggcgcgtgcgctaccggacaatgaccggccggatgtgctgatcgtgtgcgtgggcggcaacgacatgctcgccggccgttcggtgcgcgaatgggccgcaggcctcgcgccggtgctggacgcggccaagaacaaggccggcagggtggtgcacacttttgctggtcactccatccaccactgccgcgaaaccatcggtggtgatcagcccgtcctcattgagcgactggtcagacctcttgccttggcagtgctgttctatgatgtgcatagcgatttttgattccatggttgtcagaacgcttaaaggcgtctactggctcattatgatggcagcagtgacatgcggatatggggggcgctgtctaaatgaaagtgcaacaccccttagattggagattgtccaga

SEQ ID NO: 1861 - DNA, 7360 bp, Unknown
  MAG_14  MAG No. k141_59863
ccggccaatccacgaatgcgatatctccatagatgattgcgttctgtgcgttacgcagtactagggaaatcttgatttgctgtccatcagatggcttgaatccatctgccacggcgcggacctcgccattgaacgtcgtgccgccgtccctgttgtctattttggatattccactgatggggaaggcggcggttccctgagccttggcgacgttgtatgtatccggattgagcacagtaaaatcaaccgtttctggggcggtgccttcgcctgcttgaccggcgtcatatacagtctgattcgggaatgccatattcagtgcttgcgtctgcgagaacacgatggaaccgtctttggcccgccccgtaatggtaatctgcggatactgcacctgctgggtcttactggtgttgcgcagggcgaaagcgtagtggacatacccttgctggtccgccgaccagccggattccactattttcagaggattgtcggtgacggtgtcttgattgtctccatcagcgccgtcagtgccgcctactccgcccgtgccattggcattgtcggttcctgacccgttcgaggagtgcccgccatcggccttatcggttgattggctgctggattgtgtcgaggaatcgggtgatgttgccgacccgataatgccaagttggcctgccaacacaatgcctcccgcaatggcggcgattatcagtgccgctccggcaatggaccacagcacgatggcgcgtttgctcaagtgcagacgccggaatagtcgagacgccgacgcgctgccgttcgttgttctcgttgatggcggatttgccgatgatgcgttcggtatgggcggattggactgggagaacagcgcctggcgaaactcttggacgctctgtggccgtttgctgggctcgaatgcgcacgcatagccgatgacggcgcgtagtcgagccggtactgcggcatcatcggcaagtcgctgctcgtagtcgctggcatcgggatatacgccggtcagcatgaatccgagtagccggcccagcgagaatacgtcggaacgcgcgtcggttttggcaaagccatattgctcaggcgaggcgaatccgtaggtgccaagcgccgtggtatcccgtgaacggttgcttgcctctgaccggatgcgcgcgatgccgaaatcgatgagatgcgcgccatcctgggccacgatgatgttggccggcgtgatgtcgcggtggataacgccgtgctggtgaagctcctgcacggcttcgcaaatttggtcgataagctgcacggccacattcggtgcaagccgcccgttttcctccgcaatttgcgcaagcgtgctgcccggcacgtaatcgtagacgatgacgaaccggtcgggcagctcgtacgtcgcttccacacgcggcagacgattactctggcaggcgctgagcgccgcccacacattgcgttgcgctaggggagagggaatcttcttgcgtacgaacgggccgttgccgtcaatgctcaccagttcggtgacgccggaaggtccgcgagcgagcgtacgctcgacatggtacgcatcgtcgatgctcatcgcatgcatcgcctgcttatcgtccatgtctctccttgatgccctcttacttgcgtctcactggtgagtgttgttgggccgaatgtcgtcaatcggccggtagcaacgtcgcctctcccatacgatacaactcgtcgtccgtggcgatgcggtcgaatccattgcgtatacaccagatgataatcgcgtcgcgtcgctgtttgcaccacagttcggaaacgcctgcaagacgaagtagccgttgggtttcacgtaatgtgcacttgagaccaaaagccagcataatggcgtgatctcggccggggcggcttttgccggagaaaatgtcataaaccactgtggcgttgaggccggatgcccgcaccacgtcggctcgtctcaggtcatgggcttccatacggtcgaacagatagtcggtcagcgtgcgtgcgctgacgagtccctcatcgagatactgctcaatgctggcgctggcgagcagccgatccaacagttcctcggtcaaatgttcttcggggatgtctgccattgcccatgctccttgtcgctgtgttgcgggtgctgtgctgcgccatcgtacgcggttgctcgattcccagcgtacaggacgccgacttttcggaaacacgccgaaaaattcagttgtcagctgatgtatggcccgcgcgtgtcgccgacaatggtcgatgccatccgtgtaggtgcggtggcggaaaggatgttcatgcgcggtatcaagcatcgacaataaagctaatatgcatacaaaatgctaatttgcgtacataataacaacgccatacactggtttcgatgtatcgcagagcaaagcgagcaataagaagggacgcaatgatgagcgaacgataccggcttgccatggcagtcggattgaccgtaacggttgccgggcttgcctcttctgtgctggtaatgctgctgcttaaggaaagaagggcatcatgacaacgccatttgatcaacaacctcagccggttccaccgtccgaaggcacgaatgacgcaccggaagatcgcgcgaatgcgcctaccgtgccgaatactgtaccggctggccaaccgaacgtagcgtctgatggtgctaccaccactccgatgactccggctacggcatcgcagcggcccgccggcgcgccatttgatcgtgtatatgcggtcagtccgcaacagctgttccaagttattcacgaccagctgactactggcgccacgtttaccttggataacgaaaacacccagaccggagcgttttccttccactcctatgatggggtgaactgcacgctaaccgtagtcccgcagggtgcggcaggggccgccattcgtctggaggcgactggaaacgaaagcgccaagcgcgttgatgagttcctcgccgctctggacaagcgtattggtgtggctcctgcacccgccacacatggtgccggtgctgccactggttttgctggtgccgctgcgcctgccgtgcttgctccgaatgcacaaggggtgaagaagacttccaagctggctgtgttcgccattatttggggagtgttgttcgtactcgcccaatttgtggatgtttctggccgatcctggggcggactgctgttcgccacggtgattccggcactgctctcaggcttcgccgtatacgtgacccgcccgagtggcaaggtgcaaggccgagtgctggcctgggtggcagtcggtatcaccgttgtgggtctggtaatcggtggcgtgttcgtaattcgtgacgatgcgaaggccaaggctgatcgggcggaattggaagcatcgctcgccaccaagtgcgaagcatattcatggccggagtcggatatcgcggcgctgctgccgcagccgaaatccacaaagggtgaaattagaagcgagtcttcggactacttctccatcgaggtgtgcggtaccgacgccaagcagtatgccgactacgtcaagtccgtgcaagacaacggtttcaccgtggactatagcaagtccgctgacagtttcaatgccaagaacgccgatggatacagtgtgagcgtttctcgtaacactgacgacgagaccatcatgtccatcactatccaggttccggaaaagaaggaagatacgtctacggacggcgacgccgcgaagcaggatgataagagcactgatacgggcactgattccagcgatgccaacaagcagagcgaccagtcttcggatcagaaggcgcagcagaacaccaatgacagtgctgacttcaagtccacgatggacagctacgaggcctttatcgatgagtatgttgacttcatgaacaaatatcagaaatccgacaacgtggtcagcatggctaccgactatgccagcatgatgaagcgttactctgagttctcccagaaggtagacgccattgacgaaaactccctcagcagtgaggattcggcctactacaccgaggtcatgactcgatgcatgcagaagctcgcatcggtgggccagtgatcagactggcgtatcgaggtgacggttttccaagaaaggaacgatgacggtatatgggtatacgcggcagacagtatacgccaatggatgagccggccttcaacaaggccatccccggaacggaggctctggccggggcgctgaaggacacttttggcgcattccgtagtgggcttggtattaccgaacctgtggtttcggtgaattgcgaaggttgtggcgctccgctttccggtcatcgcaaagaagtcgttcgatgcgaatactgcgatcgcgaaacgcagctataaccaacatgccagcataacggccggtcttgcgattgcatagtcgcaagatcggccatatgcatgagatatcgaggaaaaaacagatggcagttattaaggcgttcgccggcgcgctcggcggtacattcgcggacctgtggcgtgatatcatcaccgctggtccgttcacggaacacaccgtcgttgtgccgggcattccccgcggaagcaacaacgatcgcggttcgaatgaatacggttccgagggaataatcaccaatggttcgcgtatctatgtgccagagaatactgcggcgttcattttctctgaaacaggtatcgaaaacgtcatcaccgagtcgggcggttatgaatatcgcaacggggagcagagcgtgctcgccggagacggcatcggatcgttcttcaatcaggttgccgatcgattcaccttcggaggtcagcctggccgcaccaaatatgtggccttcgtcaacctgcgtgagattcgtggcatcaaattcggcacttctgcgccgctggtgtataacgaccggttctatggcgtcgatttggaaattcgcgcacgcggatccatgtcgctaaaggtcactgatccagttcgattcgttcgtaactttgtgcctgccactaccgtgtcgtattcattcgatgatgaagggccacgtaggcagattctgtctgaattcgtacagtcgtttattgtggccatcaattcgttgtccaatgaatatcgtatttcgcaattgcccggcaagacgaatgacatcgcggcatgcgtgcgtggcgatcgggccaatgcgggtacgtggaatgatcgttttggctttgaagtgtccagtgtgggcatcgaaagtatcgagttcaccgagcaatcacgtcaactcgtgcagcagttcgcctcgaataagatgaatgttgccgcatacgagggcgtttcccagcaagctggcaatatggctgcccagcagcgcattgcgcaaggtattcaagacaacggctttggcgatggtggcatgttgcttggtatgaatatggcgcaatccatcaatcctatgacggccgccccggttcaagcgccggcgcctgcgccggcaccggaagccgctgctcctgcctctcacacggcatccatgtctgtggaagaacaagtcgaggcgatgaaaaaattgaaggaattggttgatatcggcattctctcccaagaagaatttgatgcaaaaaagcacgaaattcttggcctataaacggcgcattcatgcaactcgaaatagttgataatgagggaaacgctggtgcgatatatcggcgaaaacaatggatgaatatatcattgaataagcagtaattatcaggatggttggattcacattgacgtggttccgaccatccgcagatctgcgactacaagggagagaataatgttgaacaacagggttcgtttcgggaacatgaagcgtgtcaatcgtgcggtttgggcgttgaccgtgattcttatgatggttctgggtcttgtgcttgctggatgctcggggtcttctgacggtgcggacggcaaggaggaatccacatattcgaaaattgtcgccatcgccaagaaagggcgttcgctggccgatgtgaaagacgagctcaaggatgccggtttttcctcctctgattatgaggtgaaaagcgacacggacaaaatggtgctcagagcttcgaactgggttgtccaatccgtggaagatggggacaagcctgttatcaatgttcgtaaagccagcgatatagcgcaggaggaagaagcgaagaaggtagctgaggagaagaaagcagctgaagaggcagccgccaagaaagcagctgaagaagaggctgcaagaaaggccgctgaagaacaggctgccgcgcaggccgaggcccagcggcaagctgaggaggccgctcgacaggcacaacagcaacagcaagcgcagcaaaatgtgcattatgcgaattgctctgaagtccgtgcggctggtgctgctccgttgtatcaagggcagcctggatacaacggcaagttggaccgcgatcacgatggcgtggcctgcgagtaacggattcgatatttcggcgactcagcgcttgttcgggccgccgtccgggaacatcaagtaagtgatgatgccggcggcggttccactggccaatgcgccggtgatgacggcgagagcctgcatcgccgtgctgagcgtgggcttgcccgttgcggcagtctttgaagccttcaatgtggcggcactgggcttgcgtttctcggcaatggcattgtcggcagcgttgccaccgtccgtattgactggggcattgtcggcaacggcctcgccgtcctgctcttgggcgcgccgttcgcgaatgcgttgctcaatgggatcgtcgaccaaagtcttgatgatgcgtgccagatcgcggtcttcacgacgtgcgatctcggcgctgaacaccgtacgtaaagcgagatactgcagtttggtcatcgggcttttgccggtctccaagttagacaccgtctgtcgcgcgactcccagctcgtcggccagttgctgagtcgtccatccggctaccttgcgaatcggacccaggttctcctgaaacttatcaatccaccattgttcgatttcagacgtcgccattacgcacctccttccacgctgtcaccagtgtacgttacctgtaccgaaatcaatccaaaaaacagtgttcatgtgaaattcactgcgtatttgcgctttcgccggcttaccgagattagccttagacaaggaataacagagtagaagcagaaggtatgcgcgtattcgatttcgacggaaccatctatgatggcgaaagcctgttcgacttgtacctgtattccgcccgccacgacccgaaagtgttccgctatatcgcccccgtgctgcggtacgcggtcaaatacaagcttggccgggccacgcttgaacaaa

SEQ ID NO: 1862 - DNA, 7916 bp, Unknown
  MAG_14  MAG No. k141_60340
agcccctcgaaatcgggatgcacggtggtcagcggtgggtacatgttatccacgccagacatgtcgtcgaatccgaccacgctgatgtcttgcggaatccgaagcccatgctcatgcaacgcgcgcatgacgccgacggcctgattgtcgttcgcggcgacgaccgcggtgggcaacgccatgccccgacgcccatactcatcaatgagatgattcatgtgcgcatatgcctcagaggcatcccacgtatggcagcgcacgatctgtgaatcgatggatcgggaggcggcgagcttgcgccacgcatccagtcgggtgtgggcgtcgcgccattcgttgggaccggcaaaatacagagccgatttgtgcccgtattcgcccagcaaggccaccactttggccattgcaccccactggtcgataccgaccagtgcagtgcgacgcttgttttcggtggagataaggcccaatccctcacgcacggtcatttggccgtgggtggcggtgacgatgacgcgcggctgagtgactcgcgcacggcaggcggcggcgaacatcacgtcggtcggggtcaggaagatgaaggcgtcgacgttctgctcgttgaaggtgtcgcacaggttgtcgaattcggactgcatgcacaaggcctcgtggaccatcatcacgctcatgaacagaccgtgttcgcgggccatggattcgatggatgagatggaggaaatcgggccgaagaatttgaggcctccggcgatcaggcctatggtgcgcgaacggcgggaagccagtgcgcgcgcggagttggaggggcggtagccgagttggtcaatggcggcctggactcgcgcacgggtggcgtcggaaacgtccggcgagtcattgatcacacgggagacggtttgatggctgactccggcgagcttggccacttcgaacatggacggacgtttgcttggcttgcggccggtcaccatgctacctaacctcccctctggcggccggcatccgtgcacggccaggcttgtaccttaatcaatactgactttagcgcgtccacaacagttttgcgttagcgctcacactatcgtgtcgcacgcggctcaggtcaggtgccatgagacacgatggagcggagtcggcccgtgttcggcgatggcggcacggtgtgcggcggaaccatagcccttgttatgagcccattcgtaggcggcgtaacgtgggttgctttgcgcgaggtcgaccatcagccggtctcgggtcactttggcgatgaccgccgcggtggcgacggtggcgcaatgctggtcgcctttgactttggtcgttatatcggctggaatcggcacgtccggcgcgtcgaacgtgttgagcgccttggtgatgtaatcgctcggcccgtcgagaattccggcgactttgggcagggcgcgaacgctttccccacaatttccaatggattcccctacggagtctcccggacgaccttccacaatctcccccgcagccttttttgccgtcaatccccctccaagccgtaagccaagttcgcgttcgacttggctgagcgcgcgcagggcggccacgccgagcgcataggtgatgccccattcgtcgatctcggtgttgctggcctggcctacggcgtaggccgcgcaccagtcgcgcagttcgtcgaaaatcgcctcgcgcctatgttcggtgagcatcttggagtcggccacgccgtccggtacgccgaggtaggtccgcccggacagttcggcggaatcatcgccgtcaagcggcgccaaatcacaggcccagatggcggcgcacccgaccatcaccggaccggcgagcgcgccgcggccgacttcatcgaatccagtaataaggtcatagccctgggccgcaaggctgcgttccaagtcaagtgtcggggtaatcatgcgcggctcccatcgtctcacaatggttaggattcagacggtccaggttcaaatggttcaggattcagacggcccggaactcaatcagttcaaagactcacacggttcaaaaaagactcaggaattcgagccggaagcgtcagacacgtccttgaagacttcgtggtggtcatcaatcgcaccaagccggtcaagcggccagtatttcgcgattccgactccgaccacatcggagatgggaaccaagccgcgatcgccgtcatcctgatgatagcgggagtcggcggaattggcgcgattgtcgcccatgacgaacacgtggtcctcggtcacggtcaccgagaacgggaaggcgctcgggtccacgccggggcgaatgtaggaggtctcattgatggccacgccgttgatggtcaccggctggcccgcgcccttgcattcgaccacgtcaccgggcaggccgatcagtcgcttgatgaggtacccgccaccgggagcgctgctctgctcctcgttcaaccagttgttgggatctttgaataccacgacgtcgccgcgctgcagatcgaagatcttgggggtgagcttgctggtcaccacgcgatcgccgggcaccatggtgtccatcatcgagcgcgaaggaatctcgtaaaagccgacggcgaaaatgcgaatcagcagcacgataagcacgggaacgccgcaccacaggaaaaagtcgcgtagggtgaagtggtcatcatccatcgatgatgctgccgcggcattcgcgccagcggaagaagcggcgtgcgccgggcgcgccggtgccgggggaaccggggacggggcgatgccgtggtcggcgacttggaacgtacgggaatcgcgggcatcggcctcgtcatcatacgaggtctgattgctctccggattgtcggaaatcgggaattcgccgttatcctgatcgtcctgcataccatctcctcgcgattcatgctgccggatatgaggggtgccggcgcccgtccatcatacgtggaaaatacggaaacagcccgaaaccgaaacggttccgggctgaatttcacggtttattcgcgcacctgcatcatcaggcccacgattgcacccgcgaatcgactcacttagcggagttgtcgcggcgctcggcaatacgagcggccttaccgcgcagagcgcgcaggtagtacagcttggcgcggcgcacacggcccttacgcacgagcttgatggagtcgatggacggggagtgcaccgggaagcgacgctccacaccagtgccgaagctgatcttgcggaccacgaaggtctcacgcacgccagcgcccttacgagcgatcaccacgccggtgaaggtctggatacgggagttgttgccttcctggatcttcacgttcacgtcgacggtgtcgccgggacggaaggccgggatttcctcagccggcttcatgtgcttggcgtcaaaagcctcaacagcgttaaccattgttttccttcagtgctgccgcatatcagccacagatctggggccatccacgcgattgcgcatcacgtgcgttggcctgttctcgttatccctcgggtttgcccttgggaagcctgccgatccgccgaaagtcaggccttgcggccgttcggactggacccatggagacgtgggcttatgcggcggcccacttctcgacacagcaatcgtcaattgtacggattattgcggacagaatggctgcctgatggcattccaacaccaaggcactgcgacgtagttgacagacctgcaggcgggctttatcttgggagcgtcggtaggcgaggctaccgcagggatatgggttgctgccgctaacagtggagacactgcacgcaggtcagcagttcttgtcggatcaaggcatgaactaacgcaattccaccgccctgcgatgctgaagcttgaacgatggctcgaatcggcggattcgaatactttccgcccctcctgctggtcgcatggataccgacgatggtattgatctggcgtttcagcgcacggcttgaaggaggtgagagtccgatggacggtgattattccagtagttccgccgccggcaacagtcatagttgcggtggtgatgaccatgttttcttatattccgttatccggaagtcgggctctcgcctgtagtgttccttggctccccggataacccttgcataattcgtctttcctatgcatagggaggtcttttcatgaccatgttttcattcaatcgcgtcggtgcgcgtccaaatgcgtcggcccgcaacccttccaccgccgcgtccgaccgccaaccattcgccgtgcgcctggcctccgacgtactggtcgcggccggtattctggcgctgttcggtctgatcgcttggattctgccggcgatcggcgaaccgatcggcccgaaaggagtgccatcacaagtcagtacgaatctcgccgacctgccgtattacgcgctgcgctcggtgttccgcatgctcgtggcactgttcttctcactggtgttcacgttcatctacggcacggcggccgcgcgctgccgccgcctgagccgcgtgctgattcctctgttggatattctgcagtcggtaccgattctgggctttctttcggccaccatcaccatctggatggtgctgttccccggctcgatgctgggcgtggaggccgcgtcgattttcgcaatcttcaccagtcaggcctggaacatggcgttctcgttcacccggtccctgaccagcgaaccaactgaactcgacgaggcggcccgctcactacagctcacacgctggcaacgattctggacactggacgtgccgaacgcgatgattccgctgctgtggaactgcatgatgagcgtgggcggcggatggttcttcctgaccgcctccgagatgatctcggtgaacaatcgcacctatgcgttgcccggcatcggcagcttcgtggcacaggcggcggccgaggagaatctcgcggccatctgctgggccatcgtgacgatggtgctggtggtgctgcttatcgacgtactgctgtggaagccgttgaccgcgtgggcggagaagttccgcattacgcaaagcgagtcggcggtgcgcaagaccagtgtggtgctgaccatcattcgtcagtcacatatcgatgagatggtggcctggctgttcaggcctctcggcgacctgttcgacacgctggcccgcccgttgggtcggaccggtggacgttgggcggcggacgtgaagtccgcacgcagccgcgcgcttgacgtggtattcacagtgctggtgttggcagcgtgtgcgttcggactggtgcagcttatgctggtgattcatcgcgatgcgggattcggcgagctcgggcaggcgttcgtgttgggcatggtgacgttcctgcgcgtggcgctgcttacgctcgtctgctcggtgatttgggtgccgattggcgcgatgatcggcatgaatccgcgcgtttcgcggtttatgcagccgattgtgcaggtgctggccagcttcccctcgaacttcacgttcccgttcgtcacgctctggttcgtggcatgcagcgtggatatcaactggggcagtattctgctgatggcgttgggcacgcagtggtacatcctgttcaatgtgatcgccggggccagccagattcccgacgacctgcgtgagatgacgcgcagcttccagctggggcgctggcagcggtggcgcgatttgattttgccggcggtattcggctcgtgggtcacgggcggcattacggcggccggtggggcgtggaatgcctcgattgtctcggaaatcgtaagttatggacggcatacgctgaccgcctccggcttgggcgcgtatatcgccgaggccaccgaaagcggcaacaccgtgaggaccatcatcggtgtggccgtgatgagcgtgttcgtggtggccgtcaaccgcctgttctggaacccgctgcagcgcatggccgagcgccgtttcgcactgaactaaagacttaaggagaataatatgactgttgcaatggaaaccattcgttcgctgcgggcggtgaccccgcagaacaccatcatcgaagcccagcacgtcggccagcgcttcacggccgacaacggcaccgaactcaccgtgttcgacaacatatcgttcaacctgtacgagggcgagatcgtggccattctgggccgttcgggtgccggcaagtccacattcctgcgtgcgctggccggactggtcaagccgaccagcggcacggtcaagtatcgcggcgaggccctgaccggcccgaatcccggcatcgcactcgtgttccagaccttcgcgctgatgccgtggctcaccgtgcaagacaatgtggaactcggtctgaaggcgcgcggcgtaccacgtgcggaacgcaccaaactggctctggatgccatcgacatgatcggcctggacggcttcgaatcggcgtatccgaaggaactgtccggcggcatgaggcagcgcgtgggcattgcacgcgccttggtgctgcggccggacgcgctgttcatggatgagccgttctccgccctggacgtgctgaccgccgaaaacctgcgtcaggaagtgctcaagctgtggtcgagcgaacagcgcagcatcaagtcggtgcttatggtcacgcataacatcgaggaagccgtggagatggccgaccgagtggtggtgttgggctcgcacccggggcatctgattgccgatgtgcgggttgatctgcagcgtccgcgcgaccgtcacagtgtcgaattcgaggcgatggtggaccgactgtacgcgattttgaccggacaggcctcgcagcctacgcaacaagccgaggctctatcgccatcggcatcgctcacgaacgcacccgtcacggacgcatctgtcacggacgcatcagaccttcagcccgccaagaccatcgagaaaatcaaggagcatccgctgcccaacgccacgccgggcgggcttgccggtctgctggatgtggttgccgagcatcctcacggcatcgacttggcagatttggcctcggctctttcgttcgaggtggacgacctgttcccgctggtggatgccggtacgatgctgcgcgtcatcgtggtacgcgacggccatgtgcagatcaccgaggcgggcgactcctggcataaggcggacattctgcgggccaagcaggtgttcgcctcactggcgatggaacacgcgccgctggtgcgcaacattgagcatgcactgcggaagtctgcggaaggcaagctccgcggcgagctcatgctggacctgctgcgcgcccgttacgccaacgacgaggcgcatcagcagttcgccatcgccgtggagtggggccgttacggcgaactcttcgattacgatgccgatgacgatctgctgagcttggatgaggcgaataagggcgaataagcgaatcagccacgtgagttggccagatagtgcctttatgcctgcaaacagatgccgaagcggaatatgaccatgttcgactcatctgactgacagcaatccgtatatgcaaagtgcccggcatccgaagatgtcgggcactagtcgtgagagagactccctcagtcagctacactgacagctcctctcacccgagggggcaccagaggaacgaatcagaactcgcgacgtgggcagtcgccagactgcccaccagacagcacagccgcggtcgcgcgaatcacgaattctgaccgagcaaagcgaatcagaattcgcgatttgcgcggtagaacttgatcaggctctgggtggaggcgtcctgggcggcgagggcgtcgtcgtcctgggagatggccggggtgatctgcttggccagctgcttgccgagctcgacgccccactggtcgtaggagtcgaggccccagacggtgccttccacgaaggtgatgtgctcgtacagggcgatgagctcgccgacgg

SEQ ID NO: 1863 - DNA, 6922 bp, Unknown
  MAG_14  MAG No. k141_60356
gatagcgccgtgacgctttcactgcgcttccccaacctggacggatacccgttcgatgtgaccgtgaccgtcacatacgaactcggcaacaacggcatgaccgtgaccgtcaatgcccgcaatgatggcgacgagccggcaccgtgggctctcggcctgcatccgtggctggccaacggcaagcagggcgcgacttccgccgagcgtgacgccgactccgccgcctgccacctgcagattaaggccgccagtcatgtgacggtgaacgaggcgctgattcccaccggcaccgaaccggttaccggcatctacgacctgaacgatggcccgacgctcgaaggccgcgcctttgatgatgcctgggtcgacgtggagcgtgccgccgatggcacgacgaccaccacgttcacccgtcccgacggcattgaggtgaagctgatcggcgatgagacgattaacgcctggcagtgctacaccgccactggcgcgccgttcgccgagcatccgtatggtatcgccgtcgaaccgatgaccgccccggccaatgccttccgcactggtgaccacttggtgacgctcgcccccaatggcgactacaccactgtggtccgctacgaagtagtccagaagtagttctgttacgctggctcccctccagaggggagccaattttttatccttatgtgccgccgcgtcttgggacttatgcgatacgattgtgagcggtaacaatctgtttcacaaaggagtgtgcactatggctttgaagcctcgcactggtaaccaatatgtcatctcgtccggcgaatggagtgccgtcgtcaccgaactgggtgccagcctgcgcgagctgaagtggcgcggcgaagacctcatcgtccccttcgacccgaacaaggtcatcccctgctgcaacggctgggtgctggcaccgtacccgaaccgcgtgaccaatggtcagtattctttcgatggcgaagactaccagatgccaatcgacgagttcgaccgccaatcctccctgcacggctacgcctaccgctacatgtgggagctcgttgatttgcaggaatcacatgtgacgctctcctggcgctcccccgacatcgccggctacccgtttgatatcaccatcaccgccacttatgcacttgacgagaacggtctcacggaaaccttcaccgtgcacaacaacgacagcgtgaaggccccatgggcatttggcatccacccgtggctggcaaacggcaagcacgccaccggtcaggccattaccgccgacaacgagtcctgccgtcttgagctgcactgcgatacccacgtgaccgtagacgaacacctgctgcccaccggtgaagagccggtttccggcatcttcgacctgcgcgataaccccacgctggagggacgtggcttcgacgatgcctggaccgatatcaccaaccgcggcgaagacggcagcacttccgccgtgttcacccgccccgacggcatcaaggtcacgctgaccggcgacaagaccatcaactcctggcaggtgtgcaccggcaacgaaatcggcgggaaggctcgtcaggccggcgtggccgtcgaaccgatgaccgcctacgccgacgccttccgcaccggcaaggatctggttgtgctcgagccgggcgatgactacaccaccgtggtcaccttccacgccgaacaaatctgaaaaaccgaataaccaagcctgacgatcatcgccacatggacacccgtgttgcatcacgtcgtacttatgtggcataattccgaaggcttatttttttactgcagcaaaggagtccatcatgggcatgcgcggacgtaagcgcaaggatcgtcgtaagaaggccgccaaccacggcaagcgtcctaacgcctgattcttcgcgtttcttatagaacgctcaaggcccgtctgatgatacatcagacgggccttgttgtatatgtcgttacttatcttcgccgcagcagtgatcaagcgtggccttgagccgggccatcagacattcgggcgccacatccgggcgcaagtaggcacgcaacgcggcaatcaacgcctgttcacgctcgtcgcagcaggtacgggggtcaaaacagtcgccctccgtaacgatatgcacgtctgtctggaccgacgcagcggccgagccggtatctactgaacgatgatgcaccgccgtgatatgcacttcggtctggcttaccgtgccatcggccgccgtacgggttatggagatatggcgagtacgctctaccggctgatcgttcatcagatctcctttcccgaaagcttgcttgactgttgtggcgtgtgggcgtgagtcgcatgactatgtctcactacggcttgcgtgtcgccattgctgccaacagtctgttcactactttcattatggccggaatcggcgattcgaccaacgttttcacccaacttcgcggatggtgaaccagccgacgaaccagtcacgtacccgcgctctttcgcatacgaggcgagctcacgcttgagttgcgtgcgggcgcgattcaggcggctcatcaccgtgccgattttcacgccctgctcatcggccacctgttggtaggacttgccgtcgatggcggcgtcgatgaacacctgccggcgttccggcgagagtttggcgagcgcggccatgatttcctcgggcgcgaaggcgtccaaatattcctcttcagcggacttgagcccgtccgacgtatgttcggcggcatcgtaaatgtcccaatcgtcgtattcgccagtggagtcgttggcacgctgcgggcgccgcttggccttggcatactggttgaagtaggcattgcgctcgatggtggtcatccacgcctcgaagttggagcccggctggaatgagtcgaaggccttgaacccgcgttcgaaggtgtcctggaccagatcctgcgcgtcatcgggattgttggtcagcctcatcgcctgccggtacagtgcattgacggcgggcatggcgagctgctcgaatctggcgcgcttggctgccatggactcgcccgatccggctgactgcccggattgcgtagttgcttcgcttgtcgtcacggttcaccattctaatcaaatcatgtgcccatatcgtggtcgatgacgtgtgagccacaacacgctacaccccacctgtagaatggcgtatcggctagataatagggagaaacaattatggctttgactttggcttcggccgctgacctgctcaaggaacaccatctgctgcgtgaaatcatccaaggggatgtctggaccgacgacccggcccgtatcgcttcggcggatgaaccgttcgccggcatcacctacgacacccgcaaggtcacgccgggcaccctgctgtgctgcaagggccgattcaaggccgagtatctgaacggcatcgacgaagccggcctggccgcatacgtggccgaaaccgagtactcagccgcaaccgccacccccggcctgatcgtcaacgacgcacgcaaggcgatgagcctgctgtccgccgcgttctacggatatccgcagaacgagctcacggtcatcggcgtcaccggcaccaagggcaagacgaccacctcgtacttcacgcaggcgcttatcaacgccgtctccggcggcaaggccgcattgttctcctcggtcgataattgccttgacggccacacctacgtcgaatccgatctgaccacgcccgaatcgatggacgccttccgcatgatgcgcgaggcggccgataacggcatggagtatctggtgatggaggtctcctcccaagcgtacaaggtggaccgcgtctatggcctgactttcgatgtggccgcgttcctgaacatctcccccgaccacatcagcccgatcgaacaccccacgttcgaggattacctgtattgcaagcgccagatcatcgtcaacgcgaagtcgctggtactcggcgcggacagtctgcacgccgatctgttgcgggaggacgcggcggcagccggcatcggcgcaaccaccttcgccctgcatgacgcggataatgccggcaccagtgcggacgtcgtcgcctggcccgccgacacggcgcacgcctccttccacatcgccgacggagatcagacccttggcgactaccatctgtccatcgatggcgacttcaactacctcaatgcggcggcagccatcgccatcgcccatgcggctggcgtatcgctcgatgacgccggcgcactgcacgccatcgaatccgtacgtatcgccggccgtatggaacagttccgcgatccgcagtcgaacacgctcgccatcgtcgattatgcgcacaactacgcatccgtcaccgcgctgcttgacttcgtctacgagcgttggggcgaggaaaacccgcgtatcacgctggtgaccggatcggccggcaacaaggcctacgatcgtcgtaaggaaatcgtcgaggctgccgagaaccgtatcgcgaacttcattttcaccgccgaagatacggacaccgaaccgttcatcgacatctgcatggaaatgcaaggctacatcacgaacaaggatgtggcctccacggtgatttccgaccgtccgacggccatcaccaacgccatttacgatgcccgtgcgcacgccgaccgattcaacatcctgctgatcatcggcaagggcaacgagcgttggatcaaggaccatcacaagcatgtgccgttcgacggcgacgatcacgtggtcgaacgcatgtttggcttgtgacgggattccggccaatcagatcctgatcggatcccgattggcccacatcagatcacgcgcaatacgaccaaaccagaaacacgacatacggatacgaacgaaaaaggatagctgaatcgtaatgatcacgttggagaaagttgacggagccacactggaagccgaagccgagaaggccggcatcacgttgcccatcgaacagaccaaggtttggtctggttttcaggcggatatcgacggacgcacaccatggggcgattatctgatcaagcgtgatggtgaattggtcgccgtgatctcctttatcgattttgagacgcacggttatcattatctgcgctcgatgcatgggccggcgtgggtcgccaagcccaccgaggctgaggagcgcgaggtcgtcgacgccatcgtggacaccgtcaagaaggccgacaagaacatcgcgttcctgcgtatcgacacctggttcgccgatggtacggagaaggtgctgtccacagtgccgtacgaccagaccgtggtcatcgacgtcaccggtggtgatgatgagattctggctcggatgaagcgtcgtggacgccgtgacgtgcgcaagtctctgcgcgagtgcccggccgaggttgccgatgagacggataaggcgctggccgatttctccgaatattacgatgtgatggtcgagaccggccagcgcgatggattcacgcctgctccgatgagcgactattccgatatgatcggcgcgttgggtgccgatcattgccgtgtgttcgccgcacgtattgaagaccgtgtggtggcatggtcgattgtcaccgtgaacggcacgcatgcggtgcgctactatgccggcatgcgcaacgaggttatgcgtctgcatgtgaccgacaagctgctgtattccgaatgctgcatcctaggctcgcagggtattactgaatacgatctcatgggcattggctccgatttcgcgccgtctctcaagggccttaacgagttcaagtgcaagttcaccgaggaaatcaccccggtggcccccgcccgcgacgtacccatcaagaaggtcttctacaagacgctgcaaaccatccaaggcgtgcgcaaggcattgcgctaatacctctccccgctcccgctggtgggagctgtcgaacgaagcgagacagagggcggtctttcgatatggaccgccctctgtcacctgtggtaccagttcctgtcagcgggaaccattcgtttatcgttcgagtttttgactcaccacggctgttacgccatcggctctcatggttacgccgtaaagcgcgtcggcaatcgacatggtgcgttgctggtgcgtaatgatgatgagctgcgcatgggcgcgtagctcattgaacgcattaatcaaacgggtcaggttcacgtcgtccaacgcggcctcgacctcgtccatcacatagaacgggctggggcgggcggtgaaaatcgcgaacagcagcgccagcgcggtcagcgaacgttcgccgccggacaggaggctcagctgtttgacgcgcttgccggccgggctggcctcgaccagtacgccggtggtgagcatgtcttccgggttttccaggcgcagtcgtccggtgccgcctgggaacagcgtggcgaacatctgctcgaatgcctcggcggtatcgtcgaacgcggatttgaacacctggaccatcgtggaatcgagatccttgatgagctgcatcaaatcgtcacgtgatttgaccacatcgttgcgctgatcattgagatacttgttccgctcctcaagcgcttcgaattcctcggtggccaaagggttgatcttaccgagtgcggccagatcgcggcgagccttatcgagacgcttcttctgctcctgacggttatacggcacggtcttaaagagggcggaatcgccgttggtgccggtctctcccccggtttctccctcttcggtcccagcctcagcttccgtctcatccaacggcacagggttgccctcatcatccagcacgggcaccggctgttcggggccgtaaccactaaccaattcctccaaagtgagaccgagttcgtcggacactttttgcatgagctgcccggattcggcggccaaccgttcgcggtttacatccaaggcatgttcgcgcc

SEQ ID NO: 1864 - DNA, 14428 bp, Unknown
  MAG_14  MAG No. k141_60743
gtcaagcactccccgcttggccagaagcttatcgaaaacttcctgcaccgttgcgccgcgctgcccaacgactgggacgcctcctcgattatcgaggatcaagtcaagaagatccgcgagaaggtcggcgacgccgaggtgatctgcggcctgtccggcggcgtggactccgccgtggccgccgctctggtgcacaaggccatcggtgaccagctcacctgcgtgttcgtggaccacggcctgctgcgcaagggcgaggtcgagcaggtcaagcacgacttcgttgccgccaccggcatcaagctcatcaccgtggacgcggccgacgacttccttgaggccctgaagggagtctccgagccggagcgcaagcgcaagatcatcggtgagaagttcatccgcacgttcgagaaggcccagcgccaagtgcttgaagaggccggcgcgcgcggcaaggaagtcaagttcctcgtgcagggcaccctctaccccgacgtcgtcgaatccggcggcggcgacggcgcggccaacatcaagtcccaccacaacgtcggcggcctgcccaaggacatcaagttccagctcatcgaaccgctgcgcactctgttcaaggatgaggtgcgcgccatcggcaccgagctcggtctgcccgacgaaatcgtctggcgtcagcctttcccgggcccgggtctgggcatccgcatcatcggcgagatcaccaaggagcgcctcgacctgctgcgcgaggccgacgccatcgcccgcgaggagctctccaaggccggtctcgaccgtgacatctggcagtgcccggtcgtgctgctcgccgacgttcactcggtgggcgtccagggcgacgagcgcacctacggctcccccatcgtgctgcgtccggtgagctcggaggacgccatgaccgccgactggtctcgcgtgccctacgatgtgctcgccacgatctccacgcgcatcaccaacgagtgccgccagatcaaccgcgtcgtcctcgactgcacgtccaagccgccggccacaattgaatgggagtaattgctctctgtgacgaatgggattctccatcggggaatcccatttttgttgccgacgatgcccggtataattttttcgcttacgacgtcgtccggaaagggatgccgacctctttgcgccagggattcgacaacgaaaaatacatcgaactgcaagccgccaacatctcaacagcgtgaaccgacgcttgcactcggatgaaacgctgattgcattgtcaatcaccagcgccaccagtcctgtggccgctcgcgtcatcgacgggctcaaacagttgcagggctgcgacgcctttttctccgttatcatctcatccacggacgaggcgttgtatcgcaaactcggcatcaacgtgtgctgcgaaccgaagtacgaacgggtgagtctgtatcaccggtaaacgccaccgataagcgcggtatgccgcgaatcgtcaagccggtaatcatgcagcatgcggcctgacgattcgctgctgtcgcattgtctctcccctctaccatgctgggcttgttttccgtttgttggagagaacgggggacgccatcagcactacggtgagagaaggattatccgtgaatcggttcgtgggtctagacggtattaaaggactggcgctgatagccattgtgctgtaccactgcatgcagcaactgctgccaggcggattctacggagtcgacgtgttcttcaccgtctctggattcctgattgccgtcagtttgattcgttctctggcgaaaaccggatcgctgaatctcgtgcgatatatccccaagcgtgcagtacgtctctatccggcgctgtttctgctgattccggtcaccgtctccgtcggctggctgctcgatcacgacattctggtttccatccgcgatcaggtcatcaccgtgctgctgggctgctacaactggtacgccattgccggaggccaaagctatttcgaccaaatgaacccgcaggtgtttcgccatctgtggttcattggcgtgctcatgcagttctacgtcatcgtgccgttcatcgtctggctgatgtggaagctccgccagacgaaactgccctcactcatcccactgggactcgcggcgttcagcagtatcgccatgtgggtgatgtacgtgcccaagggcgaccccacccgcgtctacttcggcaccgatacccacagcatgggcctgatgctgggtgtggctctcgcctggtgggtcaccgctcctcagttgggccacgctcgtcagggagctgtgccgatgccccgcaccattagatcgagcgcttcggccgccacgtaccgggctccgttacctcagattcctgtaaagcatcgcatctggaatgcgacggcaccggtattggcattcctcagcctgattgccttggtcaccatgacggttatcggcaaacaggatgcattcgccttccgcggcggcatcatattgtccagcctgttgtccgtgctgctgattgccggtaccatctccgacgattcctggatgcaaagcctcatggtgttcaagccattggccgccctcggcaagtattcgtacggcatttacctgtggcactggccgttgtggattctttccagcgcccttgccccgaagatcttcaaggcagcagggccttggcctctcatcatgaccgcgttgctcaccgccattgcggtgatgatttcctggctgatggtggagaaaccggcggcaatgcactcggtgatatccgtcgtggtgccccttcgcacgaacaagaagaatcatgcggcccgggttattgccgttgacgttatcctggcgctgtcgttggtcggctgcgcgcagggcattactcatgcacctgcgaaaaccgccatgcagatccagctggagcaacaggccgcacaactggaacgcatacagaaaaccgaacacgtgctgctgcgccatgccgtgccggcaccgcccaagcccaagcatgagatgcccaccggcgatcagattaccgccataggcgattcggtgatgctggcctcatcacagggcctttcggaagtcttccccggcattcagaccgacgcgagcgtttcccgctccatcatggtcgcccccgaactcatcggcaatgatctgtccgccggcagtctgcggcaatgggtgctgatcggccttggcaccaattcggcaatcacccctgatcagctggaccagattcgtaatatgatcggccccgaccgcgtgctggtactggtcaatgcccacggagaccgtacgtggattccacctaccaaccaggtgcttgccgactatgcggccgcacatccggacaatgtggtgctggtggattggaatgccacagccaacgcgaacgcgcaggtgctcggctccgacggcatccacccgagcatggatagcgatatctatgcaaaggcggtcaaacaggccatcgaacaatggatcgcaagcggcaggtgaacggcaggcaacgctgagttgtccaaccggtcgtgaagaacggctatgctgaagactgcatcaacgagaccacacgttgggagacatggtgagcgcaatccttgaagggaagcccgataagaatcttattctcgttacgggaaggattcatccgaaattggctgaggatgtcgccgagcagctcggcatcgacgtccttgaaaccaccgcatacgatttcgccaacggcgagatgtacgtgcgctacaccgaatcggtgcgtggcgccgatgtgttcgtgctgcaaagccactacaaacccatcaacaaggcgattatggagcagctcatcatgatcgacgcattgaagcgcgcctcggcccgttccattactgcggtctgcccgttgctcggctactcccgtcaggacaagaagcaccgcggccgcgagcccatctcctgccgtctggtgttcgacctgctgaagaccgccggtgccgaccgcatcatgtcggtcgatctgcatgccgcgcagtcccaaggcttcttcgacggcccggtcgatcatctggtggccatgccggtgctggtcgactacatccgtgatcgtttccaaggccatctcgacaacgtcgccgtcgtctcccccgacgccggccgcattcgcgtggccgagcagtgggcgcagcgtctcggcggcggtccgctcgctttcgtgcacaagactcgcgacatcacccgcccgaaccaggcggtcgccaaccgtgtggtcggcgacgtcgccggcaaggactgcgtgcttgtcgatgacctgatcgacaccgccggtaccatcgcgggcgcatgccacgtgctgcaggacgcgggagccaagtcggtgaccgtggtcgccacgcatggcgtgctctccggcccggccatcgagcggctcaagaactgcggtgcgcgcgaggtcgtgctgaccgacaccgtgccgattcccgaggaaaagcgctgggatggcttgaccgtcctgtcgatcgccccgctgctggccagcgccatccgcgccgtattcgaggacggctcggtcgccgaactgttcgacacctaccccgagcaccacggtcaaggcttcctgttcgcctgatcacgtgcgtgtttgttcaaggaaagcacacgatgcgagacgcgacatggcgtagtctttcggtaaataccgacagtatggtataaatgaacacttgtgggccgaaagcccacgactcccccatggtgtaatggcagcacacgggtctttggaaccctttgtcttggttcgagtccaggtgggggaacggctgacggccgctcgacatccgggcggccgtctattgttttgagatgtttccaccctcaatagacattccgatcgaagggaatacgtcagttatggcattatccgcagccatcgtcctcgccgccggcgagggtacccgcatgcgttccaacaagccgaaggtgctgcatacttttgcaggcaagaccttcctgaacagggtcatggattcggtgaccgccctgaaccccgacacgctggccgtggtcgtgcacttccaggccgagcgcgtcgccgaagccgcccgctcctatgacgagcaggtcaccatcgtgaaccaggacgacattcccggtaccggtcgcgccgtgcagtgcgcaatggcacagctcaccgaggctggcaaggtcgatggcccggtgctgatcgccgcctccgacatgccgctgctcgacagcgagacgctgcaccgcctggtcgaattccacaccgcctccggcaacggcgccaccgtgctcaccaccatcctcgatgacccgaccggctacggccgcatcatccgcgatcgcgaaggcaacgtgctgcgcatcgtcgagcagaaggacgccaaccgcagcgaactcgccgtgcaggaagtgaacacctcggtctacgtgttcgaggcttccgtgcttaccgaggcaatcgccggactgaagtcgaacaacgcgcagggtgagttctatctgaccgacgcgctggaaaccgccaaggccgctggcaaggtcggcgcgttcgccgctccggatccgctcaccgtcgaaggcgtgaacgaccgcgtgcagctggccgcgctgtccaagacctacaaccgccgcgtctgcgagcgctggatgcgcgacggcgtgaccattcttgacccggaaaccacttggatcgaggacgatgtccagatcggccgcgacgccaccatcctgcccggttccttcctgcaaggccacacggtggtcggcgaggacgccatcgtcggcccgtacaccaccctcattgacgcaaccgtggacgaaggtgccgtggtcgagcgttcccgcgtgcaggaatcgcacatcggcgcacgcacgaacatcggcccgtggacctacctgcgcccgggcaacgagttcggcgaggatgccaaggccggcgcgttcgtcgaaatgaagaaggcgcacatcggcaacggcaccaaggtgccgcacctgagctacgtgggcgacgcccagctcggcgaccacaccaacatcggcggcggcaccatcaccgccaactatgacggtgtgcacaagaatcgcaccaccatcggctctggctgccatgtgggcgccggcaacctgttcgtggccccggtcgaggtcggcgacaacgtgaccaccggtgccggctccgtggtgcgccacgccgtgccgagcgacacgatggtctactccgagaacacgcagcacaacgtcgagggctggaagcccgcctgggagcgctgaaccatgcccgcacttcaggattccatcaacgccgtccgcgtggccgccgaggccgcagaccgtatcaaggccaccgacatcgtggccttcgacgtagccgacctgctcggcatcaccgacatcatgatgatcgccggcgcctccaacgagcgtcaggtactggccgtggccgaggaaatcgaaaaggacctgttccttaagtgctccggccgtcagccgcgctctcgcgagggcctgaccgagggccagtgggtgctgcttgactacggtgatttcgtgattcatgtcatgcacgaggaatcgcgcgaattctacgggctcgaacgactctggcgcgaccgcccggccatcgatcttgaactcgcacacccggaaacggcggagcatgcggacgctgctgccgtcaccaccgcgtaacgtgcgaatcacataacgctgatattcgctgatattcgctgatactcgctgatattcgtgtgtcgggctgcctgttgccgaacgtcattgacggcaccaggcagccctcccttttccctgtttcctcactggaatcgaaaggatcgtcactatggccaatcatgttcgttccattttccttatccgtcatggacgcacttcctataacgccgctcacaagctccaaggccaggtcgacattccgctggacgccgtgggtgaatggcaggtcaagcagaccgccgcggccttgaaaagcctgtacgtcgatcgtcggccggaaatcaaccaccggttcattgtctgctccgatttgaagcgtgcgcacgccaccgcgcaggctttcgccgacgtattgggtggaatcgagcccgtcgatgatcatcgcgtccgtgaacgcagcttcggcgactgggatggccatgccgtggctgaactggccgaacgctaccctgaggacttccgttcctggatggagtctcggggcggtgaactgaagtatggtgccgaacccaaggaagccgtaggcaaacgcggtgtggaggctcttgaggactggtccacgcgtgccggagacgacacggacctgttcgtgttctcgcacggcgcatggatcgcgcagacattgcagaccctgttgggcatttccgcgatcgatccgaccttctccacggtggtctcattgcgcaatgcgcactgggtgcgcttggtgccgatggacaatcccgatggcactgtgcgctggcgtctgctggactacaatcacggtccggccatcgccgacaccgacgaatgggaacgcgaacgctgatcatgttcccgactcccctgctaatccaataggtccggtgcattcggaaccgttcaagcaataactgaatggctcaatgcctgaataatggcggaaacaagccaaaaagtgtcgccaaatcacacttttgtcatttggcgacacgccggcttttgccagaatcgacatctcgtcgtaatgtatacgaggtccgaacaacgggccaacaattgaaaacggggctatagcgcagctggtagcgcatctccatggcatggagagggtcgggggttcgaatccccctagctccacgacgaagccatcaaatcgggtgatatggtggtttctccgctggttcgtggcgggtcttgtgactcccatgaatcggatagcttcactcggggctatagcgcagctggtagcgcatctccatggcatggagagggtcgggggttcgaatccccctagctccacaatcaaggccggtgcttcacacaccggcctttttcgttttctatcctatcgggcgacttttgcgcaacattcccgggaatgcgtcgcaaaacagggactggaatgcatgcagtgcgatactttccccggaaagtatcgccaaggggacgctcttccgattggcgcgacaccggcgtgagagataacagtaatcgccactacaatgaggtgtggtccctatcgtgttgatcatcaaaggagacaaaaacatcgtgaccgtcacccgtgtatatatcgccagccctgaaggcgccaatggccgcaacgtcgtcgcttacggcgtgctcaacgcattgacttccaagtacaagaccatggtgttccgccctgctgtgtccaaccatgacgaattcaccccgatcctgctcgccgcttccaatgccggactcggcgtggccctgtccaccggcctcgatgtgcataaggtgcgcgccgacaaggacaccgcccgcggagacatcgtcggcgagttcaactacgccatggaggtctcccgcgcgaacgccgccctgatcgtcggcaccgacaaatcccacgtcaacgacccgaccacctacgagttcaacgcggacgtcgccgccgatctgaaggccggggtgttcctggccgtgtgcaccatcgaccgctggccgcacgagctcgacgagaccgtcaagctgtccatcgagggcatgcgcgccgcgggcaatacggtgctcggcatcttcgtgaccggctgcgagccgcgtcacgccttctccgtcaaggagaccctcgccaaatacggcctgccggtctggactttgccgcaggtgcccttcaccgacgaatccaccaaggacctggcccttgagaccttccgcaagcacgctcccatcgacgaggtgctcgccgcgctcgatgtggacgtcaccgcgccggtcacgccgtacgccttccaattcgacctgctcggcaaggccaagagcaacaagaagaccatcgtgctgcccgaaggcgaggaggaccgcatcatcaaggcggccgattacctgctcgaacgtgagaccgtgaacctcatcatcgtgggcgacaaggacgccatcctggcccgcggcagggaactggggctgaacagtctggggcacgcccgattccaggccatggacgacgagaacgtgttgaagcccatggtcgccaagctgtgcgagttgcgcgccaagaagggcataaccgaggagcaggcccgcaagcaactgaccgacgccagctacttcggcaccatgctggtggtgctcggctacgccgacggcctggtctccggatccgtgaattccaccgccaacaccgtgcgccccgccctgcaggtcatcaagaccaagccgggccagaaactggtctcgggcgcgttcctcatgtgcttcaaggaccatgtggccgtgttcgccgactgcgccatcaacctcaacccggacgccgagcagctttccgaaatcgcgttgcagtccgccgagaccgcacgtgccttcggcatcgacccgaaggtcggtatgctctcctactccaccctcggctccggcaagggcccggacgtggacgtggtcgaggaagccaccaagctgctcaaggagaaggctccggatctgccggtggtcggttccatccagttcgacgccgcctggtcccccaccgtggccgccaccaaggccaagggcaacgatgtggccggacacgtcaacgtgttcgtcttcccggacctgtgcgccggcaacatcggctacaaagccgtgcagcgctcctccggcgccttggccatcggcccggtgctgcagggtctcaacaggccggtaaacgacctgtcccgtggtgcgatggtgcaggacatcatcaacaccatcgccctcaccgccatcgaagcgcagtgagcccggcttagctcccgccagcgggagccactgtaatgcttattttgtagcaagcaacgagtaatctaatcaacggtaacccgtgtctcacgggaacattcaatcacaatggaggatgcccacaatggcgaaaaccgtccttgtcatcaattccggctccagctcgatcaagtaccagctggttgatctcgaatccggcgaaggcctcgcttccggcctcgtcgagaagatcggtgagccggtcgacggccactacaagcacgagtacaacggcgaaaagcacgagcttgaagagccgattcacgaccacgagcagggtctgaagcgcgtgctcggcttcttcgaggagtacggcccgaacctgtctgaggctggcattgtcgccgtcggccaccgtgtggtgcagggcggctccatcttcccgaagccggccctcgtgaccaacaagaccatcaaccaggtcaaggatctggctgtgctcgccccgctgcacaacggcccggaggccaagggtgccgaagtcatgcgctccctgctgccggacgttccgcagatcttcgtcttcgattcctccttcttcttccagctgccgaaggccgccagcacctacgcgctgaacaaggaaatcgccgatcagtaccacatccgccgctacggcgcccacggcacctcccacgagtacatctcctccgtggtgccggacgtcatcggcaagccggctgaaggcctgaagcagatcgttctgcacatcggcaacggcgcttccgcttccgctgaggtctccggcaagccggttgagacctccatgggtctgaccccgcttgagggcctgatgatgggtggccgtaccggtgacatcgacccggctgtggtcttccacctgatccgcaacgcccacatgaacgtggacgagctcgatgccctgttcaacaagcgttccggcatgatgggcatgaccggctacggcgatctgcgtgaggttcaccgtctggtgtccgaaggcaacgaggacgccaagctggctctggatgtctacgtgcaccgcatcgtcagctacatcggcaactacacctaccagatgggtggctgcgacgtgatcaccttcaccgctggtgtgggcgagaacgacgacgtggtccgcaagatggtgtgcgacaagctcgctccgttcggtgtcaagctggacgaggagaagaacgccacccgctccaaggaaccgcgcatcatctccactccggactcctccgtgatcatcgccgtgatcccgacgaacgaagaactggccatcgcccgcaagtccgccgcaatcgccgaggctggcaccgatacctacggcaacaccttcgccaagtaagtaaccgccgttaggcatctcactaatctctagttgcaacactatgggggctgattccgattggaatcagcccccattcgtatatggtcatgagaccactacccctgcgtcatactcccctcagtcgcctccggcggacagatccactcagagaggggatccaagccctataacttggctcccttctctgaggggagcagtccgcgtagcggactgaggggagttccaccagaacacaggaccccttactgcctcagcatgccactccacataccgacgaaatcaggcaaggtcttgcgcgtggtggccacgttgatgacctcgatatcgggaatacgcagccccagcatcgcggcgaacgtggccatacggtgatcagcataggtttccatcacggcaccgtgcaacgtctccgccggcaccggttcgatacgcaatccatcaggcaattcctcagccgctcccccaacacgacgaatctcgttgaccaatgcctccagacgattcgtttcgtggccgcgcaagtgaccaataccaaccatgtctgtcgacttatcagcaaacaccagaatcgccgccaacgagggcgcaatctccccggccgccgtcaaatcgaacgtacccagcccacgcacggtgccgtcaccggtcacctcgcaatagcgcacgccgccgatggtcgggaacgatacttcggcacccatctgctccagatatccgggcaacaggccgcccggctgggtggtggtttcaggccaatgaggcacccggaccgtgccgccggcaatcaatgccgcgccgaggaatggcgccgcgttcgacagatcgggctcaacggtcaccttgctcggcagttgcattgcgcgcggttcaaccgtccatgtgcgggcggattcgtcggcctcaaccgcaccgccggcaccggtcacatcggccacggtcatgcgaatgtgcggcaggctcggggtcttctcccccgtgtgcgcgaggtgcagaccgccaggcagtttggaactaatcagcaacaggccggagatgaactgggaagaaccggacgaatcgatgctgacctgcgcctgggcagccggcaaggttgcaggcggcgtaatagtgaacggcagacggccaacctcgccgtggtaatcaaccgttgcacccagctgttccaaaccgtcaagcaccggcttcatcggacgtgcataagcctgttcgtcgccatcaaaattcactgggccatctgcaaacagggcaaggccgggcacgaaacgcatcaccgtgccggccagtccgcagaacacattgacgttgccatggaatcggccggatacaggaggagtaaccgttacggtggtgtcggttgcggaatccacgtcgcagcggacaccgagggcttcgagtgcgcccatcataaggtccgtgtcgcgcgaacgcagcaggccaatcagagtaacgggcttgctgccgagggcggcgagaatcaggtagcggttggatagggacttgctacccggcaccgttaccgtagtgttcaacggctgtgcggcgagcggggcaggccagagattcgtgagtcgttcagtcataaggccaaatctatcaaacaaattattcaccggtcggcagcgatgcgggattcgatctgctgatcaggtgcggaagacggctgctcaaaaccgccttcgatggcctgcgcgtgcaacaactgagcggccgcgcgatcggcctcgatggcggcgatctggcgcgagaacacgatgaaccagccgaggaacgccagaccagccaacgcctccacattggtgagggtgttgtgacccatcatcatattgacccagaatgcagcgcatacgagcgcggtcaggtcggaggccaccatcactgctttggacaggcgtggcgcaagccacggcaggagcacgaacagcagcagcatgacgaacggcaggcctttggcgcatatattgtgcaagagattgtgtggcgtgtaccgaaacacgccgatgccgatgaatgccaggccggccaccatcagcaggaaggacagaatggagatgcgcagcatgaaatgtgggatttcgtagccgcgattcggatctctgttggtgcggtcgtgccagaggcgctgtagccgttcggtggtcaccagttcggagatggcgaagtagctgacgatgatgatgcatgtgccggcaagaatcagcgtggagttgaacatacgggccgcaaacgtggttctgtcgccgagctgcgaaaagttgttgtgataccagtatgggtcgtcggtggtcatgccggcggtgaccacgccggagatgacgaagaacggcaacagactggcaatagttttggcgttcatcatctccgcctgtacaaaggtcatgtaccccaccacgccggcgaaggcggcgcagacgctggagatatagccggagaagatggcattgcccatcatgtcgttggccgcaccgatgagtgcaaaagacgacaggaaaatggtcgaggcatacaccaccgaaagggcgacgatttcgaaaatgcgacgaatcggtgcaaacaaaccatgtttgaggttcaatgaacgtgatttgcgcgcatagccaataatgaaggaaatgacgccgcatgccgccacgatgcccgaacataccatgaatcggcgttgcgtcagctgccagatggccggcgcgtattccatgtacaggttcatcgataccgcgccaacgatggcgcaaatcaagaaggagatgagtccggaggtttctgcacgctgatgacgtcccatgccgggcctcccctatctattcgatgccgcgttatctttcaacaacaaacaaaactccccccgaggacaacgctttactagcaagccagcgggatttggctgtcgccattctactgaaaatctgaaacactacaaaaaaaaacgattatgtacgggcttcttagcctttgcgactatcgttaccgccttgccgagtaccgttgttcatgcagaaagaaagcagtattggacacaatcgaatgagcgtgtcggtatcgttgaaaaagtaatgaatgacggttctatcggttcaacctttaagggacgaaccagccgcggcaccatggcgctgatgcatgactatgccgagctcatcaatgaattacgtccgacagcaga

SEQ ID NO: 1865 - DNA, 4789 bp, Unknown
  MAG_14  MAG No. k141_60817
gatagtcgtcgtccggcacccacacctcttccaagcgtttggccagtccgcagacggccacgtcgatcacgccacagtcctcaagcgccttggcggcggccatgacctgtggcttaccgccgtcgaccaccaccaggttcggcgtgtaggcaaagtgatgccggtttgtgttctgctggacgatgtcgggcgaggactcccgtgcatcgttctgcactccgaccggcaccgcgtgccccttgccactgatgtcggaaccgccctcaccattgtcgttaccgttcgcaacgattgtctccgccgccaaggcgcttgaggactgtggcgtgatcgacgtggccgtctgcggactggccaaacgcttggaagaggtgtgggtgccggacgacgactatccgatcatcctcaaacgccagtccgaaggcatgtatctgctgcagcgtgtacgcgacgaatcccaccgcttcgccatcacctaccaccgccaacagcggcgcaaaggcgccctgcgcagcgcgctcgacgagattcccggcatcggcgaaagctaccagaagcggctgctcaaccacttcggctcggtcaaagccatgcgcgaagccagtgtcgaggacttcgagaaggtcaaaggcatcggccacgccaaagccgaagcgctgtacaacgcgctgcacgagcagtgagccggcccggtccagcagcccagagtgaattttcggttgcggggcctgtggttgacatattcgaagcaaagtgtcggctagcatggaaacagacatcaaggaggggatatggccaatcatcgttgcgctgtactcggcaaacccgtcgcgcactcattgtcacccgtgctccacaacgcggcttatcgttcgctgaaactcgacgattggctgtacgacaagcacgaggtgggggaagacgacctcgacgctttcctcaaaggccttggctcgacgtgggctggcctgagcctgaccatgccgttgaagaagaccatccaaccgtacggtgttccggaaaatctgtgggccaaggaactgaaggtggcgaataccgcggtattcgactggagtgtggctaccgatgatcccgcttggccgaacggcaagccgggcatcaagctgtacaacaccgatgtcatcggcatccaactcgccttcgaccacgccaatcgcgaactcggcgaacaccacaccgcatcgagaagcggcgccgcgctgatcctcggcaatggcaacaccgccacttcggcgttggccgcatgctgcatgatgcccgaaatcggccatatcatcgtcgccgcccgccaccctgggaaaaacaccgggcttaaaccagtggccgaaaagttcgtcaacgtgcataacccgtacagcgaaatcgaattaggcgacgatcaggccctgctcgaggcagcccgcaacgccacctatgtcatcaacacgattcccggacatgcggccgacaacgtcgcggatgccctcaccaatgccggaaccgagccattctccggactgctgctggacgtggtctacgatccacgccccaccaagctcatggaagcctggcgcgctcatggcggtcacgccatcggcggcgaagaaatgctgctgtaccaagctctcgtacaggtattgctgatgaccggtatctgggatgacgacccgcccagcgatgccgaccagcgtctgcaggacaccaccaccgaagacgaccagctggagattgcgatgcgcaaagctcttgaggaggcgctgtaatgagtcaacagacaacgagccgcgataccggcgagatgaccgccacgaatacgccggcgaattccgcgacatccacatcgactccggacaaccagccgaccccgcttgatgccttcgaggtgctgctcatcaccggtatgtccggcgcaggccgctctcatgccgctgactgcgtggaagacatgggatggtatgtggtcgacaacctgcctcccaaactgcttatcccgcttgtcgacatgatgaccacctccggttccggatcggggtcgggcgtccacaagcttgctgccgtcatcgacgtgcgctccagctatttcgacgagctggccgccgtgctcggtcatctggatgatctcggcgtcaaaacccatattctgttcctcgacgccagcaacgaagtgctcatcaagcgctatgaatccgtgcgccgcccgcacccgctgcagcacggcaaccgactgatcgacggcatccttgaggaacgtcacctgctggaagacctcaaggagcgagccgactgggtcattgacaccagctccctgagcatccaccagctgtccaccaaactctacgagacgatgctcggttccggccccaccaccgtggcggtacacatcttcagcttcggcttcaaatacggcatgcccatcgacgccgatttcgtggccgatgtgcgttttctgcccaacccgttctgggttcccaacctgcgcgagcttaccgggcacgacaagccggtcgccgactacgtgctttccagcaagggagccaaggaatttctcgacgcttatgagaaagctatcgagattgcgttggaaggatacgcccaggaagacaagcactatgtaaccatcgccgtcggctgcaccggtggtcagcaccggtcggtggcgatgagcgaagagctggctcgccgcttacgcgcacatgggctcaacgtaaccgtttccgcgagagaacagcataagcgtcactcatcgtaagcaggcgtcgagcggtcatcgggcaagtgttcggtgaccacactgcgagaaagcaaagcccataatacgtatcaaacgggttcgcttgtccaccagattaggtatcacagaaagccgatggcttccgaccgtatgacagcagataacggcacgaagcgcctgaagcattgagaagaacgggactgtaggaggtagatcttggctcttctggacgatgtcaaaagcgagttggcggcctttgaaggcgattcgccagccgcgatcaaggcccaagctgcggccatgatccgttttggcggcggtcttcgaccggtacagaatacatacgttatccaagccgtattcacctcgcttgacgttgcagaatggctgaagaacacgttgaggaacacgttcgggcatgaagccgaggtcaaccacctcacccgtcagaccccgaacggccctgtcgagacctacgtggtgctcgtcacccgcaacgtagtggccttggctttgcagaccggactggtcgaccgccgcaagcagcaggtccgtggactgccgtctgaagtggtcaacggatccatcgcccaaatcaaagcagcatggcgcggcgccttcatggcccgtggcttcctatccgatcccggtaaggccagcttcctggaaatcgcttgccccacggaagaggccgccatggccctgtgtggcgtggcccgtcgtctcggcatccaggccaagcatcgcacgctgcgcagctccgagcgcgtgaccctcaaggatcccgacgccatcgaacgcatgctcaagctcatgggcgccacccgttcggcccgcgaatggaccggcaagcgctccgacggcgaggcccgcggcaaggccaaccgtctggccaacttcgatgacgccaatatgcgccgttccgccaaggctgccgccgaagccagcgaaaaagtgcagcatgccttcgaagtgctcggcgataacattccggacaacctccgtcaggccggccagctgcgcatcgatcacgtggacaagagcctcgaggagcttggcaagatcgccgaaccgcaaatcaccaaggatgcgattgccggccgaattcgccgactgcttcagcttgccgagaaaacggagaaggctcgcgcagccgaaggcaagtaacccgacaacgacgtaacgaaacaccgcattcagtcattaggcgaatgcggtgttttgttccggaatgcctgtaatatgcaaagtggcaaaattggccactttgacgtgcgattcgtcaaggaaaggatattcatgaagacactcaaggaccttggagatctcaagggcaagcgcgttctggttcgcgctgatttcaatgttccgctggacggcaccaccatcaccgatgacggtcgaatcaaggctgctctgccgaccatcaagaccctgcgcgaagaaggcgccaaggtcatcctcatggcccaccttggccgcccgaagggcaaggtcgttcctgagctgagcctggccccggttgccgcccgcctcggcgagctgctcggcaccaacgtgccgctggccaaggacacctacggcgaggacgctcaggccaaggtcgccgccatgaacgatggcgatgttgtgctgcttgagaacgttcgcttcaacccggaggagacctccaaggacgccgacgaacgcgccgcttacgccaagaagatcgccgccctcggcgaggccttcgtttccgttggcttcggcgtggtccaccgcgcccagggctccaactacgacgttgccgccgatctgccggccgccgcaggcctgctggtcgagaaggaagtcaaggccctgtccaaggccaccgagaacccggagcgtccgttcaccgtggtgctcggcggttccaaggtctccgacaagctcggcgtcatcgagaacctgctcgacaaggccaaccgtctggtcatcggcggcggcatggtgttcaccttcctcaaggccaagggctacgaggtcggcacctccctgcttgaagaggaccagcttgagaaggtcaagggctacatc

SEQ ID NO: 1866 - DNA, 9755 bp, Unknown
  MAG_14  MAG No. k141_61081
acgtcgccgtgaacgccggcttcccggccggtgacaccccggttgctccggaagtcgttgccgccgacgccatcccggccgacaagatgggtctggacattggcccggagtcccagaagctcttccacgacaagatcgtcgactccaagaccgtcgtgtggaacggcccgatgggcgtgttcgaggttcctgagttcgcctccggcaccaaggccgtggcccagggtctggtcgacgccaccgcagccggtgcgttcaccatcgtcggtggcggcgactccgcctccgccgtgcgtaacctcggcttcccggaggacggcttctcccacatctccaccggtggcggcgcttccctcgagttcctcgaaggcaaggagctccctggtctgaaggtgcttgagtaatccattttctagctcccctccttgaggggagctacgtattttttagaggggaaacatatggcgtccaaacgcattccgttggtggccggcaactggaagatgaatttcgaccatcttgaagccacttacttcgtgcagaagctggtatggctgttgcgtgacgctcgctttgacttcaaacgctgcgaagtcgcgcttttcccctcgttcacgtcattgcgcagcgtacaggtgctggtcgaagccgacaagctccatgtcgcctacggcgcacaatccgtttccgtgaccacccaaggtgccttcaccggcgatgtgtccgcggacatgatcgcccatctcggctgctcatacgtcatcgtcggccactccgaacgccgcaaataccatcctgaagatgacgccaatatcgtcgatcaggtacgtgccgtgctcgccgccggcatgcagccgattttgtgcgtcggcgaaagcttcgaggaacgacgtcaaggcattgaactcgatttcgccgtgggccaggtacgagacgtcacccgcgatctcaacgaagaacaagccgccgaactcatcgtggcctacgaacctgtctgggccattggcaccggcatggtggccactccgcaatccgcccaggatgccgcaaacgccatccgcaacgatttgaagaccacttttggcacgaaggtatccgatagcgtacgtatcctgtacggcggatcggtcacctcgaaaaacgcggcggaactcatttcccaacccgacgtcgacggcttcctgattggaggggcggccctggatgttgaggaactcgccaaaatcgctcgactggcactgaaagccacgaaatcacggaactaataccacggttttcccgtgtgtgcgctatgctggtcaacagtccaatcaatccggaggtaccctgtgaccgctcttaagatcacgctgcaagtcatcgtcgtgctgctcagcttcgtgctgaccctgctcatccttatgcacaagggcaagggcggcggtttgtccgacatgttcggcggcggtctgacccagaacgccggtacttccggtgtcgccgaaaagaacctgaaccgttggaccgttatcatcgctctggtgtgggtggcattgatcatcggcctcgacatgatgaccaagttcaacctcggctgatcggcttgcacgccatatagacttgtcgctcgcgacccatgaccgttaccgtcggtcatgggtcgtatgcgttctatcgagtattacgaaaggacatcaccatggtcactatgaaccgcaacaaagtcgttatcgtcggcactggccaggtcggtgccaccgccgccttcggcatcgtcacgcacggcctgtgcaatgagctcgtgctcatcgaccgctccgccgccaaagccctgggggaggcccgcgacctcgatgacggcagcgaattccaggaccgccacgtcaaggtgcgcgccggcgactacgccgactgcaaggacgcggacatcgtcgtcatcaccgtgggccgcaagccgccggccaactccaaccgcatggccgaactcggcttcaccgtgggccttgtgggcgaagtggtcgacaacgtcatggcctccggcttcgacggcgtgatcgtcatggtctccaacccggtcgatgtgatggcctggtatgcctggaaacgttccggcctgccgcgcacccaggtgctgggcaccggcaccgcgctcgacacctcgcgtctcaagaccatcatcggcgaagagaccggcctcgacccgcgtaacgtgggcggcttcgtgatgggcgagcacggcgactcccagttcaccgcatggtccaccgtctcgctcggcggcaagccattcgcccgcttcctggccgacaaccaagaccgtttcgcctccgtgtccaccaccgaaatcgaagagaagacccgcacccgtggcgatgagatcgtcgcggccaagggcggtaccaacttcggcatcgcctccaccgtggccggcatcgtgcagaccatcctgtgggacgaacgccgcatcgtacccgtctccaccctgctgaacggcgaatacggcgaacatgacgtgttcctcggcgtccccactgaactgcgcgccaatggtgccaacgagatcgtcgaactcgatctgagcgaggacgagcaggccaaattgcaccattccgccgaactcgtgcgtgaacactgcgaggggctgctgtgattctcgacgccatcacaccgaaacaaccccgactgctggtcgccgacctcgacggtacgttgctgcacgacgccgaggtattcgaggaccggttcatcacccagcgcagcatcgacaccatcaaccgcgcgcacgatgccggactgaaattcgccatcgccaccgcgcggccggtgagtaccggcctccagttcgccgaaaaactgccggtggacgccgtaatctatctgaacggtgccctcatcgatttcgacccggcccactccgacttcgacctgctcacctcaggtgccacgccggccgatgagaaccatttgatcaagattggcttctcctcacggcgtgcctgcgaagtctgtctgttcctgctcgatcgcatgcccggcctgaagctcggcatcgtgatgaacgacgtgcgctacaccaacttcgatgtgcgcgtgtattggaaaacacaggccttccaatacacgaacttccacgacgtgcccgaaggcgtggcggataagatcaccatcttccccgagcctgaacagtggaacgagctgcgtgcgctgattccgccggacttcgacatctccattagcgaaggcgtgatgtggatgctcatgaacccgcaggccaacaaggagcacgcgctgcacctgctgtgcgaacgactggacgtgccgctcgaacagaccgccgccttcggcgacgacctcatcgatatcaacatgatgagcgaatccggccggggtgtggccgtggccaacgcgaaccccaaggtgttgtctatcgccgacgagatctgcccgcccaacaacgaggacggcgtcgcccaatggattgaagcgcagttgggctgaaccggccgagactcgagaacacgccaaaattgaacttgtgttgaaccgggagtatgctttgaactgttgttcaaaagataaattgaactcccggttggaggcataaggatatgagcgtatcggtgtttgcggaacgtctgcgcaatgcgatgaacagtaggggattgaagcaggtcgatttggtgcacgccgccgaacatcgtggcgtaaagatgggcaagagccatatcagccaatacgtggccggcaagaccatgccccgcgaagacgtgctcgaattcctggccagcgaactggacgtcgacgcgaactggctgcgcggcgaggaatccaccccgcaattgaactcggacgcttccaacagcgtcacggacggcgagcacgccgccacgccgcttgccacgggcaccgccaagcccctgacggacagcgagattcccgtgggccgccgccgtaccttcggcaaatcgcacaagctcgacaacgtgctctacgacgtgcgcggcccggtcgccgacgaggcgatgcgcatggaggccaacggcacccacatcctgaaattgaacatcggcaatccagcacccttcggcttccgcacgccggacgaagtcgtctatgacatggcccaccagctcaccgacaccgaaggctactcgccgtccaagggcctgttctccgcgcgcaaggccatcatgcagtacgcgcagctgaagaacatcccgaacgtcaccatcgacgacatctacaccggcaacggcgtcagcgagctcatcaacctgtccatgtccgcgctgctcgacaccggcgacgaagtgctcgtgccctccccggactacccgctgtggaccgcctgcgtgaacctggccggcggcaccgccgtgcactacctgtgcgacgaacagtccgaatggtatccggacatcgatgacatccgctccaagatcaccagcaacaccaaggcgattgtcatcatcaacccgaacaaccccaccggcgcactttacccaaaggaagtgctccagcagatcgtcgacatcgcgcgtgaacaccagctcatcatcttctccgacgaaatctacgatcgcctcgtcatggacggcctgcagcacatctccatcgcctcgatggccccggacctgttctgcgtgaccttctccggcctgtcgaaatcgcacatgatcgccggctaccgcatcggctggatgatcctgtccggcaacaagcgtatcgccaaggactacatcgagggcctcaacatgctcgccaacatgcgcatgtgctcgaacgtgcccgcccagtccgtggtgcagaccgcgctcggcggccaccagagcgtcaacgactacatcgtgccgggcggccgcgtgcacgaccagcgtgacctcgtttacgacatgctcaaccagattcccggcatcaccgccgtcaaacccaaggctgcgttttacatctttccgaagatcgacgtcaaacgcttcaacatccactcggacgagcagttcgcgctcgacctgctgcatgacaagcacatcctcatcagccacggcggcgcgttcaactggcatcgccccgaccacttccgcgtggtgtacctgccgcgcatgggcatgctgcacgaaaccatgggggagctcgccgacttcttcagctactactggcagagctgatccttggtacaggcgaacacgatcgatgccgggctgggcaccaaaccggtgccccgtctggccctgaccatgtcggtccccaccatcgtggcgcaggcggcgaacgcctcgtacacgatcatcgaccgactgttcatcgggcacatccccgaagtgggcaacgcggcgatgaccggcgtgggcatctgcttcccgattctgccggccgtcaccgccttcgcctcgctgatcggcgcaggcggcgcgccgcgcgcctccattgaacttgggcgcggcaacttcaagaaagccgaacgcatcctcggcaccagcgccgcgttcctcatcgccatagccctgaccctcaccgtgctgctgcagttggcgaaaccactgtggccatggtctccgtactcatcggcaccggcatatccatccttcttgaccccgtgttcattttcgtgttcggatggggcgtcaggggagcggccgccgcgaacgtgttcgccacattccccgtcttcttcgcctcatggttcacctcggaacagacggtcatcgacatcgtgacccgcatgatgccgattttcgtctgcggctggggtatcttcggcatccagatgggcgcgcaatgcgcactcgtcggcatgggccaggccaaacagtcggtgttcttggccgtcttccgcaagatcatcctgctcgtgccgctcgcgctgctgctgccgcactggatcggcgtcaacggcatcttcatcgccgaacccatctccgacgccacctccggcatcgtggccggcttcctgttctatgccacctaccgcaagattcggcgagatatggtctagactcctgattcaatggatgtgccgtctcatgcgttgcgaaacacgggacggatagaatgcctcgcaaaacgggtgcccgttgtttcgtgatatgaaggagattttatgccggtggtgtcgcgtcgtgcgcagccaacgtgatggccataatcgccgaaagcagggagaacaatggcagcacgcacaacacgacggtcagcagtcccaaagcttcacggccgatgcaataagcgacaagacctgcattgtcagttgccgatagcgctgggcagaaatcggtgtgtctaccagtgttgtagctgtaggtaaagaacgtgagacctgaccagaacagggcaacgggaacagagccgatggcgcgaaaagccctgtactcccgcaacggtcagacagagaatcgcgacaacactcagcgcagtcaccgtcataaaccacagtggtgaggtgacgcagactccataatcgtcagttgcttggcccgagagatagtaggtcattctgccaatcgccggacagttcggatgcagcatcatgccgccccaaatgcgctcatatagtggtgcgaacgatacaccggcaccgctgagcgtcgcaacaaccgccatcaccgaccgaccgccagactccggcacagaccgggaagaactaccgtcgcggagcatcggcgataccaatggcaacaccgaggatagccgggaccacccagccgagctggtattgctgcaagggcagcatggccagcgtcgtgtccagccagccgatggagccgccgaagacggtgattaggctggagatgcaggtggcgaaggagtcgatgcccaccagcagcacggtccagaagtagacatgcgggaatcgcgcgccgagcgacttgtgggtcagcgccagcagcaccagcacgatggcgatcggatacagtgcggacaacaccggcacggaaaccttgatgatcgcgcttagcccggcgttggacacgatgaaactgaacacggtgaagatgacctgccaggtgcggtagctcaacgttctccctgcaacggtctggaaccgagtgtggaagtaggtggcgcaggtaccgatcagtccggtgcatacgttgaggcaggcgatgacgaagacgataccgaggaacgcggtaccgaacgcgccgaacagggacgaggtgagattggtgagcacggtcgcgcccgtgtctttggcgggatcgatggtggcgatggcgccggacaccaagcccacgtagctcagtgcgccgtagatcacgatcagcagcacaccggtgccgagtccggcatacgcggtctccttctgcacttgcgattcgtcatcgacctgctgggtgcggatattcgcggaaatcacgatgccgaaatagagcgcggcgagcagatccatggtctggtagccgtcgaggaagccacgtgcaatctggtttgtggagtagtcgcccatcggtttggccggggtaccgataccgtggattaggcaggcgatgaacaggacggcaatcagcaccagcagcaacggtcccatgaatcggccgagcactttggagagtttttcgggatgctgggcgaacaggaacgccagtgtgaagaacacgagcgagtagatgagttgggccagccagccgtaggaggacggcacgaaaggcgccaccatcatttcgaacgaggtggtcgccgtacgcggaatcgcaaagcaggggccgatggtgagcatgatcgccaagccgaggaacagggcgaatttgggggagacccggccggcgagtttgtcgaagccaccggcgaaggtgaccgccagcacgccgagaatcggcaggccgaccgcggagacgatgaagccgatggccgccggtatggtcgcggaaccggcctgagctccgacaaacggcgggaagatcaggttgcccgctccgaagaacatcgaaaagaaggtaaaggtcatcaccaaccgctggcgtgcgacaagtttgttcattacggttcggcctttctctcatgtgctcgtactactgtagcaacaaacgtaagaagccccgaccggttggggtcggagcttctgtgagctaatcagttaatgcgcgaaatgcgcatcagctaataatctcaggcgttcacgcggtcgatgccggactggacgtcagccagcacggaatcccaggacttgatgaaggcggcgacaccgtcggcctccagcttgtcagtgacgtccttgaggttgatacccagctcagccagcttgttgatgacggcgtgggactcctcgtaggtgccctcgatggacggagcgccgttgccgtggtcggccagagcgttcagggtcttctccggcatggtgttgacgatgtgcttggcaacgagctcgtcaacgtacttgcagtcggagtaggcggcgttcttggtaccggtggaggcccacagcggacgctgaaccttggcacccttggcagccaggtcggcccaacgcggatcctcggcaaacttcttctcgaagagctcgtaagccaggcgagcgttggccacagcggccttgccctccagagccttggcctcgtcggagccgttggcttccagcagcttgtcgacagcggtgtccacgcgggagacgaagaaggaagcgacggagccgatgtgcttcaggtcgtggccgttggcgtcagcctgggcgatgccctcgatgaaggcgtcgatgacctgctcgtagcgctcgagcgagaagatcagggtgacgttgacggagatacccttggccagggtggcggtgatggccggcaggccttcgagggttgccggaatcttgatcatggcgttcggacggttgaccttctcccagagttccacagcctgcttggcggtgttctcggtgtcgtgggccagacgcgggtcgacctcgatggagacacggccgtcgacgaagtcggtagcctcagcgatctcgcggaagatgtcggtggcgttgcgcacgtcggtggtggtgagctcgcggacagcggtctcaacgtcaaccttgccgagctccttgagctgagcgtcgtacgggccgacctggctcagggccttctggaagatggacgggttggtggtaacgccgaccacgttcttgttggcgatgaggtcctgcagggagccggactcaatgcgggagcgggacaggtcgtccagccagacggaaacgccgttgtcggacgtacgctgagttgcttcagtcatttattttctccttggattcaagccctaggctcccctctcctgggagaggggagctgtccgcaacgcggactgaggggagtgggctcaagcattgctcccctcagtcaagctttcgcctgacagctcccctcagggaggggagccaacaattattgaattattgcttagttgctcacttggcggcttcgacttcggcgatggaggccttggcggcttccaccacgtgctcggcggtgatgccgaggtcgatcatgttctgagcgccgtcaccctgcaggccgaactgctcgatggagacaggcttgccgtaggaaccgaggtacttgtaccacggcatggcaacgccggcctcgacggagacacgagccttgacagcggccggaagcacagcctccttgtactcggcgtcctgctcctcgaaccattccatggacggcacggacacgacgcgagccttgacgccctcgccggccagggtcttggcggcagccacagcccactggacctcggaaccggaagccatgaggatgacgtccggagtaccctcggtgtcgaccaggatgtacgcg

SEQ ID NO: 1867 - DNA, 21232 bp, Unknown
  MAG_14  MAG No. k141_61168
ccattattgttgctttgtactgtttgcactgtattgcgcctgcattgcgcaagctcgggcgcactcgggtgcactcgctgagtggcgtgaatcgcagattgctcaatagcaacgcaatccacgccactcagcagttgccatggttatgcacggcgtttgcggatgacgagcaaggcaccagccgcagctgtcagcaccacaaccacgaccgcaatggcagccacggcaacacccgtattcgaaaggggcgcagcgccattagcagccggcttattcgtggcagtgttaccgggcttagcagtgttgccaggattgttggtatcgccgggcttctgctctccagggccgggagtgacctccgtggccgtgaccgtgacttcgaacgtcgcgttcacgccacgataagagacggtgatggtcttcgtgcctgcggtggcagaatcaaagccagtgaacttcagatcaccatcagttggatcaatcagcttgcgcagcgtttcggtatcgccgactttgtaaatggcggataccttcacatcggcagcgttgaacttatcgcctacctgataggaatccttggtcacttccacagcaagctcggccaactgaggcagttcgccgaatgtcactgtgtaggtttccgccgtgccatcctcagcagttacagtcaccgtggccacgccgctgttctcggtcgaagcctgctccacctgcaccgtagccttcgcgtcagcagcagtcgcctccaccgtcgggtaagaagcagcgtctccggccagcgcaccggcatattcggtgatatccgcggagaatccgtcaaccgtcttgccatccacagtcagatcagcaagattggcgttactagacggctgcggctttggcgttgcttcaccttcggcgatgcgtacttcagcgatcttggcatagtcattgccatcggcgtaggtgaagttgaggcgaatgcccttggtggcgggcagagcgctcacatcggcttccgtcacggctccagcagcaccattcacagtgactgccggcagcgtggcatcagtccacgtggcgttgtcttcagctaggtacgatacagtgaagctcttcggagcggcctcgcccttggccttatccaccgcaacgctgagcttgcccagctgatatgccttatcgaaggtgtagctgagccacggcgaggtgtcgccggtgccccagttcgaccagttggtgctcagattgttgtcgcaagtcaggtcggccgtagaagcggaggcccagctgctggccggctcatacttcgaggctgcggcggacgagcagaacaaccgggcaaggttgctttccacagtcacggtgagcgtggcagttactgaagaatcagtgacaagacgtaccgtcacggtttgctcgcccaatttggtggtgtcgaagccttccaacgtgtattcatctggctccagtacacgcgtcttgccattggtgagcgtagcggtaaccgtcacgtccttatgcgcgagcgtctgcctcttggcgatagtggcttcagggcccttggccgcgatggactccacagcagcagtctgcgaaccgaacgcagtgccgttgaaggccacggtgaatgcgccggcattgctgttcgacgtggcgaaagcaccggcatcgagcccggttacgtccgcaccggtcagcgttaccgtagcgacatcctgccattcatcgttcgcggaagcacgccagtagcctttcagagtatcggttgaggtgcgctccagcttgagctgcacttggtcgccgaagccggtaccaacatgcgatgtttccttatcgatgtagccatcggcattggaatcgtactgcatgtaaacgccgcttgggctggcaagtaacgtggcatatcccttgccgccgttagcgccagtaagaccgttacggaccaccagaccggcgcgcggatcgccattaccgcccaagtcgagcggcttgaccgtggtttccagcgtttcgttcacgtccagggcatcaggctggtacaccgcactgccctcgttgcgatccgtccagacgccacgattggcgttgtccgtaatcgtgaagtcataagcaccgccggacgcagaaacctggcacgcgctgccgcccttccaatgagcttccttccaacttccggaaatcgggttggagcaggaaacatcgatggttctacggaatgtacggcccggattgaagttactgctctcggcaagagtgcccgtaatggtgtaggttcccggcacattgaatgcgtaggtgttaccagcagccttggtcgacttgctgactgccgtaccgccttccacattccatgtcaccttggtagcaatggtatcgtcgccttccttgacgttgacggtgtccggcagagtaacggttccgcccgtgttcacggtcttcgggagatcatcgccggtttccacagtccagttgaccagcttgcccttggcgctaccatggttgccccaatagctcagatcccaaccgtcgggctcgccttcttgagcaggattgtgcatttcgatggtgccgttctcaccgatggtcagcggcagccaaacataggtggaatcggctttaccggaatcccaacggtcaccaaggtagatgaagtgacctttctcctggtctactgcgagcacactagccgactgcgaaccgaatgtggtgccgcgggtatcgcccacggacaacagaccatccgcgccttccggcatgttgttgtaccacgtgttctcgttgacatcgtccttttccacgccacgggtccagcttcccagcatggagtcggcggtgtagtaggtctgcttgttcggggcccagccggttgcaccagatgcgatgatgttgtaacgcccgtcatattggaatacggcaggagcttccagcgaaccattttgtttgacgatttggaaatcttcgccacgcaccggggcatccgtagtagcgtctgcaagaatgtatgggtactgcccgtcagcagagtactgcttttgtccctcggactggtccacattcgtggtcttgactacattggtgtaatcatcgttgagcttggcgatgtacagcgtggcattggcttcggaagaatacagtacataggcactgtcgtccttcgggtccacgaacacagtcatatcgcggctgtcaccgttctcaccccagctggggttacctgcggcttctttccaattgttctggttaggcaaacgataggcacccaccatagtgaacgggcccgccggattgtcggaaacagccacgcccgcaagtgcacgtgcatagttggaaccgcccggcgtggtgcttccatcggaatgccaccacagcacgtattgcttgttcttcttgttgtagatgatcttcggacgctcgaaaatgccctgtacggaatcaaccgcgccatcaccatcctgatcggggttggtgttgaggtacgggaagattgcgtcggccttggcagcgtccacactgccgtcggacttggtcaggttgtaggccttgtcgaaataggcgtaatcggcattgctcttatccgtcaactgagatttgctggtcaccgcacgcagcgccacaccaagatcggtccagttgtatagatctgtcgacatataagcatgaacaccggggctgttgtcgtaaccgttagaacggtcttcgccataccagtagtaggcgtcgccaaccttgaccacttggccaccgtgcgcttggatgtgtgtgccgccattatcattggcgttcttggcataccaatatggctggaagtaatcgctagcgttcttgcccggatcggctgtgggctggaacttggtgtatgtcggcacttggccgatggtaggcaggtaatccacacctgccgcactggcacttgcagcggccagcccgcatgacaatagcgttgccgcggcggtaattgccgcgataagagcgcccttgcccttattgtttatcttcattgatttggttccttgattgatgataacggttttttgaacaaacagttatatcgctatccgcgaagccagaaaaggttcgacaaatcaatataccgatactgaaaactcagtattcaacttgtcggaccaattatggtcaaagagcggaggaaccggccggcaatagtcaatattgccggcttgttccttcacccattactgcgcgagggtgctatgcacgcttgcgcagcatgaacagtgcacccgcggcagcggccagcagagcgacagcgccagcgatggcgacaacactggaaccggtgttggccaccgtgttcttgttgccgttgccggtggcaccgggcttgttggtgttgccgggcttctgttcttcagggccaggggcgactgcgttggccttgaccgtgacgttgaaggtcgcggtcacaccacggtaggagacggtaatcgccttcttgcctgcggtggtggagtcgaacgagccaatcgcaagctgcgggtcgtcaagagcgaccggcacttccttggtcttgtcgccactctggtagacggcagtcaccttcagaccggcggtatcgagcttgtcgccgatggcgtactcggtcttcgtgggtccgatcaccttgagcgaagccaaagtgaaggcgttgaaggtcaccgtgtaggtcttcgtctcagactcgtcggctgaggtcaccgtaatggcggccttgccgccaagcttgccgttctcaaccgcgtcgccagtcaccttgacggcggcggcattgtcggtggcgaaggcctgcagcaccgggtttgcctcggcgtcgaccggcagatcaaccgtgtagtcggtcttggccgggtcgaagccttcaacggtttcgccgtcaagacgcaggtcgcccagcgtggcatcggatgctggctgcggggtgagtaccgtgctgtcttgtgcgaacacctggatctcagccacgttgatgtacaccttggtgtcctgcaatgtgttagtcaggcggatggccttggcctttaccggggtgccgagcacgaagtcaacggtcggggtgtcggcggcggtgatgccgtcggagccagagccggcatcgccggcctgtatcttccagccatccttggtaccgactccatgccattcgccagcctcatcctggtattccagcgtctggctcttcggccaagacgcacgaccatcgtagtagaagaaggtcttcacttcggtgatggtctgagcttcgtcgaaggtgaacgtggcgaccgggtccaccgtcgaggcggtggaagcccaagtggaccaaccctttgacgtagtgtcaccatcgatggccttggaagcggaggcaccctcctggaagttcaccgagaagttcgtgccagaggccgcggcgatgttcttcgcagcaccctgaaccggcgtcacgaatgcctgaatttcggtggcgttcatgtagtcgttgttcacggtgttcacaatgcgcaccttcgtggcattcactgtgcccttatcggccttgaacgtcaccgtctggcctgcggcaggcttaacatcgctaccgaattgcatccacgtctcgccatcagtggtgtactcggccttggcggaagccggagccttgtcaccatacgtaatggtcacgctgctaagctcacactcagagccgaagtcaatcgtggcggtcgggctggcggaatagtcaccagcagagttccacgtcacccaggcttcagctgacgtgtcaccatcggtgagcttcttccactgatcgcccttgctgtattccgtctgctggttggtcacggtcaggctggaagcagtgtcggccacattctcaggcgtggcggcggtgacatagatcgcgcccttcagcgcaatcgtggtcgcgtcgtccagctggtaagtaccggtcacggcaatgttgtcgccagccttggcatcggcgagcttggtatcaagcccatcgaagttccacgtaaccttagccgcatcgccctcgaatgcaggcgatgccttgacgtgcagatacaccggcgcagcctcaagcgcggccttcgcctcgctcgcactggtgccggccagcactgtagccgataccggatcggaaacggtgagcgcgccaacgtagaccgtagcggcgacattgaactcgttgccgtacacatcggtggcggtagcggtggcttcgtaggtgccttccttggccacatcgaccttggaagtatcccagttggcaaccgtggccttgccttcgccccaggtgtagtagagcgtgacttcggtcggcagcgcggccttctcgttaacggcggtctgcacgttcacggtcttctggctggtcggcgttacattgcgtagagtccatgtctggttggcggacggcgaagtgccgctcggtgactgccacaagccaaccttcgtgccgactgtggtaccagagttatccacatcgaggttcgtcttagtcgcggcattgagcagctggtaggtcgaaccatcggaagtgttgagaatccacttggcagccgggtcggacttagcggcctcaaccgtttcgttggaaagcgcgttcgtgccatccttggacaccagcaccttgccttcggcgttagtaatcacataagccttgagatcagggcgctcggagtcggcgggctgctcgatctgggtaaaggtccaagtctgcttcttggcgttctcggcatcggaagcgacgttggccagggacagcgcggaatcaccagaagtggtatcagccacggccttgccggactgcttaccaacgagctggtaagtgtcgccggtctcgacggcagcatccttagcgtagccggtcacgccagtgagctggatggaggcgatagaacgggcgggcacagtgaccgtagcggtcttggcagccttgtcaatcatcacagagccttcagcttgcttgacgttgctggtcttggcgaagacttccggagtggcggaatcgacacccgcgttcttgtcttcggcagaggtttcggtggtcaggtagagctcaccgtaagcgttgtcggcaatctcgccgtacttcgacaggtcgatgacgaaggtctggtcagaggtgccggagttgcggtggatgacggtctgtgtcttgccatcgtcggaggtggcagtcatgttgttgtcttcatcgttgttggcgatgaccttgtcgcccgcgtggatgaagtgggtgatggccttgacgccgttgtacttggcgtttgcaataaccgtgcacggttcaagtccatcggtggtaccgccgttgttgttcacgcggcgctcggagtagagcttgccgtccatgccagccacggtgcagtcgaagtcgatgagcacggtgccccagttggtgttctcaccggccggattcacattcgagcccatctgcatgttgtagaggtcctcgaccacctgccagaaggtgaagtccttggactgcaggcgggtgacgttggagctgatcttgctcatcatgcccagcgcgttgtcgaaaccgtacgggttgtaggagccagactgccaggagccgtccacctcgctcatcgacagcttcttgccgtctgcctgagcgatatcgcgcgactgcatctggttgctgtcggagtaggcgtgaacgttgtactggccgataaggtccttgatcgcctgcgggtactggttgtacgacttgacgaagtcggcggagttcgtggcatcggtggctgcgatgatggtgtcatcattgtccttgagcgcctcagcgagtgcggtaatcgtctgctgctgctgggcgttgctgacatgcataccctcctgcggcttcttcagcgcgttggagtatggggtgacggacttatctttgtcggagtagtacttatcccagtagttgttaatgagcttggtgttgtcatcgctctcatcggtgtacttcgaagccatgtcgcccggagtgccccagtaactggtctcggactcgttgaacggctcgaccgtgtcaacgtttgcgccaaggctttcgaggtgctcgacgttcttggccatgtactgagcgaatttctcagggtttgcaagattattgctaccggagttgcgtccaccagtggcgtaaccgctgttggtcaggaaccacggagcggagttggcgaaggcctctacgtcggtgatgtcagggttatcgccggtggcaccgcgctcaatccaccagtcttgggcggcggacttggagaagtcatactggttgtcgtcagtcgggtcgaatgccgcagccagcttgtctttgtcggcctgcttggtggttacgccattgccatacgtgccggagccggtggcgtcatctttccacgtgccaggcacggcagcgccttggcgcatgaatgggtagccgtaggcaacatcggaggcattgccgccgcccacgttgtagcgggccatgttcaggtccagtccttcatcaccgaagatggactggtagaactgttcgcgcagctgtttgccgtattccacagccttagccttggaagcgtcatcgccgagattggtggtgatggccgattcctcgccgaggctgccggtggcgttggcgaaccaagccagcgaggtgccccagccatcgaaactgttggcataccacgggttcggggtcacggtaatggcatcgttatcagccgcatacgcagtgccggcaaccgcaaacgcccctcctcccactagtgttgccgccgcaaccattgcagcaagcgatttgctcagtaccttcattggtctccttagtgttcctgctatccgccttataccggaaaaatcggcctttgcttcactgcgccggcctctttgcctgatacatgacctacgtcgactccttctttcggcgcagccaaaatgtttacgcaaacattttgatatgagcgattttatcacaaaaccgtcacccagcaaacaacttcagagaccccaaacgacgtacaaagtcatgagccattcgaattgcgctggcccaatcgctacgaatcatatttgccgtagcccttaagtgaatcccactgcatcgagatatcgcgcccgctatcccttccgataacgccgaccacgcgtgttgccttcagcaatcagctttccttgcgcaactaaaccgtttaggaatttgcggactgttctgttatcgagctctgttatcttggcgagttcaggtacagtcacatagtcaacctctgtcaagcgtcgattcatcgccgacagcatcgctgcccgcgaatcaatttcacccgatgcggttgcatctgctttcttaccatccacacgttccccgccaatgagcctcgcaccctcttcggcatctttctcaactacagatctcacgctagcaaaaccagaaccatccacggtcttcagcgcaggaacaataggaatcgtcgcctcgaatatgtcaccatcgcggaactcaggctctcgctcagtatattgccgggacgctcttatcagattccgcagtccgctacccagctgctcggctatgccggtctgcacaaacacattagcgataatcggattctttggcattggcgtgaactcgcccagcttcattcgaccttcaaagaatgagcgcgaagcattaaccgtccggatggattcattatcaatggtgacacgcgccaccaccggactggaatactcccgatgcatgaggctgtttgccaccaattcacgggcgatcatcgtacgcgggctcactcgcttatcgccctttaacacaaagcggtcaggcagattccgctcagtaaattcacggagttgctcgtacgaatcgaacaagttggtccgcaccataagtcggtcatcgtatcggtcaatattgtctcgccgaaccacggcatcagtaatatacgctgggcaaaccgaggaaatgacttcatccttgcccaagagcagcactgcagcaagattaaagccctcttcgccggtcgtgtaatcacgatcgtatagcttggcgctgcggaacagttcttcgtcagacatagttccccaagggtgcccagctcgctgagcgaccgccagctgccgcattcgcgcaatcagctcaggacgcaaatcaaacggagtcacgtaacggaaaattcgccgttcggaatagtagttctgcttgcgaatatacatttgactaatctggatatcgctttcgatgtgtgtatccacatcagcaatgcgatcaaacactgcgcccttgaaccgcacaaccgaagaactcggagctacccaaatacgaacaataatccgttcgtcgtactcgatatgttccgtttccaccattggagccggttcgaacatcttacgattagacactacgttgacaacgttgcgctctatctcactaacgcgcttagaatcgacgccgagcacttgaccgtcatcgtcaacgccaagataaatgctgccaccagaacgattggcgaatgagcatacagtctcaaaagtatccgtatgaggcaattcgctgcagcgcttgaactcgaccatagatgattcaccggcctgcagcacttgcacaagttcatcctgcgtcatcgcattccgcccttcatagcgataattcatacattaggacatggcacttatcgtattttagcatctaattagtacattaggacattgttttatgtcctaatgtactaattaggcggctaattgtactaataattgcacactgatgtactaatccgatgatcgaatgcactaattgtccgcgcaaatgcactaatcggatgaccgaatgtatcaatgagacctataggcagccgattggctgacgatcagcccagtcattggctatcggccgctagccagtcagccgccaacagccacccaactaatagccgccagccaatcagcccgtccaatcactccttgtgttccagtgcggccttcaaatcgcggctacggtagcgttcgcgcagcatagagaatccaccgaagcccacaagccacaccaggccggcaatcgcggaattgcgcgtatcgtccgcaaggaacaacgtcaggtagatgaacacgaagaacacgatcgccaccgtattgagcaccttccacgcgggcatgacgaacccgtccgcgatgaaatcggcggaacggcgatacctgcgatgcgccagcagcgtcaggatgtagatgaacaggaacaccgcggagctggcggacgagaacagcacgaacgcccccgagatgccggggatggcgttgacgatcggcgacagcaggatcagcgccgcggacaccaggatggcgcgggccggcaccttgcggtcggacaccttgccgagcttgttcagcatcgggttcggcgacacctcggacagctggtacaggtggcggccggcggaatacaacagcgaattgagcgacgaggacgcggcggtgatcaccacgaagaacaccagggcggacgcccagttcaaaccggcatactggaacaccatgatgaacggggaggcgaaggagccgtcctcgttcggcttgaacgaggtccacggcacgatgcacatgatggccacgagcgcgcccacgtagaagatgagcacgcgcacgatgatctcgttgacggctttgggcagcacctcacgaggattcttggtctcggagacggtgacgcccacgaactcgagcagctcataggcgaagaacaccatctggaagctcatgaggaaggccatccagccgttcggggcgaacgagaagccggagaacaggttgtcgagtccggcgtggcccgccgggctcacatgatccacgccatgaatccgcgcggccgggtaatggtagccgatcacgatcatgaccacggcggtgacgatcatcgcgccgatcagcgtgatcttgatcatcgagaaccagaattccacctcgccgaacaccttgacggcgatcaggttgacggacaccagcgacaccaggaagcacagttcaatcagccatttccaatgggtcaggtcgatgccgaacgtgtcgaagaaggtgatgaagtacgtggagacggccgtgatctcggtcatgcccagcagcacgagcgcggcccaatacgtccagccggcgaaatgcccccacccgttgccaaggtaacgggtgatgaaattgatgaaggtgtgctggctggggtcgcggtacatcatctcgccgatggcgcgcatcaggaagaacatgatgacgccgaccaggatatacacgaagacgatcgaggggccggtcagcgccagcgacttgccggaccccaggaacaatccggtgccgatggtgccgccgatggcgatgaactgcacgtggcggttgttcaggccgcgctccatctcgttggtccggtccaggctttcgacagacttgagtttgcccgtagcctgccgtgtaccaccattcacattcgtatcggccatactgatttcatttctcttctccgccgcccgattgttacgcaccggacgcgatactcgttcaaaacaagttcagactgtatcaccgaaatatgtcgcgaaaaccgctcagctcaagaatacatgcgatgatgctgtaaatattccgccaaaaagttcaattcaccaacacctaattgaacttctacctctattccacggacttgagcgagctgaccgggtctacgcgatcgagcactgggttggtgaacagctgcaccagcagcgcgaacgccagcgtcgccaccacggcaatcgcatagctgtaccagtgcacttccacttcgaaatacagcgacggcatattcaacgcagcagtcagtaatccgcctatccacctgccaagcggcagaccaaccaccacacccataccggtcaatatcatcatctcgcggttcacgtagttgtgcacctcgcggtcatagaagcccagcaccttcagtgtggccatctcgcggatgcgttcggacacgttcgtattggccaacgtaaacagcaccaccagcgccaggccgccggcgagccccacaatcagcgccaccacggcacccatcaaatcgaacttaaacgtggcggccagatgcgcacagctcacggccttgagcaccgacgattcctcgcccaaccgatccgcatattcggcctgttcggtctcggaacctttcagcttggcgagcatcgcgttccacgtcaaggtcgaggcagtgccatctcccgaagccgaagacgtcacaccgccggccgcaaacttctggtcgtacagtcgctcactgatgtacacatcagagccaataagattgcgcgtcacggccgtgacctgcaccttggcccggctgctgccgccattgcccagcgtgacggtgtcgccggcatgaatattcagcgagttggcggcggactgcgatacaatcacgccactatcgtccagcgctacagtgccgccacccgctttgccgaagatattgggcagcccaaaccatccatcatcgccagcttgttccagcgtgaccatatcgttcaagatattcagcgaatcgttgggcacggtcatcagctgcacggtttcgctttcctgcgccgcattgctcatctcgccactatccacgcgcagattcagcgtttcggtggtttggccatcttgtgccacctgcttgcgcatcgcggtggcgtcatcgtcattggccacgaccatcaggtcgtactggtagatctgctcgtattgtttgacgccaatcgtgtcgacggtgtcattaatcgcaaatccgcagataatcaacgctgtgcaaccggccacgccgcccacggtcataatcaagcgcgacttgaatcggaagatattgcgcgcggtgactttgccgaggaagttcagccggctccataccgggcgaatccgctccagcaatatgcgagcgcccgctttcggtgccttcggccgcatcagcgcggcgggcgtgtgccgtatctcctcgcgacaggcgagcgcggtggccacgcccacgccgaccacgaacagcacgatgccggccgaaccgtacagccagtcgtattcgagtcgcacaccgggcaatatatacagtccctcaatcaccaccagcaggaatgccgggatgccaaggaatccgaccagcagaccgatgccgccgccgaccaggcaggcgagcaacgcgaacagcagataccggctggacacggcgagtccgccatagccgagtccaaggtaggtgccgataagtccgcggtcttcctcgaccatgcgggtcatggtggtcaggctcatgagcacggcgaccagcaggaacacaatcgggaatgcgcggccgatggattcgatggaactgacgtctgatttgagcgagctgaatccgtcgatcgaagcgcgcgtctgcacataccaacgtgcgttggccacatcgtcgatgcgccgttgctgcttggcgaattcgctttccgcttcgcttcgcttcgcatcgagttcagactgcgcatcatccagtttcgccttgccgtccgcgagctgttgttcgccttcttccagctgccgctcgccttcttcgagctgctgcttgccgctggccagttgggcggcctgcgcttcaagttgcgccgactgggtttcgagggttgcggcattcgcttcgagttccgcggatttggtattgagctgtgcctctcctgcagccgcttcctgttccttggcggtcagttgcgcgttctgctggtccaaggtggattgtgcgggggcaatggtttcgtttaatgtgcgctgcaaatcggctttctgctgggtcagactgtctcgctgcgtttgcagttccgtttgcttggcggccagctgttgccgcagctcactgattgacggcacttcaggcagggtaatgccaaggcgcgcgagcagttgcttgatggcctgccatgtgggtgagttgaagtcgatattcgggtcaagttgcgccagtagattgtcggcctgttgaatcatggacagcatctgatcaatgtgtgccacgccttggtcgatttgggtaatgccctgttcgattttcgtgcgattggcagtcagttccgtttgcgccgcatcgagctgtttgcgagccgaggtgagctgcgctttgcccgattcgagctgggtgcgcgcttcggctatctgctggcgaccttgcgcgatctgttgacgggccgatgcaatctgcgcacgtccatcggcgagctgccgttcgccatcggtaatggttgtcctgttgttctccaattcggtacggctatcttgcaatgtcgttttgttggcttccagctcggcccagttgtcgtcgatctgcttctgggcttcgtccagctgctcgttggcctcgtctttggcatcatccagtttgcgctgcgcgctggagacgatctgttgacgacgggctttctggcgtgtggcctgtatctgatgttcgatacggtcggccacggttttgatggcttcatcgtaggcatcggaaaacgtgtcaaaatcggacgcaccagtgacggcaaccgatatcgcagtgtatatattgccggtcacgccgtcgccgggtgcaaagaacgtatagtcctcggatgaggtggaccggaaggaggtcatgcccgaatagccgtctggattgttgaggtcgcgcgggtcgagtacgacgccggtgatggtgagtttcgtggggaactgcggggattgctcggcgtcggcgtccgtattggcgtcggacttcgcatcggatgccgaggcattggcggcgacacctaccgtatcggcattattggaatcgtcagtctccgtggccgctaccgatatgacggatgaagaggtgtcttgtggcgtcacagtaatggtgccgccaatcttgagtccgctatcgttcaggaattgctgcgtaaccgccacttcgccggccttgttcggcagtttgccctgccgtatgtacggctgatcaagcccttcggtaccgatttcctgcatggtcacggttttcttggtgccgtccaccaacgtggtcaccgtctgagaacgttcgggctgcacggtttgcacaccgtcgattcggcgcagtgccgttgcatcatcatcggtcaggccgtatgtggatagcacctgcaggtcatgcagtccctgctgatcgtaaaaacgaccggccgccagaaaagcatcgcggcatccggcgtagatgccggtcagcacggccacgccaagcagcgtgatgacggcgatcgagacgaacctcttccagctgcgcagccagcaacgcaacgtatctttggcaaataccgcagaaacgcccgctcctcgaccgtcgttatcgtcgaggttcggccgtttcacagactgtttcacaggttgtttcacgaatcgcctcgcttgtttcacggggcgtttcacagagtgtcttgcagtgagcatcgccaatcacctaccattcgatatcggcgatgggccgcggcgttgcgttgacctcctcgctggtcaccttgccggagcggaagcgaatcactttgtgagccatcggtgcaagcgcggaattatgcgtgatgatcattacggtcatgccttgtgtttggcaaatatcctgcagcaactgcagcacttccttgccggtctcgtaatcgagcgcaccggtcggctcatcgcacaacaacagcttcggctttttggcaatcgcgcgggcgatggatacacgctgttgttcgccgccggacagttgcgcggggaagttgtccatcctctcccccagtccgactttgcgcagcgtttcctctggatcgaaatggtcagggcagatttgcgaggcgagctccacgttttcgagcgcggtaaggttaggcaccagattgtagaactggaagacgaagccgatatcgttgcgccggtaggtcaccagttcctttttccgcagacccgtaatatcgcgtccgccgaccactacgcggccggttgtggcggtatccatgccgcccagaatgttcaatgccgtggttttgccggcaccggactgccccagaatcacgcttaattcgccttgttcggcggtgaagctggcctcgtcgagcgcgcgaatcacactgctgccagaaggatattccttgaccacatggtcgaattcgatatacgccatcgcacacctccaacgcgctcgtggcagccacctagccccataggccccgccagaacttcctgctatactcaagtaaaacaacactgtgtcggttctgcaaccaacagttggattgtgggttgtcggaacttggggagaaggccatggccaaagaattgacggaaagccgccgcacccgctacacgagacgtgccatgcaggacgcgcttatcgagttgctgcgcgatcagccgctcggctccatcaccgttaaagcgttgtgcgagcgggccgatgtgaatcgttccacgttttacgcgcattatgcgagcatcgaggaactgctgcacgacattgaagacgaaaccatggcctgggtcaccaccgcactcgaacagctactcgcccagccagatcctgccggcatcgagcatgttattgagcgcatctgccagtacattgccgacaatcgcaatcatctccaagtgctgatgagcccgaaagcggatatcggtttccagcagcagctgctgggattgatttacagccagcgcggtgtaggcgaacagttgcaatcttcggcgggttacccagccgaggcgcagatgcgtatgcgattcgccgtgtccggcagcattgggcttttgcaatattggctcgccaccgatctcgcggcctctcccgaatcggtgtcccacaccatcttcaccatgtgtatgcctgccacgcagtgagcacagtgaattcagtgaactcagtgaactcagtgaagcgtgcggtttcataagcatcgctcgctatagcttcgcctgctcaccggccgcgcccacgcccgcgcttgcaatagcgcacaaatagacgattgaccatttctgagacgatacggcggcatagaataacgaacgttgcgcatcacggcaagccccgcgtgcgccaaacccaagaaatgtgagagaagagcacaatgagtactactgatgcgcctaagaagccgcgcgaaaccgacgacgtgccggtgccggccacgctgcgcaagtcattgaaaaaccgccacatccagctgattgcgctgggcggcgccatcggaaccggcctgttctatggttccagtgaatccatcgcgctggccggaccctcgattctgctcgcctacttggttggcggcctcgcgattttcgcgattgtgcgtgcactgtctgaaatgtccgttgaggatccgaaggcgggcgcgttcagctactatgccacccgctactggtccaagcgcgccggctttatttccggctggaactactggttcaactacatcctcgtctcgatggtggagctatcagtggtgggttcgtttgtgaactactggttcccggcgattccgacatgggtatcggcggccgtgttcttggtgatcatctgcgccgccaacctgctgggcgtctctaaattcggtgagttcgagttctggttcgccatcatcaagattgtggccgtgatcgccatgattatcggcggcctggccgtcatcatctttgtcctgcccaccgcatccggcgtgcgcgcaagcttcgcgaactggttcaccgtgggtaacggcttcttcccgaacggcctgatggggcagaattccgacggttcctggaccggcctgctgatggcactggttgtggtgatgttcagcttcggcggcaccgagctcatcggcatcaccgccggcgaaaccgaggatccgaagaccacgattccgcgcgccaccaatgatattatttggcgaatcctcgtgttctacatcggcgctctgggtgtgatcatggccgtagtgccgtggaacaccatcgatggcaagtccagcccgttcgtgcagatcttcgattccgtgggcattcacgcggctgccggtattttgaacttcgtgtgcctgaccgctgtgatgagcgtctacaactccggcctgtacgccaactcccgcatgttgtactcgctggccaagcagggcaatgcgcccgcttacttgggcaagctcaactcgcgcggcgtgccagtggccggcgtgctgacgtccgccgcgatcaccgccatcgccgtggtcgtggtgttcgtgtggcctgagttcgcgttcaactacctgatgtcgattgccaccattgccggcatcatcaactggacgatgatcatgctcaccgaaatgaagttccgtaaggtggtcgccgcgggcggcgctcccgaggattccgagctggccggtctgagcggccaggaggcactggacgcgattcacttcaaactgccgtttgccaaggtgaccccgtgggtggtgctggcgttcctggcgctggtcgtggtgctgatgtgcttctccaccagctaccgcatcgccgtcatcgccggcgtgatctggctggccatcctcttcgccgcctaccagctcactcaggcgaagaagtaaggctccatttgcgaatagctctcactgatgagcactcagtgagagctattcgcaaatgggattcattcatgaaacagctcatcgatgccgacgagctgaacgtcggattgagacgccgcagcatcgtcgaccagtgattgatcgaaaccgccgagcgaaaacagcaggtatgttcgctggccgataccggttcgcgcagcacggtctcgcagtagattcagcacggaacggtccaccggcgcattgcggaatttgcactcgcccacaatggcagcatcagacgcattgtcaacggccatcacgtctatctcatcctgacgatcccaccaacggccaaccgcacgcgcacggaagggcaaccgtccagcagcactctcacgccacatccattcacggcacagaccctcgaacggtttgccggcaaaatcatgtaataccggcttgatatgacgctcgtatacgccttccacatcgccccgctccaattccgaacgatacggaaagacaaacgaataccagaatcggaagaaattgtcgctcagctgatacagcccacgcgaacctttcgcccgctccttaggcttcgccgtgactgggaactcacgttccacaatccccagttccataagattggcgagatacgacgatactgttgcgtttgccatcatcgtgtgtgtcgcgatctcattcagcgaagttgcgccgagcgcgatcgcccgtatcacgctgttatatttcgcagtttcccgcagttcttcgtgcaacaaaaattcaacctcgctgtatagcggagcaatgcgtctcagaatatgccgcttgacatttgcgtctatggtctcatctgggtcaaattcctctaggtaacgcgggataccgcccagtattgcgtaggccagcgccttatcctcgctactatagttggggaagaattgcgctgcatcccaatatggcatcggcagcatcttcaggatgccggtcgcacgaccatatagcggcgatttttctcccaacagctccttttcgatgaagctcatggcactgccgcaaatcacaatcatcagatttgcatgacgcaacgtgtggtcccaaagattctgtagcactgacggcaatgacggatcagatttgaccagataaggaaactcatcgaatatcacaagcctgcggccgccatcgctcggctctggcagccgggttaactcggttaacgccctttcccaagaaggatattgactcagataatccttgcccggggcacccgcctcgaacatgagacgggagaacgatgccagctgttcatctttagtggcattctgcgccgcgaagaataaggtttccttgtcttttgcgagttgaataagcgtctctgtttttcccacgcgcctgcggccgtagacgaacacaagctgtgccctacgctcagtgaaacattcctgcagttgcttgaggtcatcgtctcgtccgatgaatgccatgctgcccgcctcctttatgccatacgccggcgtatttctatcgtatcacgatttattgtatcacgattagtataatcgtgattatacaagctgtgacgaggtgcgggcacgggccaatcggcatcgacgagaccagccgcaggggccacaattacatcaccgtggtcgccgatctcgtggagcacgatgtcatcaacgtgacgccgggcaaggactcgaccacggtcgaacggttctcgcgtgatttcatggaccacaacggggtcccggaatatgtgcgtctggtcg

SEQ ID NO: 1868 - DNA, 12159 bp, Unknown
  MAG_14  MAG No. k141_62272
acatggtcgggctgatcgggcaggccggcgtcgagtgcggcgagctgttcgtcggtggggcgcacgccgccgggcagtgccggaatggcgggggcgttcggatcccacaggtagacgtggccgagctcatacagggacacgttttcgatgccgcggcgaatgttgcgctgcacggtggtggccagggtcggcagaatctcgcgacgcaggtacggacggtcgccgtagagcgggttggcgatctcgacgctgaccttcttggtggcttccgggtcgaagccgaaggccttgtaatcgtcgtcgcccacgaacgggtagctcagcgattcgaccatgccgaactcggcgagctcgtccgccacgcgacggcgacgctgctggtccggggtcaggcccaccagaccctcgaccggtgccggcggcacggtgatcggaatctggtcgtagccgaccagtcgggcgatttcctcgaccaggtcgcacggctcgttcaagtccggacgccagctcggcgcggttacggcgaactcgccgttgccgccgccggccaccgtgcagccaatgtcggtcaggatgtcggagatgcggttgatgtccacgtcgaggccggccacgcgggccacttcggaggccttgaagtggatgaccttggcgcgcggcgtgttgttcacgtcgttcgggtgttcgctgggctcgccgttgccgtacttggccatgagctcggcggccatctgggtggcggcgggctgcagcgcggtgtcgacgccacgttcgaagcggcgggaggcctcggatggaatcttgtggcgacgggccgaacgggcgatggtcacctgatcgaagtgcgctgcctccagaagaatgttcttggtgtcagcggtcacttcgccatacaggccgcccatcacaccggcaaggccgaggatgcgcgagccgcgttcgccgttcggcgaatcggtgataagcagatcttcgacgctcaggtcatgttccttgccgtccagggtggtgagtttctcaccctcgttggcgcggcgcacgacaatcgggccttcgagcttgtcgaggtcgtaggcgtgcatcggctggccgaggtcaagcatcacgtagttggtcacgtccacggccaaggagatggagcgcatgccggcgcgaatcaggcggcggcgcatccagttgggcgtgtgggcgttgggattgaagtccttgacgatacgcgcgtagtagcggtcgcaaccgggcacgccgtgaatcggattgttatcgtcgatttcaacatcgatgtccaccggggtgccgggctggtagtcagcaggttccggggccttctcgttcagtgccacggccggatcggtgtaggcggcaccggtggagtggtggtattcgcgggccacgccacggtaggacagcgtgtagccacggtccggggtgatgttgatctcaagcagaggctggtcgaggtgcagcaggtgcatggcgtcctgaccaggcttcagagcctcatattcagcctcggagaagccgtactgacgcagcagaatgatgccattgtggttgtcgcccagacccagctcacgttcggaggcacacatgccgttggagatgtggccgtaggtcttgcgcggctcgatcttgaagtcgccgggcagcacggcaccgggcagggtgacgacgaccttttcgccggccttcatgttgggtgcgccgcagatgatgccgcgcggcaccttgttgccgtcttcgtcggtctcgttccattcgtcgccgcagtccacgtggcaccagttgatggtcttgccgttcttctgcggttcgggggtggcgtcgaccacgtagccgaccacaatcgggccggtcacctgggaggagtggatctcctcttcctcaagacccaccttgacaaggtccttggcgagctgttcgtaggtcaggccttcgggaacctcgacatggtccttgagccaatcgatatcgatcataggcatggctgaatcactcccccatcacaaactgttcggcgaaacgcacgtcaccttcgaccaggtcgtgcatgtcgttgatgtcgctgcgcagcaggagcgtgcgctccatgccgacgccgaaggcgaaaccggtgtagacgtccgggtcgatgccggcggacttcagcacgttcgggttcaccatgccgcagccgccccactcgagccagccggggccgcccttcttgtcggggaaccacaggtcgagctcggcgctcggctcggtgaacgggaagtagctcgggcgcaggcgcgtcttggcttcagggccgaacatggcgacggcgagcttgtccagcacgcccttcaggtcggccatggtcaggtgcttgtcgacggcgagggcttcgcactggtggaagaccggagtatgggtggcgtccagctcatcggtgcggaacacacggccgggggacgcgatgtacagcggcacgccacgggtcaggagggcacggacctgatcggaggaggtctgcgtacgcaccaccatgttggagccgacgaaaccggcggcgtccttggcttgattgcccttgacgtagaacgtgtcctgcatttggcgggccggatgatccgggccgaagttcagggagtcgaagttgtaccattcggcttcgatttccggaccggaggagatctgccagcccatggagatgaagaagtcctcgacgtcttccatcagcttgggcagcgggtgacgggcgcccagaggcttgcggttcaccggcagcgtcatgtccacggtttcagcggcgagtgcggccttctcggcggcttccttgagctcgacttccttggggccataggcacggccgaagtcggcgcgcagcttgcccatgagcttgccggcttccttcttctggtcgacgggcagggagccaatggccttgctggccttggtcatcgccgaatcggcacctgcgtacgttgtcttgatggccttgagctcctccaggttggaggcgttctggattttctcgatgcccttggcaacctcagcggtcacctggtcggcgtcgaacaccatttgttctgccacgagaaccctttcgtctgatgatttctcagcgtttcatagcgtttttaccggtttcacattctttcaacatgacccgacatagacagcgacatcaacatcaccgcggccgaggtgccaaggttcagcgattcggccttgccgtacagcgggatggagacgatgcggccgcagcgtgtgaggatgtccggttccaagccacgcgcctcattgccgaacagcacggctttcggagcctcgaccgccgccttgtccgccagtactgcgggcaggctttccggcttgcattcttcggtgccgtatacgtcggcggcccagacgcccatattatggtcgcctgtccaggtgaagaattcgtcggtgctcatggcgagtaccggcagatggaacagggagcctgcggtggagcggatgaccttggggttcagcacgtccacgcagtcgtccacgaagattacggcgtcgcagccggccgcatcggccgcacggatcacggtgccggcgttgcccgggtcgcgcacctgccagaaggcggcgatctgcgggccccggccgttcttgccaagttcgacgtcatcggcaccggcgtgcatggactcggcattgccgacggccacgatgccctgggcgtccggactgatgcggtgcatcacgtcgccggtgcagtagtgcacataaatcgtggcatcctgcgaggtttcgacgatcttctccaacgtggaggagatgatacgcggatgttccaacgcctgcgaaacctccacatagaggtcctgcaccacgtccggccgccaagtgacggcctcgcgcacggattgcgggccttcgataagaaaacggcccgaacgttcgcggcctttggcgcgggtcagatcggcgatgcggcgaacgcggtcggatttcggattatcaagaatctgggcgttgatgggcatagccactaccctactgccgggtcattacgtcagtcgtggctcgctcccgctggcggagacatcgtaagcctgaaaggcactgtgccagtctgtcgcctttcagacaccttgaaaggcgaagtgccaattcccggtgccgatggctacgcctatggaggccagcgggacagccagacagatgacgtagaagatccagtcgataggcttcagacgcgagatacgggcttgggagcgtggggcgctggagccgaagccgcgcgcttccatggcggtggcaagtttggtggcgcgccggatggagagcaccagcagtccgaacgcttgggagagggcacgggcgatggcgttaccgtcgccaaggccgcgcgaacgctgggacaagccaagtgcgcgccaatcttcctgcagcagcgtaaacatgcgcaatccagccaacccgccgtatacgaatcgcggtgagaagtgcagaatctcaaccaaaccgtccgccaaatcagtgggatcgaggcccagggccaggatcacgccgggtacggcaatggccgccaccctgatagccgtggcgatggccagattaatggatccctcgctgatcacaatccagccaccctgccacaggatctcgcccgaggtacggccgtagagaaacacggagataaaactgccggcggcggcgatccataccggccaggtcttacggcatacggtccacggagccacgccaccaatccacagcagcacgaattcgatgccgagcgccgtggatgcggataccacatccagactgatgaacatcggaacgcacagcaacagcgcaccgatgatgcgactgaccgcgttgatgcgcgctatgaaccatgagggcgatgaggctttgaccggctccacgcgcgtttcctgcgggctgacggttaccacgtcactcatgcctcgcctcctcgaacatcacgcgtcgtgcgcccagcgcatccaccagcgcctcatcgtgcgtcaccatgaccacgcacgagccttggtcgcggatggcggcgatcagcttgaccatttcattccacgtactgaaatcctgtccgaatgtcggttcgtccatcaccaacactttgggtgcggcggccagcatggaggccacggacagtcgccgcttctccccgccagacaaggtatacgggttggctttggcgaagcgcgtgagattcatctgctcaagcatgcggtcggcggtccgataagcctcgtcttggctctgccccatcgacttggggccgatggcgacttcgtcacgcacgaaattggcagcgaactggtgttcgggctcctggaacaccatgccgatacggcccagcagttccttgcttttccagtcaatcggctcacgcccggcatgcgcgggcttgaggttgtcggcgatgagcaccttgccggcgataggctcgagcagcccggccaaggtcagggccaaggtcgatttgcccgcgccgttcggacccatcagagccgttacttcgccgggatagaaattcagattgatgccaacgccaagagcggttccacggccaaagcttaagttctcagtgctgagcaccggcgcatcgtgcgcaggctcctgcttcggcgagtaatcgggaatcgcacggcccggcacccacgcgccaccggcggccaacacgtcgcccatctcggcgaacacctcgtccggcttgccgtcggcgatgaccgcgcccgtgggcgaacttgcatcgggtcggccgagcacaatcacgcgatcgaccagatcgagccatacatcgatatgatgttcgaccacaaccatggtctgcccggtggcctcgatgacctttttgaccgcgtcatgcacttcgaccacgccttcggggtcgaggttggcggtcggttcgtccaacaacagcagaccgggcttcatagccagcacgccggccaacgcgagacgttggcgctgaccgccggacagatggcgggtggaccgatccagttcgagtccgccgagtcccaccatatccaatgattcgcgcactcgctgccgaatctcctcgcgcggcacgttgaggttttcgcagccgaaggccgcgtcatcgcccagtcgttcaagaatgatctgcgagtccgggtcctgaagcaccagtcccacgcggcctcgcgcctcgcgcgcatcgacgccatcgatggtgagcgagccctcctgctcgccttcctcatcgccgccaagtacgcctgcgagaccggccatcatcgtgcttttgcccgcccccgaagcaccgagcagcaacacacgttcacctggccggatggtgaaatcgacggcacgcaacgcgaagtccttacgcgtggcgtgccgccatccccagccgctggcctctaccgcagccggattaacctgcatcagacgcgcgccttgctgcggccggattcaaagcgttccagagcgccggtggcggcgagcgcacgagacaagtaccagaccaccacgccggcgatcacgacgccggagatgatggagccaaccagataccaagtgacgcgcaggccgttccagcccgggttggtggcccagtagtaggcccagcagcccacgccggcgagcgcaccggacaggatggtggtgccgatgttccacttcttccaggcgaagacggcgaaggcgatttcggcacccagaccctggaggatgccgacgatcagcgagccgccgacgccccactggttgcccagcgtaagctcgaggaaggcggcgagggtttcggcaaacagtgcggcaccgggcttgcgcacgatgattgcggcgagcgggccggcgaacagccagaatccgttgagcagaccttcgaaaccgggggtcacgccctcgaacagggccagcggggcggagcagacaatgtcccagccccagaaaatgacgccggatgcgacggcgatgattgcggcgacgacgatatcgacgacgcgccacttgtaattggctttggccacagcttcagtcatgaatgtgcctttcttctgctcgtacgcaggccgaacatacatggatatatgtacgcacatgatgcacatgttcgtggccacgcgcgggttggttcaggcacgggtgggtaagagcgacatttccgtgcgccggcattatccggtcacgttccatcggtcgagactatgaatctcctctcagccgcctaacggcagctcccgtgtcaactccccgactataaagcaagccgccgtcaaaggcaatagccacatccgtgacctacctgacggcagctcgccaccattaccgatgcggttcggttacttgccgagcttgtccagcagcaaagcctcggtgatcacgttgttcttgaggccgggcagggagatggactcattggggctgtgggcgttggccttcgggtcttcggggccggtgaccagcacctgagcgttggggaaaatgcgctgcagttcggggatgaacggaatggagccgccctcgcccttgttgatgggctcaacgccgaaggcctcggtcatggcttccagcgcgtctttggtggccacggcggtcgggtccatggcccagcccatgccgttttcgccgcgttcgacagtgaccttggcaccgaacggcgcgtgggattcgaggaatgcagccagtgcttcctgcgcttcttcagggcgctgggtgggcgcggtgcgcagcgacagacggaagcgggtctccggggcgatcacgttgaaggatccctcgaccgggtgggcgtcgaagccgatcacggtcacggacggcttggtccacaggcgtgaggccagcgaaccggtgccggcgaactcgtaaccggccaccacgccggaatcctcgcgcacggtggtttcgtcaaggtcgcgttgcaaaccgccgattggctcttccgcggccacgccgggcacggccagatcgccgttctcgtcgtacatggaagcgatgagcatggcggccaacgtgttggagtcaagaatcgggccgccgtactgaccggagtgcaccgggtgctcaaggccctgcacggtcacgtccacgcaggtgttgccgcgcagcgaggtggtcaaagaaggaatgtccgccgaccagttgccggaatcggccacgataatcacgtcggcggcgaattcgtcgcggtgagcctcgatgaagggaatgaagcttggcgagcccatctcctcttcgccttcgatgaacactttgatattgacgttgaggtcgtcgcccaaagccttcagcgcaccggagtggatggcgatgccgccgccgtcatcggcggagccacggccgtaaagacggccgtcgatttcggtggccacgaacgggtcggtgttccactcggccgggtccggaacaggctgcacatcgtgatgggcgtagagcagcacggtgggggcgtccggagaaacgatatgcgagccgatgacctcccatgcgcccggagtgccgtcggcattggaagcctggaccaccttggcatccacacccacgaggcgcagttcgtctgccacgaattcagcggagcgcttcatatgttcggcggtgatgcccttggcggaaatcgactgcagcgcaaccttttcggccagcaccttgacgatgcggttccaatcggtttcgacgcgcgaacgaatctcgtcagcggtgagcgttgccatgatggtcctcctttatatgtgtgtgagcggcgtcattgcaatggctgcgccagtatataagtgtctgaacgtcaccgtaacctcaaagcatgacatggaatccgtttaggaaaaaagaagaggcccaagttcccgttgagcaggccccgaagaagaccgccgatccttctgagaaaaaaggccgtcctaccccgaagatgaagcaggctcaggccgccggtatccgtccgctggttccggtggaccgcaaggccagcgccaaggccgccaaagcccgtctgcgtgagaaggagaacgccgagtacgaggcgatgcagaagggcgatatcaaccacatgcccaaggcggaacgcctgccttggcgtatctacatccgtgattatgtggatgcccgtttcaaccttggcgaatggttcatcccggtggccttcgcgattctgatcgtctccatgttcgtcacttctttgatgcagaaccagtgggcttccatcatcatgatggcgcttatgtacggttacctgattgccgtgatcatcgacgtatggctgatgtggcgcaagctcaaggccaagctcatcgccaagtacggcgaacagtccgtgtccaagggctcccgctccttctcctacgcttggagccgttcgattcagatgcgtcgttggaggcttcccaagccgcgttacccgaagcgcggtcactggccggcagactgatgtccatatatactctggctcccctcgttgaggggctgagccgtaaagaaaacagtccagtggactgtttttaggcgaagtggcggcgatagccgcatatggctccctagcatgggagccatacttatatgcaccaaggaggcaatcatgagcgaacagtttgatctggtcatcatcggggccggccccggcggctattccacagccctgcgcgccgccgaactcggcatgaaagtggcactcgtcgagcgtgacgccaccgtgggcggcacctgtctcaaccgtggctgcatcccctccaaggcgctcatcaccgccacccacaccatcgacaccgtgcaccgtgcggccgaactcggcgtcaacgcctcggtgaatggcatcgacttcggcacgctgcgcgactatcgcctgcgcgtggtcaagacgatggtgggaggactggccggactgctggcccatcgcggcatcaccgtgttccgagccaatgccgcgttccatgcggatgagatcgctccagcaacttccaaccacatcgtccacctcgttccctcccccgaccaaagcgacatcctcacctatcacaaggccgatgtccccgaacccagcggccccacgatggacctcacggccacgaacatcgtcatcgccaccggtgccaagccacacccattgcccggtaacccgttcgccggcgccctcatcgactccacacaggcgctggaagtcaacgaatttccctcttcggcggtgattatcggcgccggggccatcgcccttgaattcgcctcgatgtggaacgccgccggttcgaaggtgaccctgctgattcgcaaggaccgcgtgctctcagcctgggaccggagagccggcaccacgctgacccgtgagctcaaacgtcatggcgtgaacatcatcacccgcgccagcgtcacccatgtggacaccggcgcgaaccttggtgccaccgtgcactacacgcgcgaaggccaggacggcgaacagagcgtttggggcgaaatcgcccttgtcgccatcgggcgtgacccgatcaccgacccagcatggggcgtgacgattgatgaccacggacatgtcgccacggatgcgtacggtcgcaccgacaaaccgggcgtatgggcggtgggcgacgtgacggccggtcacgcactggcgcatcgtgcttttgagcaaggcatcgtcatcgcggagaccatcgccggactcaatcccaagccggtggacgaagccgctgtgccgcagatcgtgttctccttccccgaagcggcgtcggtcgggctcaccgtcgaacaggcgcaggcgagagaggacctcgtcgaaatcaaggagaccaactatccgatgctggcgaacgcgcgcatgctgatgagcggcacggccggctcattgaccatcgtctccggctgcgacgcggccaacccggacaccccgcgcgtgctcggcgtgcacatggtctccccgatggcctccgacatcatcgccgaagccgaacagctggtcggcaaccatgtgccgctcgccgacgcagcccgcctcgttcacccgcatcccacattcagtgaaacgctcggcgaggcgctgctcaaggccgacggacgaccgttgcacacacgctgagaccaaccagcacaagcaagttcggaccagcgcacctgataagatattgcccagtgtgtttcgtcccaacaaaggaagaagtgatggcggaaaaggacgcgaagccgaagaagcagagcacaatcaagcagatcatccagatctacaagtacacggctaaggaagacaaggccctgccgtggcttgaggccggtgctttcctgctgcctgtagtcgtgatgatcatcatcggtctgattgtcaagtggacctggctgacctggatcttcaccatgattaccgccatcatgctcggcattctgctggccaccatgatgctcacccgccgcgcggatgcagtcggctacaagcagattgatggcaagcctggtgccgccatcggcgtgctgagcaacatgcagaaagccggctttgacttcccgcaggaaccggtgtggatcgacccgaagaccaaggatgccatctggcgcggcacttcgatgaacggcatctacctgatcggcgaaggcgaatacggtcgcgtcatgaaggcgatggatcgtcaggaacgcgatatcaagggcgtcaccgccggctcctccattccgatataccgcatcgccgtgggccacggccccaagcaggtgccgctgaccaagctgcgtagcacggtgatcaagtccaagagctatgagcccacggaccacaagaacgcactgatcgccaagattcatccgcgccgtcgcttcctgctgaccaaggccgagatggaaacgctgaacgatcgtctgcgcacgctgcaggccaagaagggctatgccatccccaagggcatggatccgaaccgcccgcagaagatctcccgccgcgcgatgcgcggtcgctgatcggcagcacacaaccaaatcgcacagaagccccggaatccgttcaatcggttccggggcttcgtcatatgtctcataatcgcgtccacttacatccacctacgtcacctgtcaatacccactgtccacgttgcggacatctctacctactcccccgatagtctccgtttccattctgtaatgatgtttcgttgaaataacgcgcctgcgcgattgtcggccacagtcacgaaacattctcgtaacccaagtggcgagtgagcgaaacgcacgttcctagactaa

SEQ ID NO: 1869 - DNA, 7457 bp, Unknown
  MAG_14  MAG No. k141_62660
atcagttcttaataactgcctgcgcctcatcaccggcggcctcgacggcctccacgacctgcgcctcatcgtcgacgatctcgccggaagcgagcttggcttcgagctcctcaacgatctgcgcatgcatcttctcatcgatcttgaccttgaaccagaacacgacgaggctgaggatgatgagaacaagcgggacgtagaaggcgaaggtcttgaacgtggcgatgttggacgcggtcatgtcggctgccgtggcatgaccggtcatgccagccgcgagggcaacggcaccgaccgcaccgttggacatcgcgccgccgatcttgtcgagcatgggacgcaccgacaaggtgaccgcctcgttgcgcctgccgttcttcagctggccgtactcgatggagtcggtcagcgacagaatcgcggtcatctggatgaactgcgcaggcacatagaagaagatcagggcgacgatgacgaccggcaggttgctggagaacagggcgagcatcgtgtagccgataatcatggagaccatgccgccggtgaacaggtagcgacggggaatccagcggttgagaatcgggtacagcggcgccatgatgaatccggcgatcagcgggatgatgccggtgatggagaaggcggcaggctcgtcaagcacgaacacgaagaggtagtacatcacaccggtcgtgatgacgtttgcgatggcgtacagcaggtaggacagggcgacccacagcagctggtcgttctggaacagcgccttgaacgcctcgaacgggttgccgttcttctgggccttggcacgcagcgcgctggtgctttccttggtgccaaaggcgacggtccaggcggtaatcaggccgaggagcgcgacgatgaagccgaaggaggtccatccggcctggccctggcccttggcgccggtgaacgtccaggtgaagtagctgacgatcgggatgacgatgacggtgatgccgttgtagccgatagagccggtgaaggtgccaagggcggtgtaggtggaacgttcgtgggagtcggaggacaacgccgggatcatgccccagtaggagatgtcacgcagggagtagaacacgtcaagcacgatgaacgtgatgacgaacagcacgatgaacagcgtggtgttcacgttgaccagtccgaacatgccggagaagatgagcacgatcaacacggaggagaccagtccgccgatgaactgccacgggcggaaacggccccacttggtggtggtgttgtccacgaggttgcccagcagcggatcgatgaagatctcggcgatgcggataacgacgatcaggccggtgatgacggcgatcatttgggcggcgagagccttgctgtagctgacgaacaggcagctggtgacgtacgtgacgaagtacgtgctcattgcgttgtagaaggcagcctgccccaagttgccgcacgcgtaggcgatgcgctggccgagcccgcccttcctgcggacgtcaccgtccgcgacattttcgttgctcattaatcttctccttaagaacccagagcatggatttatctatctattagataatcacttgccgacaggtgacacgccgccggttccggccccactgccggaaccgacatgggtatgttcatgaccgccgaccgcaggaacgaacaggcccgtccgccacggaccgcatcttgcggttcaggcggacgggccttatgggagggatgggaacgggagatcagttcttaataactgcctgcgcctcatcaccggcggcctcgacggcctccacgacctgcgcctcatcgtcgacgatctcgccggaagcgagcttggcttcgagctcgtcaacgatctgcgcgtgcatcttctcggtgatcttgaccttggagacgaacaccaccaggctgagcacgatcaggatgagcggggcatagaacgcgcagatcttgaagacgtggatattcgtcggggtcatatcggcggcggttgcgtcacccgtcatgccggccgcaagggcgatgaagccgacgatgccgttcgacagagcgccaccaatcttatcgagcatcgggcggatggaaagcgtaacggcctcgttgcgcttgccgttcttcagctggccgtactcgatggagtcggtcagggagaggatgaccgtcatcatgatgagcgtgccgggaacgtagaagagcaccagcgcgatgaagaccaggacgatgttgctggagaacagggcgagcatcacataagccacgatcatggagaccatgccgccgatgtacaggtagcggcgcggaatgtacctgttcagaatcgggtacagcggggacatgaccaggcccgcgatcatggcgatgacaccggtcgcggagaaagcggcctgattgtcaaggacgaacttgaacaggaagagaagcacaccggtggtggtcacgttcgcgatggcgtacagcaggtaggacagggcgacccacagcagctggtcgttctggaacacggccttgaacgcctgcaacggaccaccgttgtcttcggcgttggcgcgaagggcgctttggttttccctggtgccgaaggcgacggtccaggcggtcatgatgccgagcaccgcgacgatgatgccgaaagcggtccaacccgactggtgctcggcgttctcgccggtgaacacccagctgaaataggtgacgaccggaatcacgaggatggtgatggcgttgccgccgatggagccggtgaaggagccgagggcagtgtaggtggaacgttcgtgggagtcggaggacaatgccgggatcatgccccagtaggagatgtcacgcagggagtagaacacgtcaagcacgatgaacgtgatgacgaacacgacgatgaacaatgtggagttaacgttcaccaggccaaacatgccgctgaaaaccacggcaagcagcacggaggagaccagtccgccgaagaactgccacgggcggaaacggccccacttggtggtggtgttgtccacgaggttgcccagcaacggatcgacgaagatctcggcgatgcggatgatcaccacgaggctggtgatgacgccgatcagcttggccgcaagcgccttgtcaacgcccgagaacaggcagctggtgacatacacgatgaagtacgtgctcatcgcgttgtagaaggcggcctgaccgaggttgccgaacgcgtaggcgatgcgctggcctaacccactcttcctgcggacgtcaccgtccgcggcattttcgttgctcattaatcttctccttaagaacccagagcatggaatcactcattgattttgtaaagtaagcatacaagttttatcaccgaaagtaaaaagcattagtaaacaaggagataaacagcgtgtcgcaaggatgggataacatgggctgaaccgagacattgcatggacgcggcgtagcgtcgacggcaagcagtgccagtgatttggaagcggtaaacaggatttgcgttttatataaaaactgtttattcttttcggtaaaggaggccccgacctcctccataatatcattcacaacgaggtaatgacagaaagcaggagagcatgacagacgtcacacatgtcgatcgcgcatcgcaggcttggctgaccgacccgacggtgttcgaggtgaaccggactccggcccattccagccacaagtggtacgcccgcgacccccagagcggacaatggtccgatctcaagcagagccttgacggcgagtggcgggtcgaggtcgttcaggccgccgacatcaacctcgaagaggaacccgcgacggccgagtcgttcgacgactcctcgttcgagcgtatccaggttccgggccacctgcagacggccggtctgatgaaccacaagtacgtgaacgtccagtatccgtgggacggccacgagaacccgttggaaccgaacatcccggagaacaatcacgtcgcgctctaccgcaggaagttcaccgtctccgcccccgtggcaaacgccaagcaggccggcggatcggtgtcgatcgtgttccacggcatggccacggcgatctacgtgtgggtcaacggcgcgttcgtcggctatggcgaggacggcttcacgcccaatgagttcgacatcaccgaactgctgcacgacggggagaacgtcgtggccgtcgcctgctacgaatactccagcgcctcctggcttgaggatcaggacttctggcgtctgcacggcctgttccgctccgtcgaactcgccgcccgcccgcacgtgcacatcgagaacacgcaaatcgaagccgattgggatcccgaggccggcaccgcttccctcgacgccgcgctgaccgtgctcaacgcggccgacgcggccacggtccgcgcgaccctgaaggacgccgacggcaacacggtgtggcagacgacgggcgacgcggaggcgcagaccgcgatctccagcggaccgctgcagggcatcgccccttggagcgccgaaagcccgacgctgtacgagcttgacgtcgacgtcatcgaccaggcgggcgacgtcatcgaatgcacgtcccagaaggtcggtttccgccgcttccgcatcgaggatggcatcctgaccatcaacggcaagcgcatcgtgttcaagggcgccgaccgccacgagttcgacgccgaacgcggccgcgccatcaccgagcaggacatgatcgatgacgtggtcttctgcaagcgccacaacatcaactccatccgcacctcgcactacccgaaccaggaacgctggtacgaactgtgcgacgagtacggcatctacctgatcgacgaagccaacctcgaagcccacggcagctggtccctgcccggagacgtcctcaccgaggacaccatcgtgccgggcagcaagcgcgaatgggaaggcgcctgcgtcgaccgcgtcaacagcatgatgcgccgtgactacaaccacccgagcgtgctgatctggtcactgggcaacgaatcctacgtgggtgacgtgttccgcgccatgtacaagcacgtgcacgacatcgacccgaaccgtccggtgcactacgagggcgtgacccacaaccgtgactacgatgacgtcaccgacatcgagacccgtatgtactcgcatgccgacgagatcgagaagtatctgaaggacgacccgaagaagccgtacctctcctgcgaatacatgcacgccatgggcaactccgtgggcaacatggacgaatacacggcgctcgaacgctacccgaagtatcagggcggcttcatctgggacttcatcgaccaggccatctacgccacccagcccgacggcaccaggagcctgcgctacggcggagacttcggcgaccgtccgtccgactacgagttctccggcgacggcctgctgttcgccgaccgcaagccgtcccccaaggcccaggaagtcaagcagctgtactcgaacgtccacatcgacgtgacgaaggactcggtgtccgtcaagaacgacaacctgttcaccgccaccggcgactacgtgttcgtcctgagcgttctcgccgacggcaagccggtctggcagtccacccggcatttcgacgtgcccgccggtgagacccgcacgttcgatgtcgcatggccggtggcggagtaccgcgccgacgcccgcgaactggtgctgcaggtttcgcagcgtctcgccaaggcgaccgattgggccgagagcggctacgagcttgctttcggacaggccgtggtgcccgcggacgccaccgcgacgcccgacacgaagccggccgatgggaccatcaccgtgggccgttggaacgccggcgtgcgaggcgccggacgcgaggtcctgctgtcgcgcacccagggcggcatggtctcctacaccttcgccggcaacgagttcgtgctgcgccgtcccgcaatcaccaccttccgtccgctgaccgacaacgatcgcggtgccggtcatggcttcgagcgcgtccagtggctgggcgccggccgctacgcccgctgcgtggacaacgtgctcgagcagatcgacgacagcacgctcaagggcacgtacacgtatgagctcgccaccgcgcagcgcaccaaggtgaccgtctcctacacggcccacaccgatggccgcgtgaacctgcacgtcgaataccctggagagcagggtgacctgcccaccatcccggcgttcggcatcgaatggacgctgcctgtgcagtacacgaacctgaggttcttcggcaccggcccggcggagacgtacctggaccgcaagcacgccaagctcggcgtgtggaacaccaacgccttcgccgatcatgcgccgtacctcatgccgcaggagacgggcaaccatgaggatgtgcgttgggccgagattaccgacgatcacggccacggcatgcgcgtcagccgcgccgatggtgccgcgccgttcgcggtaagcctgttgccgtactccagcttcatgcttgaggaggctcagcatcaggacgagctgccgaagccgaagcacatgttcctgcgcgtccttgccgcacagatgggcgttggcggcgatgattcctggatgtcgccggtgcacccccagtaccatatcccggcggacaagccgatcagcctcgatgtcgacctcgagctgatctgatcagaattgatccgatagtccaccgtgcaaacgatgtggcccccgacttcctcgcaggaagtcgggggccacatcgtttgcacggtccttgttagtccagcggatgcgccggatatcgatgcagatccaaacctagtcgttgtagagcatcaatgaataaagatgtcactcataagctatcaagagaatccagaacctttttgaattcatatgctcgacacgcaatgtatccagcgtcgtttataatgattcattgtgccttaatggcgcatcgggctatagcgcagtttggtagcgcgcctgctttgggagcaggatgataccaaaccagcaaaactatgaccctcgctgaggtctactgccgcttaggttttgggacttcggtaaaaactgaaaaatggcatccgttaacaatggttaacaatgaccgcagacctccgagtttgcggatgtttcagggcttgatcccttgggtgcctgaaggtacagagtgtcccactcggtgcgtatacttaaaaagttatgccgtaaggcatgaaaacgggctgtggcgcagtttggtagcgcgcttgctttgggagcaagacgtcgcaggttcaaatcctgtcagcccgacaatgaaagccctactcccacttgggatgtagggcttcttcttttttgctctgggggcgtttgctaacacaattccagtgttaacggattggctgaatccgttaacattttctgttaacgcagcttggtgcctgtaatccttgtgattccaatggtttcggtatgatcgatggatcgtcgcaa

SEQ ID NO: 1870 - DNA, 7470 bp, Unknown
  MAG_14  MAG No. k141_62747
acgaggggcgttaacatctcactgtttgtcacctgcgagtcgcgagatttcatcaacatgccccggtccgcatgtcaggcatggttcgggcccatgccggcacggcactatggtagtgactatgagcgaagatcatctcaccccatccgccaatccgcccgagctggtgccgatatcagctggatgattacgccgacttggatgcgttgcaggcacgtatagacacgctgttcgagagctaccggcattccctgtacgacgatcgccgttgggtgttcgatcatttgcgctatcaggacgcggcccgcaaggtggtgggcgtgggctcggtgggccagcgcgcgtggacgtcggtgtggatcgcgcgtgatatcgacgatccgatgatgattcagatgaaggaggccacgtattccgtgctcgagcattactgcggcgcgtcgccgtacgccacgcacggtgagcgcgtggttcaggggcagaagctgattcagaatacggccgatgtgctgttgggttggtcgagctttatggccgaggatggccgaccgcgcgactattacgtgcgccagttgtggaatggcaagggttcgattgatatcgacaatctcaacgcttcgggattgagcgatctgtcgcgcatgtgcgcatggtcgttggcgcatgcccacgcctgcaccggcgattcgatcgcgatcgccaattacatgggtggcaccgacgaattcgatcaggccattgcctcgttcgccgtcagctacgccgaacagaatgatgaagactacaccgtcttcaaaaagctcctcaaatccggcgaccttccttgctgagccgttaagcggacagcccagtgggctgtccgtaggcgaggcctgagtgaagcgatagctgagcaaaggtagcttaacagtctcgctaaggcgagtcctttgcctacttcgcgactgcgagcgcttcctggagcgtgaacgcacgtgcgtataacgacttgccgaggatggcggaatcgacgccgatctcggccagttccttgatggcgcgcaaatcgtccagcttggagataccaccggaggccgtgaccttggcgtcggtgcgttcggcgacttcacgcagcagttggatgttcgggccggacatcatgccgtccttggccacgtcggtgaccacgtaacgcgagcagcccacggagtcaaggaacttcatggtctcaaacaggtcgccgccttcgcgcgtccagccgcgcgccgccagtgtgtgaccgcgcacatccagaccaacagccacacggtcgccgtacttcttgatgaccgaagcggtccaatccgggttctccaaagcggcggtgccgatgttcactcgggcggcaccggcctcaagggccgcgtccaacgaagcgtcatcgcgcacgccgccggacagttcgatgttcacgcggtcgccaagctcatgaacgatttcacgcagctgatcgcgattgttgcccgtaccgaaagcggcatcaaggtcgaccaggtgaatccattcggcaccggcctcaacccaggtacgggcggcctcaaacggcgaaccgtaatcggtttcggaaccggattcgccttggcgcaggcgcacggccttgccatcgcgtacatcgacggcgggcagcagagtcaacgacataagaagagcctttcttcagttacttatacataatttgagctctctcgtcagaggggagcttcatgctttttacagcgtggcgatccagttcttgaggagctgggagccagcgtccccggacttttccgggtggaattgcgtggcggacagcgggccgtgttcgtaggcggccacgaaacgcgaccggccgtacgagcaccagctcacgcgttcgggcgcaccgctcagatcaatgtcgaagcgggacgtatccgccggcttcacttccatcgcggcgtaggagtgcacgaagtaaaaccgttcattctccacgccgttgagcagcaccgaatcgggggcggcctcgatcgtgtcccatcccatgtgaggcaccacgtcggcgtccagcaggttcaccgttccgccgatcagcccgatgcccgcggcatgggctccgtgctccagaccgtgttcgaacatgatctgctcgcccacgcacacgccaagcaccgggcggccggcgcggatgcgatcatagatcacacggtcgccgtcgaccttcttcagtccttccatgcatgcggcgaacgcgcccacgcccggcacgaccagaccgtcggcctccaacgactgccggtagtcggaggtgagggtggtgtcgacgccaagattggcgagcgcacgcaccatggaacgtacattgccgaaaccgtaatcgaaaacaaccgctgtggtcatattctctcctatcccctactggttggttggcgtctattcgatgcgggagccgcgtccgccacgcccacgcttggtatggttggcgagaatctgcatcgcctggtcatggtcgagtccagcggaatccaccacttcgaacccttgggtcttgagttggttcagggttacgatgccgagcatcaggtcctcgacgaagcgcggtgtggaggtgaacagcacgggcggcgcgaaactttgtccggcctctccctgcacgtacatggccacttcgagcttgtcggcacgattgactgcaagaatcacggccatgccggataccacggtggtcaggtccttggctgcggcttccgggccgtcgccgtccagattcttcagcaccgcgacggccccctgattggcaccgacgcatgcggcggagatgtccgacagctggcagaacgcggccaacagttcggcggaggcaagacgggtgacgatcagcgccaccttcgccttgttacccaacagtccagcgagttcgttgtcgaagccgagcgaggggtcgaccacgtcggccatggcctcattcaccgcatcagcgaccgacccggtgacgtcgtcggccataggctggccggaatcagcggaagccttatcagccgtatcatcattcgcgtcggaatcggacttcgctgaagcagcgtccgccgttttatcggcatcactggtatcactggcatcgccggatgccgaatcgtccgcgaattctttctcgaatccggcgagcgcggcctcaagctcctcgtcggagaagtgcgattcgtccggatcgaacttgtcgtcggccatcacagggctcccttggtgctgggcacgccgtctacacgcgggtcgatttccacggcgaagcgcagcgcacgggccagcgccttgaattcggcttcggcgatgtgatgcggatcacggccggcgagcacctgcatgtgcaggcagatgccggcgtggaaggcgatggattccatgacgtggcggaccagagagccggtgaagtggccgccgatcatgcagaattcgtagccttcgggctcgccgctgcacacgcagtacgggcggccggaaatgtcgaccacggccttggccagcgcctcgtcgagcggcacggtggcgtcggcgaagcggcggatgcctttcttgtcgccgagggcccgcttcagagcttcgccgaacacgatggccgtatcttccacggtgtggtgcacgtcgatgtcggtgtcgccgtgggcgtggatggtcaggtcgatcagcgaatgcttgccgagcgcggtcatcatatggttgtagaacggcacggatgtatcgatatcggttttgccggtgccgtcgaggttcagttcgaggtcgatgtgtgattcgctggtttcgcggacgatgtgcgcggttcttgccatcatgtctcctgtgtgattcgtcatattggattgcggcgggactcgaatcgcttcgggtctcgccgcaatcggaaagaaacgtcccttatgctgcttccactatacgaagcgcttcaacaagggcgttacggaaggtttccatctcctcgtcggtacccatgcacacgcgcagccaaccgtccggtccgaccacgcggatgagtacgccgcgcttcaggagctcgtcgaagatggcttcgcgcttgtcgaagtgcccgccgaacagcaggaagttcgagccggattcggccacttcaagcggctggtccttgtaggtctgttccttgagccatgcggcggtggcctcgcgggtttcgcgcagatgctcgacacggctcagctgttcatcggtgtgttcgaaggcggccagtgcggcggcctgggtcacggcggacaggtggtacggcatacgtacgatgcgcacgcagtcgatgatgcccttggatgcggctaggtagccgactcgcgcgccggcgaaggcaaaggccttgctcatggtgcggcttacggccaggttcgggtggtccttgatcaggctcacggcgctcggggtgccgggcttgcggaattccacgtacgcttcatcgatgacgagaatcgggtgcacgccctcacccgcgccggccacttcggcggtttcgcaggcggcgagaatacactcgatatcctccatcggcaacggggtgccggtcgggttgttcggactggtgagcagcaccatcgagggcttgacctcggcgatggcctcaagcaccttgtcgacgttcaacgtgaagtcggcgttgcggtgggcgagcttccaaccggtgaaggtgtcgcgagcgtactccgggtacatggagtacgtcgggtcggcaccgagtgcggtgcggcccgggccgccgaaagcctggaacagctggagcatgatctcgttggagccgttcgcgccccacagctcgtccacgtccagacgggtaccggattcacgggccaggtaatcggagaatgcctgacgcaattcaatgtgctcacggtccgggtatcggttgagtgtgggggcgatttcacgcacacgcttggcgatggtgtcgcatacggccgggtccggcgcatacgggttctcgttgacgttcaggcacaccggcacgtccagctggggagcgccgtacggctcctcaccgatcaggtcgttgcgcagcggcaggttttcgggaatcgagctcatcgcagaccggctcccttctcctgctcgcgcagggtggccttgtcatacggatccttgacgaagcgggagagcacgcactcgccgtgggcgggcaggtcctcggacaccgcgaaggcgttgatgcgggcggcgagagccttgaggccttcctcgtcgtattcgatgacttcgaccggcttcatgaacgtgtgcacgccgaggcctgcggcgaagcgggcggtgccgccggtgggcagcacgtggttggaaccggacatgtagtcgcccagcggcaccggggagtacgggccgcggaagatggcaccggcgttcttgatgcgcttgacgacagcatcggcatccttggtctgaatctcaaggtggtcggcggcgtaggcgttggccgcgtcgatggactggtcaagaccgtcggtcagcacgatggcagactgggtgccggacagcgacgtgtggacgcgctcggcgtgctcggtacgcggcacgcggtacttgaggttctcctgcaccttgtcggcaatctcggtggagtcggtgaacagcacggaaccggcgagctcatcatgctcggcctggccgatgaggtcggcggccaacaggctcgggttggcggtttcatcggcgatgatgccgatttcagtggggccggcgaccgcgtcgatgcccacgaatgcggagaccagtgacttggcggtggccacgaagatgttgcccgggccggtgatcttgtcaaccggatcgcacaggatgtcgccgtcctgcggctcgctgcccttggcgccgtatgcgaacatggcgatggcctgggcgccgccgaccgcgtatacctcgtcaacaccgaggatggcgcaggtggcgaggatggtcttgttcggcaggccttcctcattgtcgcgggcgggcggggtggcgatggccaacgattcgacgccggcggcctgggccggcacagcgttcatgatgacggacctcgggtagacggccttgccgccgggcacatacaggccgacgcgctgaatcggaatccagcgttcagccacgcgggcgccttcggcgaggtcggtgtagaagtccttcggcacctggttggcggccacggcgcgggcgcggcgcaccgattcctcgatggcggcgcgcacttcggagtcgagcgtggtcagggcgtccttgatcgcctcgaccggcacgcgcaggtttttcgggcgcacgtgatcgaacttctcctcgaagtcgcgcagggccgcggcaccgcgttccttgacatcgtccagaatcggacgcaccagatcggtggcttcggaagtgcccattgcagcacgcggcatcgcggcgagcagttcggcacgggacaggttctgaccacgcaggtcaatgattcgcatgatgttctcactcataacgccccatcgtaccaacgtgcggggcctaagcggcgaggaacgcccatgttcacccgtatcgtgagattatcgtgcgtgatgtggattcgtgatgcaggttattgacgcacgccaaatgcccgagcggtctcatcgataatcggcatgtcatgtacggcgacgtgactcacttcggaccatcgcggaccaatggctaattgctcaaccaaggcttgcactgcgtcgctactgccttgtgcttccagctcaaccgagccatcgcggcaattgcgcacccagccctgtacaccaagtcgacgtgcctgagtcaccgtaaaataacggaatcccacgccttgcaccagtccggtgaccgctatatgtttgcggaccaaattcgctgattgcctcatgatgctcagttcctaatccatcgttcgcagcatcgggtagaggctcaggaatcgccggtatgcgtcggcatatgtgcgtgcggtgtcaggattcggcttgtatacagtgcattcgcatactgattgcagcaggtctggtacattgaataccaacgaggccattgccactgctggcagaatatcggcattggcgaacacttcgatggggtgctccaacacatcggccagaatctggcaccacgcattttctctggctccgccgccaatcagggaaatctcgctgggtttggcgtcaaaactttccataccttgacgaatggagaaggccacgccctcaagcgcggcacgcatcatgtctgccttggtggtgtctggatcgaggcctacataggccccgcgaatattcgggttcattacggggaaccgctcccccaccagatatggcaggcacatcacaccgttggagccgggtttggatgtttcgataagctgatgtgcttccgcgtaatcgccatcagcgaatacgccggtaacccatttatgcacgtcaccggcgttgaggaatggcacggcattcacgaagacttcttccacaccaaatgccagattcgcagcaccgggcttgccggtga

SEQ ID NO: 1871 - DNA, 5239 bp, Unknown
  MAG_14  MAG No. k141_63058
aaacctatcttgcccgccaaatcgccgccgatatcgtcagcgacggcaagcgcggcgattggtccaagcttgatgatgaacagcgcagacgcatcggtttcgtccaatttcatcccagctacgactacacggatttcgtggagggcatccgccccaataccgaggagacggatgcgacgggaactcacggcttctccatccaggacggcatattcaagcgtttccttgacaaggctcgggacaacgtcgaacagtcccggctttccaaggaggaacggagggaaccatccgttcgggaacgtctggacgcctactttgattctcttgatttcgacgacaatcagttcagaatctcgactggtaagcctttccaagtaaccaacgtcaccgaacatcatgttcttgtgtacgctccccacggcatcaaacaggaattaagaatacgcgtccaagaccttctggcgcttatgcaatccagcacccctccaacaaatggtgaagacgtgcatcaaattctcgagcgaaagcgtcgacagcgggaggactcctatgcattcgccttgctacaggaaatccaaaagcacaagccttcgtcggcttcacgagcatccgaaaaggttcttcggaaacccttcgtgttcatcatcgacgagatcaaccgaggtgaaatctccaagatattcggcgagctgttcttctccatcgaccctggttatcgcggccctgccggcaatgtgaccacccagtacggtcatgagctgtatgtgccggacaatgtctatatcatcggcacgatgaacgacatcgatcgatccgtcgacacctttgatttcgcgatgcgccgacggttccgcttcatcgaggtcaaggccgaagacgggttggacatgcttgaagaacttggaggcttgtcggaggaagccgagagccgcttgacgaagctgaatgagaccatatcctcccccgatatcggtttgggttcggattaccatgtcggccctgcgtatttcctgaatctttccaaatccgaatccacggcgaaagcgttcgatgacctttggcgtgatttcctgcaaccgctattgcacgattacgtgcgcggcatgtataacgaaacagaaatcatggagaagctgaaagcggcatatgaagatgcttcggattcgccgcagccagcggaacggtcggtatgagtaccgtatcgatcaaagacaactcccgcattgaggcaaccacgctggctcccgtcaaggatatcgtcgcggctgtgtccgatcgttccatagcccggctttcgcaagaaggtctgctggtgttcccgcagtcgattcaggattctccggacttggacgaatgccagatggtattggaaaaggacagtggaggctaccgctcagggaatctgatggggtaccttggctatcaagacgaacagttggtcatcgattcacgttttgcctcatccgcaggggatttcttcctgcaatacatgaggtatcgtgtactgaatattcccaacctgtcaagcctgagtattcaatccgatttatcgacgagactgttccaattccatgtattcatgtttccatactgtttacggggagctttaagacaagggatttatcggacatacattcagcacaagtacaatgacagccacatccgtggaagaattgatattccacggcatatcaccactaatattcctttcaccggcaatatcgcatatgatgtgcgcgagcttactgcagacaatcctctcacacagctgattcgtcacacaatggaatatatagcccttcaaccgtacggttccacgctattaggcaatatccgcaaggaggtacgttacataatcgaatgtactccctcatatcgtcgcgcaaaccgcagcaccgttctggaatacaatctcagacatccggtcaatcatgcgtattttacgcaataccgcatgctgcaacaattatgcatcatcattcttagcaatcagcgtcacgcgttcaacggtcaggaaaaccgacttcatggcattctcttcgacggctcctggctatgggaggaatacgtcgattccctgattggcgatagcttcttccatccgcgaaacaaattgaaagaaggaaaacaacacctgttcgaaggtggcacaggccctatctatcctgatttcatcagccgttccaaacaacatcccatcattgcggacgccaagtacaagcctatatccaatattcacaaagaagattactggcagattctggcatatatgtaccggtttgattccaaactcggcatcttcctctaccccgatgcgaagcaaacctcacgcaaggagctgcacatgctgcaaggaacgacgttccacggagacgtcaaagcacgggaggacatcatcgtggccaaactcggactgtcgattcccgatacggccgtcgactatgccgatttcatatcccgcatgtcaccatgcgagaaagcgtttcgaaccggattgctcaacaccttcaacacgtattgacgccgtaagtcgaacattctattccacgcgcctgcatggcgcgggatgatgaggaagcggtacaagccgcgaggaaggagccgacatgttattgcgaccatcgattcgaatcgtcgttccccgacgagacacacgacatatctcgaacgcctaagacacccaatacgtatgaaacgtttggagctccccaagttcaagcatcggaacaggacgaccgcctgttcgtcatgttccatgggtacggcaatgacgagcgtgagatgatccgcatcatcgacgctgtctacgccgccgcgagtgctcgcgcatgggcgacgccgtcgtctccctgctcgactcccccatgttcgcaggccgccgcaagatcctcgtcgggttctcccagggcggctatatgtcgtatcgcatggtgctcgagaatccgcacgtgttcgacgcggcgatcctgatgagcccgtcgttcaagggcgaggagtcgacggacctcaccggtttcgactcccccacccgtttcctgctcttgtacggctcgcgggaccgcacgattccacctgcggaccagcagaccgcgcgtcgcgtgctcgaggccaccggccggctcgaataccgcgagtatcctggcatgggtcagccatcgtcgacgaggagatcggcgacatccgcgccttcctcggtctctagccggttccggacggaccgcccggttccgctcggtccgtccaccccgccatccgaccatccgtcacacacgtcacgcacccgtcaccgcccgcaatcggtgtcggcggcacgcgtcgccgccgtcacacgccgaggctgcgtccgatgacgccgaggaacgtttcggcaccggcacgcacgttctacggttgcacaggtttcccgaattgcgggtactccaggccgtgcaggtgatttcgacgtgaacggttcccgccgcgtagactgttttctccggactaggcgaacctcctgcgtcgcaccccgaatccgtccgcaacggctggcatcgccatgccggaccttgatccaatcacacccgcacggcatggcgcggtggcccttccggcgcgcgcttgcgccgacggaccgccgcaatgccgccccaaccgcacaggagcaccgccatgcacgcccatgcgccggcgctccggccgtcatgcagatcggtcggatcgggggcgggaacgggcatgctcacacggtggccggagaccaggagccgatgggagttgatgccgtatggcgtacaggtcatcagcgtcagccgatcctgcccgggaacgatgcgcagctgcgaggtatcggtcggttcgattacggtgatgcgatcgacttcgtaggccagggtcctgttcatcgttgagatgtagatgaaatcgccttcgcgcatttcatccaatctggtgaacatctgcgcctgcaccatgccgcgatggccggtgatgaccgcatgggtgtcgttgccgccgaccggcaggcttgtgccatacagatgcccggagccaagggacagttgcttgtctccggtgccgtggtagatgggaagatccactgagatcttcggtatggacacgcggcccatgatgccgtgaccttcgttgagcagcctgccgtagcgttgatcctgcgccgactgggaggacaggcgttccccgttactgaacgggtcggcctgggctcccagcaccggctgtccggatcggacgagattgcggttgtaggcacgcgccgcccgcagttcgtcgtcgatccggctttccggccacagtcgcacctgctgttcgacggaagacgccgacgcggacatggacgtctgcgacgcatactgcatcagcagcggaaccaccgtgcataccaccgccacggcgatcagaatccccgcgacggcgtacatcacacgcaatcgccgctgcatacgggcatgcgcccggtattctttggcaacgtcgaccagctgctcgaacgaaggtgccaccggcgtcattcggccctatgttcaggccgcgaagctacgcttcgttttgcgggcccgaacgatgatgatcgaagcaccgccgatgcacagcaccgccacgacgccaaggatggccatgcccatggcgccggtcagcggcaactgggtgatgcttttgatgttgcggtacgcgtaaccgttcgtaccattgctgagcagtccgctggcgggaatgctcatgtcggtgatcgactccaactggatcgtcccctggacgttcttcatcgtgaccttcagtttggccgcggagccggaccaatagccctctggcactttggtctccttgaggtaataggtgccgtcattcagcttgaagttgcggaaatcgacaagaccgccgttttcactggacgtggccttgacctcctcgcccatggcgtcgtgcagaacctgcgtgaagtgctcgtcggagtacacggtgaattcggcacccgccaaaccagccttgttgcttcccacaccgaccttggtgaacttgaagccaccgcgattggttgtcgtggaagtggtcttggcattcaagtcggaagtcagatccacgacgccattgttgttcgacacgttgcagccatcgggaagtgaggtgccgacgagcatattgttgaagccgtcataagcaatggttttgtctcccgtgtccttgatctgctgcttgggcgtcgtggcatcgaagatcacatacaggccgggaccgggcatgg

SEQ ID NO: 1872 - DNA, 3266 bp, Unknown
  MAG_14  MAG No. k141_64401
cgggttgtgacgcgcggtgtgcgcgagccgtctcgcacgtgttcattctttcgtttttcgcccgggtttcggtcggttccttgtgcggttcctctcggttgtggggtttgcgttcgcaaccgcccattcccgcgcttccgaaacttgagcctacaccactcaactttaaaccgcaagtgcatattcccggattcggcaaaaaacttgagcgattctcactcaggtttctgcgaagcgcggcacacggcacgtatcgcatcacagccaaaagccgccggaaaaccatcgcccgccgggcatcggctcggcgggcgatcgttttccggcggctggacgactcgggattaccggtcggccaaggccgaatcagttgttcctggcgttacgcgcggccttgatgagcatcgcgatcgcaaccagcatcacagccgcgatggcgatggccatgacggcggtaccggtggcgcccagcgggccggagaccgcggaatcgttcggcaccttgcccgaagcgatcacgccgttcttgtcggcgcccggcttcttgtcggcggagccggcggccggcgcctggatggcgacggtcgcgaccttgccggactggcgaccggtgacggtgagcgtgtactcggcgccttccgacatcttgtcgagcgcgatcgaagtggtctgcgcgggcttgacacgcacgccggacaacggggtgctggaatcggacttggacaccacggcgccgttcttgtccttcagctcgtagctgagcagcgcgtcgccgttgaaaccgtcgacattggcgacgtacttgccggcctgcgtgcgggcgaccttcacggtgccgtccttggagagcgcgttctgctcgtcgggggaggtggccaggcccagggcgccggcgatggtgtagaagttatcggtctgatcggtcaggccgatgacgcgctgggcgccggggccggaagcggcgatgcgcagctgggtgccggtgtgctccatgtcgccgccgttgtagccgccttcggcgtcggtggaggcttcctgggcggtgccgtaggagacgaccatgttgttgccgtcggcggacttgagcacggtggacagcgcgtaagccggctgggcgttgaggacctgggaggtgtgcgcatgatcggcggtgacgatcaccagcgtgttcgtgaggtccacgttcttgatggcgtaggcgatggcctggtcgaagtcgtcggtctcgccgatctggccgcaggcgttggcggcgtggtcctgcttatcgatcgaagcgccttcgacctgcaggaggaagccgttcttctggccgttcgggttggcgttgagcagatcgagcgccttcttggtcatgtccttgagcgaggcgccacggttgccgagccaggcgtcattcggggtgcacacggtcgggttggcgtccttggccggatccttggcggtggccttggacgggttgaacttggtcggcatgttgccgtcgctcatcagggcgagcaccggctggccatccttgtactgcagggcgttcatcgcggccgggtcgttctcaacggtctggaagcccatgtccttggcctgctcccacacggtcttgcccttgtattcgccgccctgcacggtctggcggaaatacttggagccaccgccgatggtcacatcggcgcgggtgtcgagcagctgctcggagatggagccgatgccgccgttctccttgagctggttggcgaggcactgcttggaggcgttgttggaagtgccgtcggtcttgccctgcgggccgtagcaggcacgctcggtggagtgcgattccagcacggccggggtggcgtcctggatttccgcggtggacacgttgccggtggccttgccggcggccttggcaagctcgaagagattcagctgcgggttgccgtagatgtcgacatccacggcgttgttgtaggtcttggtgccggtcgcccatgcggaaccggacgcggaggaatcggtgacgggggtgagcttgcccgggttggggttggcgaccagcttgccggcgccatccttgccgacggcgctgtccttgctgccgtcgccgagcgagaaggtcgtgtactggccggtgcccgcctgcacgtcgtcaagcgcgccgggctgaccgaccgcgtccagaccatcgaagtggccgttggcgcctttcagatagtcgcgggcgacggtgatttccgaatcgcccatgccgtcgccgatgaacagcacgacgttcttcgcgctcttgttgccgatggcggcgatgcgctgcgcggcgccgtgcttggcgagctcggcgaccgacttgccgttggggctgtaggtgccgtttgcggcatcgacagcaaacgccggagcggcgagcgcgccgagcgtcgcgatggaggcgaccgccgcgacggcgctcttcaaagccttgtgattgcccattgttcttccttcttccatgcagtgtcatctgcgccgtccggcccgcacttctccggccgcacccgtttggccacgtccgtcgtcgtcatgccttccagcttcgcggaaccgttccgcacctgcattgcttggatctttcgattccggatttcacggtaggcctcacaagccaacgtccggataccgccggaagaacgccgggtgaacattcttcgtcgaatcggccgaggcatcatcgccgcatgaaccggcaagccatacacgatccgcacctggcagtacatgttctcgaaaatccgccccgaattccccgaggcggcgttcgtcgccgaatgtgggccgaccgaacgaatcaatgcaggccggattcgacatggacttctacctcgactggcgctgggacggccacccgacgctctccccgcagtcgttcgtcgtgctcggataacccgctaattgcccaactcaccgaatgtattgcaatcgttgtcaatatgagttacggtaaagacagaacagctcgaacattggtctgtcagattgccggaacctcaacgcagagcggccctcgaacagcaatgcaaacgactagcagtacccgatctgcaagcaaggagtcatcatgactgacgcgtacggcaacgacgcagcgaccagcaccggcaccatcgcagacaccaccaacgacgccgcttccggtgccccgcagcgcgcggaaagcgcggaacgactcgcccgtccgctggtcaagctggccaaagcatgcgggctttccacctcgttcatcgaccagctcggcacctacaccgaaatcagcgacg

SEQ ID NO: 1873 - DNA, 10662 bp, Unknown
  MAG_14  MAG No. k141_65371
gtgccgggagggccgtacagcagcacaccgcgcgggatgcgcgcacccagcgccttgtacttggacggatccttgaggaagtccttgatctcctcgacttcggccacggcctcgtcttcaccggccacatcggcgaacttggtggtgggggtctgcccgtcgagcagtttgccgctgttcttcctgccgcccatgccgagcatgccgccggcaccacccatgcggctcatcaggaaccagaacagggcgaagaagatgacgaacggcaggatcgaggtgatgaggtagctcatcatgctggtctgctcgatattcgaggtccagcccttttcgagatcaccgttctccacggccttggccacctgtgcgccctgcgcgaaggtgtagtagaactgcacgttcttgccgtagttggtcaccttgccggtgtcggcgtttttcttggtgtagtcgttcttcagcttaaggcggacgacctgcttgttgtccgtgatctcggcgtaggtggccttgccctgattgatcagcgcgaaaccatctttggtgtcaatggtcttcgtgccaccgccggcgaacatctggaacatcagcacgaccatgaccacgagcacggcaccccacagccagggggactgccatatcgggcggttctcgttgttgttgcctttgccattgttcccgttattgccacggttgaacgggttggtgaacgggttgccgttgttacggttgttgttcgggttcggattattgccgttacccggcccttgcgggaagctcatgcttgcactccttggtagacggacggcttgaggaccgcgatcgaatcgaggttgcggtagcgttcgtcaaagtcgaggccgaagccgacgacgaactcgtccggaatctcatagccggcgtacttcacatcaacgtccacttctcggcgggaaggcttgctcagcaaagcgaagacctccacggaagcggcaccacgacgtttcagttctgcgaccagccacgcgagcgtgcgtcctgaatcaacaatatcctccacaatcaaaatgtgccgtccgcgaacatcggcggacaaatcctgcctgactgtgacctcaccgctcgacactgtgcccgagccatagctcgaaaggctcatgaagtcgatctgcacaggaatgctcatggcctgggtgaacgcgaccagcgtattcacggcccctttcagcaccgcaacgagcagcggattcttatcgcggtaatcctcgctcgcgagagtggccatctcgtggatcttggcatcgatctgttctttgctgaccagctcgtggtcaatatcttcctcaacgtcagcgattcgcatgcgctccatcttggcacacgcgaatgacgtgtttcttgcgattggctgaataacctctgggaagtgatacgccgccttggccatgccaatcgacgaccagccggtcgatggcggcaatctgggcggcactggcgttcacaccggcctggctcagcgcgtgagcgatgacccgcaaccgaatcgcctctggctcacgtgcaatacgtttgacgccgatcatcaggccgatgccatggcccgaatcgttggtatcgtctgcagcacaggctcgtggcgtatcggtcgataccgctgccgacgatgccggccggtcaactgccgtaaccgcctcccccatcacctcgtcggatcgctgatccagatactccttgtccattctggccagctgtgcgctttcggcgaaatggcgggtgacattgaatccagcgaatcgttcgatggccggcagcaggtcgtggcgtacccgcgagcgcaacggatagtcgtccggcaactcgccgtctaccgcatcgccattggtggggtcatcccaatattccacacccaagtcttcacagaggccggtggtttcgtctcgagtaagggtcagcagcggccgcgcaaaagtcacgccactgcgtgtgaagacctgcggcatgccggccaacgcatccacgccacggctgcgcagcagtccgatcaatacggtttccgcctgatcgtccatagtgtgggccaacagcacggcaatggcacctgattcacgcgccgcggtgcacagctcgttgtaccgggcctgccgtgcggccgcttcgaggccctcaccgcgtgcctgcacggttgtgttgcgcacgatgaccgggcccagtcccaacgcacggcaacgatccgcggcctcgccggcgacctgttcggaaccctcctgcaagccgtgatccacaatcacgacaccgcaacgcacgcccatggacgtgcatacgatatggcttaccgcggccagcgccatcgaatcgcgcccgcctgaacaggccacgagcacgagtggtgcatcggaggcaacggcatggtccccatgctgcgcgaattcgggagcctgcacatcgcatagttccacggcgctcagcgttgttcggaccgcgcctacggccttgcgcaatcgtgcggaatatgccatgtactcaccacccttttctggttataggcactcgtgcgtttatggacgtttacggcctttgtagcccttgatggcccttgatgcctcttttacagccccgcgagcttggtgatgaacgagtcgatggcgctacgcgcggcggcataatcctcaggattgttgaccaccacggcaaacgacaacgctcccccattggtacgggacacattgccggccatcgacgtgaccgtgccgaggctgccggttttgacgcgcagcagaccggccacggcatcatccgtataccgatcctgcgccgtgcccaccaaccccgcgatggatagaccttccgcaccagcagcaccgctctcggtggtcagattacgttgttggacggccgccagcgtgcgtacggtgagccgggagccgggagacaggccggagcaatcggccatggtcagaccggatgtatcgagaccgagatcgttcagagtggatttgaccgcttccgtgccgccttcaggactgtttgtcgctgatttcgccaaagcggtgagtctgccgaactcctcggccagcgtattgtccgaatgtcgcaacgtgtatgccatgatttcggacagtgttgccgaactcaccgaggccaaaggcgtttcgccggatggagcggtgtttgccgtcacgtctccggtaacggccacaccgttcgattggagcagttcggcgaatttcgtggccacgtcgctggcggtgtgctgggacagttccgggtatccggccgaatcatcagggtcggccggcgcaggcgtatcggcggtgtattggcggcctccatcaatcgccattgatgagaccggcgtgaagtagacggtgtagtcgcttaagaccgcgccgccttccgacagacctgcgggaatgcgtgagtcgccgaatagggtgtcgtcgtactcgagattgacggaagtgatgcctcgctgggcgagcgcggccacggtggccttggccaaggtgttcagaccggcacgtccgttggtatggtttgcgtcggaatcgcctgcagacagcagcatgtcgccattgcctttgagggtcaacgtattggtgccgtcatcggattgggtcaggaacacttgggtatccaaggtggatgccatgttcagggtggatgaggcggcgagcgcggtcagcgttttcagtgtggatgcaggctcgcgtggagtgttcgactcgtgttcggcggcgacggtgccttgggcgtcttcaatgatcaccgacgtatcgtttcccacgccttgcgcggacagcaattcgttgaccagtgcagaagcggccgtggaatcaatggccttgttcgcgttcagggcaccggcgatggtgccgcctgatttggcggtggccggattggcgaaaacaggtgcggtgacaggttttaacgtcaacaatccgggggccacgtcggtgatgtcggcggcgcagtaccccgcgaacagggcgatggtggtcagtgcggaaatgatgacggtcagtgttcggcgatgcgatcgttgggtccgccgttgcgcttcacgtcgctgacggcgtgataccgctgtagataccatcgtgctccttatgccaaggcaatcatttctgcaatgaggcgaacgagtcgagtgttgccacaatcgagagcattcgcgcatccatcagcttaccgcccagccatgtcccgagtgccagaatgccgatgccattggccagcgcgaccggaataatcgccagccacatgccgccttcggctcctgtcagcagcatgaccagcgccacgatgccagtgggcagcatgagcagcaggctgccaagcatgtagacgaacgggaagaagccttgggccatggcgcggccttgaggcgcggagaacggcttgtccattgaggcgaccgggtacatcagtacacaggaggtgacttcggccacgcccagtccgctcaaggcgatgcccatgcccgtggcgaggaagatcaggccggtagcgaggtcatcgggctgcgcccagcgtccggtcagtgcgccgaccagcacgatgccggcgagatagagcagcaccatgtagacgaccatgatgccgacgtagacgcgtacgcggccgattctgtcggcccggccacgcacgccggcgatgacttccatggtgaagccgcggccgtcatatgcgagcccgttgctttccacgacggacatgaaccagccgcaccagatcagcgactgccagacgaccgcgctgatgccgtgtgcctggaaggcgaagatgatcaggaacaggaccggcatggcgaaggtcatggcttggcgggggtctcgtttgagataggtgatcaggcgtgcggaaaccgcgccggatgccgaatcgggcatccatgcgaatgcgccgatgcctttggcggtctcggacggactgtttgcgccgatggtgagccgttcatgtctcagacaccaggtgcagacggcgaagcagacaatccatgtgacggcaaggatggcgatgcgggcgagcagcaccgcccaggctccggtaagcgcgtcgaacggtagttggaaggccgcgccgaacggcgtccatgcgacgatggtggtcgccgcgccccaggtttcggtgttgaggctgaaggccacgccggagttgaccagaatgttcggcaactgacagatgataacgaacgtcagcacgatgaagatatagaacgcgcctttgccgcgtttgctggtcaccagcgtggtggatagggcgatgagcagtttggagatgctcatcatggtgatgacggccagcactgcggcgaggagggaactgatgattacggctggtcccatatgccgataggccagtgtccagagcatcagtgaggccacgccggtaagggcggggatgccggacaggccggaaagcagcaagccgaattgcaggttgcggtcggcgatgccgtagagcgcgaatttgcgtgggttcatggtggagccttcgccaagcatcatgagctggatgaagccgatgaagatggtcatggtcgcgccgaccagcacgacgactatgttgacgatgcctccggaaccaaggatgttcagcggaaagccatccgcgttcacggtgaagggcggcagtatgccgatgaaccatgcgagcacgccggtgccgatgatggtgccggccgcgagtacggcggaaaagacataggcgacggtctgccacgccgattttcgcagggtggcgagcgtgagcgtccagcgcaggcggaccagggtgatggcgctgctgatcatcggcgggcctcatcggtgggtgtggcgggcgtggcggttgtaagcggaatgggctggaccggctggaccgaagttggtgcttgggcttgggcttgcccgccgtcgagccatgcgagatgggcggcttcgtggcggccgccgaccagttgcaggaagcggtcttcgagttcttcgccggcggcgacctcgtccaccgtgccggccgcgcacaccagaccgttgttgattacggccacatgcgtgcacatcttttcgaccaatgccatcacgtgcgaagagataatcaccgtgccgccggtcttcgcgtattcgatgaggatgtctttgaggttggcgctggacaccgggtccacggattcaaacggctcgtccaggaccagaatgcgcgggctatgaatcatcgcggaggccaggcagatcttcttggtcatgccggccgaataatcggtgaccatcgtgttggcggccccggccaagtcgaaagcattgagcaggtcctgggcgcgacgcgtggtctcatcgcggctcatgccgcgcagcatgccggagtagacgagcaattgcaaaccggtcagtcggtctaagatctggtcgggctggggcatgacgccgatcatgcgcttggccgtgttcacgtcgctccacacgtcatggcccaaaatcatggcggtgccggcgtccggtaccaatagaccggtcaccatattgagcgtggtggttttgccggcgccgttggggcctacaagtccatagaacgagccgaccggaatatcgagcgcgagtccgttgacggcgatcttccggtcgaagtgcttgaacaggccacgaatggacaccgccgcattcggattcggcggccatgcttgtggctgcggttgcgacggctgtgcaggcgcgggggcggcagctggcatcatcggcggctgaaatccgacattcctttgagtattgtctaagctcatacatccactctaccccaccagccaaccctcagcgaagcaaacccccgggttgctgttggattgccccgctgagcagctccaactagcggactcggtcaacccttatgcgcgatgggcttccactgggctttggagaagagggcctggaaggagatcggcacgtagctgagaatgtaaatcgggaagctgagcacataggcgagcagctccttgttcgtggcaccgatctggtcgcgctcgacaatgatggtcaatgcagccaatgccatcaggcccaacaccgatatgatgatgccactggaccaactggccagcgattgcagctggctcggccaactcacgaagccacacgcggcgaacagcaagcccattaccgcgcgaatcacgcccaacacggtaaacggacacagcatcaatgtgaagtcgatgcaggagaaatcacgttcgcgaaccgcgcgtttcagcaatgccgagccataataacggaatacctgcaggaatcccttgctccaacgcaaacgctgacgccaactttgcgagaaggtaaccggctgctcgtcgtagagaatcgcagtaccgcaatagccgatgcggtcgccatgcagaatcgaatccatagtgaattcaagatcttcagtgagcagatggaacttccatcccttgttccgcttcatcacctcgcgggagaacatgaatcccgtaccgcccacatggcaagaggaaccgagaatcatacgcgagttagacaggaatcgcgattcacggatgaaccacagcgcagaaccagaagacacccagttatccgccagattcaccgaattacggtagctggtcagaatcttgaatccggagcagaacgccttgttcatttcctcgaagtagtgcttgtccagcttgttatcggcatcgaacacgaagtaggcctcataatcatcggccacaccgatgtcgagcatatgccccaacagatacgtcagcgcatatcccttgccaaccagctcaagattgtggcgttccaccacatggcagcccaaagaccgcaccacgtcggcggtgttgtcggtgcagttgtcggccaccagccagatgtcgatgaggttggacgggtaggtctgatcgcgaatcgacccaataaggttgccgatcactttttcttcgttgcgcgcggagatcagcacggcataccggttggtcatcggggcgtcggggaagcgcacgggcttggcgaacagggacatcacgatgcacagtccctgatatatcatgccggcaccgccgacgatcatcagaagaatatcgagtacggaaagcagagtcatcagcgccaccctgccctaggattgctggaggcagattgatcagactgcttggtttgcttgcgttgctcgggctgctcaggctgttcggcggaccgctcaggctgctcgggctgctcagactgctgcgtatccgcggcaccacgctgcggaatcgccgccgtatccggctcagtgccgcgtaatcccttgcgagcgctggaggatagcacgttcttcggaatcgccacggtggcggaatcgtccaaatcggattctttcgtctcgtgcgacggaatcgcataaatctgttcctgcagcaaacgcagttcctcattcatcggcacgcggttggtggatcccctggccgcacgcggcatgtgctcgccgattggctgcaatacgtgctcgccgaacgcctcggacgcctcgacgatcttggacttcttctccggagtcggatcgttcatcagcggtgagtcaatcagctcatagcgcttggtgtacgcacggaagatggcctgcagcgatgcggtgaccggcagcgccaggaacgcgccgaatgcgccgaacagcgagccgaacgccagcaccgagaggaaggcgacggccgcgttgatatccatcgtgcgctgcgaaatcctcggcgagagaatcaggttctcgatctgctggtagacgatgatgaacaccagcaccgccacggcgtacgtccacccgcggttgccccaagcgaacagcaccggcagcgcaccgccgatataggtgccgaccgtggggatgaactgggataccacgccgcagaacagggccaacggcagccagtagggcacatgcaggatctccaagaagatggcggtgcaggtggcgttgatcagcgccagaatcgaacgggagaacaggaaggacgaaatctggccttgggccacggtccacaccagcaggaatcgacgctgcgtgttgggggccagccactggcagaaggagcggcgcagctttgggccggcggcggagatgtaatacgtggtcattaccacggtcatgaggttcagcaggaaggagaacaggccacccaccgtactcatggcggtgccggcgaaatcggtgacccacgaggtctggatattgttgaagatttccatgccaagattgctgatttccggcatcttgaacgtggcgtgctggtccacgaactcacgaatctgcccatacattgccggcaaaccgcggaccatggcaatcatctgctgtacaaacatattgccgaacagcgtgagcagcacacccacgaccacggccacgcccaccagactgacggcggaagccacgccacgcttccagccatgagccaccagcgccaccaccagcggttcgacggccagcgccaggaacagcgagatgatgatgtcgaacaccagataggagatgtcgccccacgagcgccagcagaacatgaatacgatgacggcgagggccacatacagcagcgcgcggccgaaccattccggtggcctgcgggaatctcccttggcggggaacaaagtaccaaagtcgatacgattctcgtcgtccgggtctgccccggcttctgcggcaccgcttctcgacgtgtcggtgctgtttatgtttcgcgcgcgttcgctcatggctccccattgtagcgaggggtttgaagctcggatacgccggcggcgtacacccgcttttctattgttgatgttatgctcaacgtttcgatcatcatcccagcgtggaacgaagccgaacgcatccgcgactgtctgctgaacgccactcgccagaccatcatgccgcatgaggtgctggtggtggacaatcgttctacggacaacacctgcgcgattgtcgaacagttcatcgccgaacatcccgagaccccggtcaaactgttgcaccagaacgatgaacaggggctgattcccacccgcaactttggcctgaacgccgcgaccggcgatgtgctgggccgttttgacgccgactgtatgatccggcctgactgggtggaggtggtctccggcatcttcaccgaagacccggccgcgatgggtgccactggtccggtgatgtattacgacatgccctcacgtcatttcgggttgaaaggcgacaattccttacgcaagcgaatctaccgtgccgatggcggccagccgctgctgttcggctcgaatatggccttgcgcgcttcggcctggcatcagatcgcgaatgaggtctgccgagataaggccgatgtgatgcacgaggatatcgatatttccctgcatctgatgggcaagaatctgaaaaccgtgtactcgccgcgcatgatcgccgcgatgagcgcgcgacggatggacacgtcgctgagttcattcctgaactacatgcgacgttttaagaatacgtttgatgcgcatccgcaacatacgcgcacgcataagccggaggtgttgttcaccgccatgtatccggcgatgcatatgttctacccggtgtggcagaaagtgctgaattccgcggatatcaatcctgctgaagccgcgtggatcaacgagcagatgaaactggcggaggcgcaaggcaagcagctgtacgacgagacccccaccgacgaagtctacgacgaaa

SEQ ID NO: 1874 - DNA, 5860 bp, Unknown
  MAG_14  MAG No. k141_65403
acgtcacgttttcaagaatggttttgttggcgaacaggttgaacgactggaacaccatgccaacttcggccctgaggttcgcgagctccttgccttcctgtggcaggggcttgccgtcgatgcggatgtcgccggaatcgatggtctcgaggcgattgatggtgcggcacatcgtggacttgcctgagccggacgggcccacgaccaccagcacctcacccttggtgacggtcaggttgatgtccttcaggacgtgcaaagcaccgaagtgcttttcgacgtgggtcagttcgactagcggacggttcaggtcctctttgccgggaaccagcggggtcaatttggccttgcttggtgatgttgtgcttgtcgtgcgcgaacgcactgctgtttcattgttcgtttcagacatgagtgggaggataacacaccgacgtttccaacgtgttcacagtatatccacacagttgctcagtcgatgtctcatttccgcatcagacatcgtgaaggcggcattgggcatcggcatacattctcgctgagtcgcgcatcgctcggcgtctgctgtgcgctgattgcctgctgcgtggtggctgagacgttgctgcgacggcaaagcgggcacgtgttgtcctatctgctgattccatgtttggccttggtgtcgttggcgttgctgccgtgtatgccgcagtcgggcgcatggctggcggtcactttgtattgtgtggggctggtctcgccgtttcccatgtcgtattcgtataaatgtactaggcattttgagcgtggctagctgttcgcacacgatgagtgctgttatacggtggacgacactcccgaagcgcggtggataaccgggcgcggcacacgatatgccggtggataaccggctcgcgccgcttaagttatccccatttttcggttttgcccctgtgccaccgtggaatgcgctacgctcggcgcatgaacggatacaacgaagcgccgcacaatggcgaaatcaacaactatctgcgcaaagatcttgacgccaaagccacggccaagaacacggcctgttggaatctgctgggcaaagtgcgcacgaaacgcacgttgtgtttctcgctgtataccgcattggaattatgcggcgtggagttgccgaggcacagcacgttgccgcagaaggatttttatgtgacggtgaggagcaaggggacccgctcttcattggacaatgtcgactatcgcatatggaatgcaaagttcagcagtatcgctttttcaaacggcgtaacctgcatgcatcccatggatgcgtggatacagtttgcccaatatctcaacctcactgaattagtggtgctggctgaagcgctcatcagacgttatggatatgccattgaacaattcactcaacgactaacggcctttcaccgcgttattggccgtgcgcgttgtgaggcggcgctgaagctcgtaaaaccatcggattccgttcaggaaactcgtacacgcttggcgcttatgcttttcggcctgcccataccgcaaacacaatacggcattaccgattcagagaacggatacacctataccgttgacatggcttatccacaatacaaagtcgctattgaatatgatggcgatcatcaccgtcgcttccgcaaacaatatgtgcgggaccagcaaaaacgtcgacgtctgcggcaattgggctggaccgtcatcgaggtgttcgccgatgacctgtggagtaccgccaaacaacgtgccttcgcacaagaggttgccaccgcgatgcaaataccgcttcctggccgtcctcaaccttcatgccgggtattaatagacggcagccttaccatcaatgcgcgcaaaggggaatacaggaggcggaaacaagcaaaacacaacaaagcctcacaacattgatcaaatacggagttgcgattacttctcatggggcggcaattcccccatgaggcggtaatttgcccatggggcggtttgaagaaattgtgaaaccgcggaattaagccattttgacctaccgccccatggggttttcaccgccccatgggttgtttaccgccccatgagaaagttaccgccccatgggggggataatcggcaaacgccaagggggacaccgcatggtgcgaggtttgccgcatggcggaggtgccatcgggcggagtatttggcaccccttggcaggtatttggcacattgggccccacccgcaaaaagcaaatggcccttggaattattccaagggccatttgcggctaatagcaccggagcattactcctcgaaaattaatctacgcatgcggagaccgccgttcgaagccgaaggcgcactaaggtgcgtcgagtgctgaggaaaggcggtatacgctccgtagattagttttcgtcggcgtccgggtcgtagtcgacgccggtctcggcgcgctgctcgtcggagatcggggccggagcaccggtcagcgggtcgcggccgccgccggccttcgggaaggcgatgacgtcgcggatggagtcggcaccggccaggatggacacggtgcggtcccagccaagggccagacccgcgtgaggcggagcaccgtacttgaatgcctcaagcaggaagccgaacttctcgtcggcctcttccttggtgatgcccagcacatcgagcacacgggcttggatgtcgtcgcggtggatacgtacggaaccgccgcccatctcctcaccgttgcagacaatgtcgtaggaatcggacatggcgtgctcgggatccttgtcgaacttgtcgatccaatccttggagggcatggtgaacgggtggtgcatggaggtccacttggagtggccgacagccacatcgtcatcatccggatcgtcggtgggcttgaacagcgggaagtccacgacccaagtgaaagcgaacttcttcggatccagcaggccttcgcgggaggcgagctccacacgcacggcacccagcagcagctgggcggactcgcgagaaccggcggcgaagaagacggcgtcgccttcctcggcaccgacggcctcgcgcaggccgttgcgctcctcatcggacaggttcttggcgacggggcccttgagttcgccgttttcgccgaagaccacgtaggcaaggcccttggctccacgctgacgagcccaatcctgccaagcgtcgaactgacgacgcggcgtggcggcaccgcccttgaacaccacggcacccacatacggggcctggaacacgcggaacggcgtgttcttgaagtactcggtcagttccaccagcgggttgccgaagcgcaggtccggcttgtcggagccgtacttgtccatcgcatccttccaggtgatgcgcggcagcggcagctggacctcatagccggcggacttccagatggcggcgatgaccttctcagtcatggccatcacatcttcctggtccacgtaggccatctccatatcgagctgagtgaactcgggctgacggtcggcgcggaagtcctcatcacggtagcagcgggcgagctggtagtaacgctcgacaccggagaccatgagcagctgcttgaggagctgcggggactgcggcagggcgtaccaggaaccgggcaccagacgggccggcaccacgaagtcgcgggcgccttccggggtggacttaatgaaggtcggggtctcgacctcggtgaagtccatgtcttccagcgcgtggcgggcggccttagccatgtcggaacgcagcttcagattgtgctgcatggacggacggcgcaggtcgaggtaacggtacttcagacgcacgtcctcgcccggcagcttgttctcggactcattctcaagagcggtggaaacctggaacggcagggcgtcggacttggcgaggatctcgatggtctcggccacaacctcgatcttgccggtggccagatgggtgttctcgttgccatccgggcgcaggcgcacttcgccggtaatctgaatcacgaattcactgcgcagcgggcgggccatatcctcgtcgtaaatgacgacctgcacgaggccggtcgaatcacgaaggtcgatgaaggccacgccaccgtgatcacggcgtcggtcaacccaaccggcgagggtgaccttctggccgaccagggcctcggtcacttcagtggcatgatgtgttctgtaagccgtctggctcattatcttgtttctcctcgatttttcgcgcgaatacgtcagatttcgacggtttgctgggcaaccacagtatccggctcccacgacgtgcaatcggcggcaacctgctcgcccgtgacgatgttcttgacctcgtcgccagcgggctctgcaccttccgcaccttcggcagcggtggccgggaaccacacgtacggaatgccgagtttgtccgcgtacttgatctgcttgccgagcttggccgcggtgggtgccacgtcggtggcgatgccgcgcgcacgcagttggttcgcaatacggttggcggccgggcggtcctcttcattccacacagcgaccagcacggcggccgggctgacgcggttggcgtgcgcgccggcagcgtgcagcatgtagctgaccagtcggctcaggccgatggacaggcccacgcccgggtacttgcggttgccctgggaggcgagattgtcgtaacggccaccggaacagatggaaccgagtgatgcggcaccgtcgaggaaggtctcgtagacggaaccggtgtagtagtcgagaccgcgggcgatcttcaggtcggcgatgacggaaccggggcggatggcggcggcctcgtcgacgatcatggccagggtatcaagtccctgacgagccagcgtgtatgcctcggaatccttggcgatgccgtgagactcgcacagcgcatcgaacttggcggcaagctcggcaccgtcggaggcggtgagctcggccaattcgaggcaggcgcgtgcctgtgcttcggtggcgccgcaggtctcggtgagcagtcgggccacctcatcggcaccgattttgtcgagcttgtcgatctcgcgcagcacgccctcgacgtccgtcaggccaaggccgcggtagaagccttcagacagcttgcggttattggcgtgcacggtggccttggggaggccatacgcgcgcagctcttccagcgcggagaccatgaccagcggcagttccacttcatagtggtcgggcaggtcgccggcgccgatcacgtcgatgtcggcctgcacgaactcgcggaagcggccttcctgcggacgctcgccacgccacaccttctgaatctgccagcgcttgaacgggaacgccaacgcacccgagtgctcgaccacataccggctcagcggcacggtcagatcgaaatgcaggcccaaccgctcttcaatcggagtgtcggattcatgaccgacctcctgcaaacggctcagcaggtagatctccttgctggtctcgccttttttcaacaaagaagcgccggtttccaccgctcgcgtctcaatgccgatgaagccgttgagctcaaaaaccttacgaagcgtatcgataacacgctgctccacaacacgttcggaggggagccactccgggaatcctgatattgatgcacctttagccacgaaatcaatataataggtgagggttgcgtcaaaacttcctggttcgcccgggatgggagacgctcccgcttatgcattctacgctttaaggagctggccatggccgacgaaactgtcaccgaacccgtaaacaccgctgcgcccgaagagcaggcaacgacacccgcacccgaagccagcgcggccacgccggcgccgactccgtcccccgcttccatgccgaaacc

SEQ ID NO: 1875 - DNA, 4971 bp, Unknown
  MAG_14  MAG No. k141_65549
gtgccggctcgtcgccatcattgcgggcattgatggtcacggtcatgccattttcgcccaattcgtaggtcacggtcacggtcacatcgaacgggtatccgtccaggttggggaagcgcagtgaaagcgtcacggcgctgtcggtgagcgattcgagcttccacatgtagtgataggcgtatccatggttcgcgttgttgcgcggagccgggtgatattcgttgaccggagcgcagtagtgcttgccattgaaatcgtattcgccgttttcgatgcggttcggccacggggccagcacataaccgttacaggtgggggtcaagtcgttgactccgaacgggcagaaaatttccttgccttgataatcgaatcggcgaatcttggcgccgagttcgcagatgacggcggaataatcgccatagtgaatcgaatactgatttccggtgcgtggtgttttactcgtcatggaatcactcccgtagtgaggttggtgggccggtagctcctgctatcgctggccccagtctagcgcgtctcctctatcgaggcggggattggcgatagccggcatataataaacaattcgtacagacacggtagcaatacgtggagtgacgagtctcacaccatcatgcgagaagcacgtggattccttggaaaccggtgattcgtgggagacgcggaaaagttgtgacggcagattcctgtaatccctgccttacactggaaaacactattgacgttcaggaggttccgatgaccaaaagcgttgtgctcgctgatccgcgaggcttctgcgcgggtgtggaccgtgcgattcttaccgtacagaccattctcaaagccgcggaggcttccggaaagcgaacgcgcgaggatgggctgcccccggtatatgtgcgccggcagatcgtgcacaacaagcatgtggtcgaggatttggccgggcaaggcgcggtgttcgtccaggaattggcggagattccggatgctgctgcccaagcgggtattccggtggtgttttccgcccatggcgtatctccggtagtgaaggcggaagccgaacgtcgtggcatgcatgtggtggatgccacctgccctctggtgggtaaggtgcaccgtgaggtgctgcgtttcgtgcgcgaggggtatgaaatcgtctatatcgggcacaagggccacgatgaagcagtcggcgtggtgggggagaaccccgaacatgtgcacttgatcgagcatgaatcggatgtcgattcgttggattttgcgcccgacaccaagctggtgctgctctcgcagaccacgttgagcgtggatgagaccgccggcaccattgccgcgctgaaggccaagttcccgtggattcaagagccgccgagttcggatatctgctatgccacatcgaatcgtcaggctgcggtcaaactggtggcccagcagtccgattgcgtggtgattgtcggatcggccaactcctcgaattccgtgcgactgatggaggtggcgcaggagggcttggggaagcgcggcaaagcgtatcgcgtggatgatgccagcgagcttgatccggcgtggttcgtcggactggagtccgtgggggtctcctcaggtgcctccgtgccggacgaactggtgtccggtgtgattgacgctctgcaaaacttgggtttcaccggtatgaagtccgtcgaaaccatcaaggaaaacatgcacttcgtgctgccgtcggagttgcgcaggaagaagtagtcatccttggctcccctcaccgagggaagccaagaacggtcaccacgtgccgattggtgcggcaacggcgttcaagaccttgagcaggtcctgcgggttcacgcctacggacagtccgcgtttgccgccggagaccagaatctggtcgaattgcagggcgctttcatccaacacagtcttatgacgtgtcttctggcccaacggcgagatgccacctaccacatagccggattcacgcattgccaccttgggatcggccatagaggccttcttggcacctacagccgcagccagggccttcaaatccatatgtccgctgaccggtaccacgcccaccacacgctccgaaccggtgtccgccatcaacgtcttgaacacctgatgctcgtcgaagccgagcttggtggccgcctccacgccgtagccgtcatccatatggtcgttggagtgctcgtattcgtatacgtggaattccacgcccgccttctccagttggactgtcgccggggtggaacccgcgcccttatcatgcttgcttttctttgccatgattaccgttctactacgaagagacccccgcacaaggcgggggtctcacagcttagttctcaaacgaaccgtagcggcctagaccgcagtggttcactcggagatctcagcgaagtacagcagggtacggatcatgttggaggtgaagccgtactcgttgtcgtagaaggacacggtgcgagccagggtcacgccgtcaatggtgttgacgtcggtctgggtcgggtcgaacacgccaccgtgggtgtcgccgaggatgtcggaggagacgatgccctcatcgttgtagccgtagtaatcggtgtcggagaaggcagccttgaaggcttcgttgatctcgtcggcggtggtctcggtgttcagaacggtggtcagctcggtgacggagccgtccggaacctggacgcgctgggcatggccctgcagcttgccgttcacggacggaacgaccttgccgatggccttggcagcgccggtggagtgggcgatggtgttgatggcggcggcgcgcaggttgcggccggtcttggtgccacgcgggccatcgagcagcatctgggtgccggtgtaggcgtggatggtggtcatgaagccggccttgatgccgaacttctcgtccagcagcttgaccatggcggccatggagttggtggtgcaggaaccggcggagacgatcacgtcggaagccttgaggatgtcgtggttcacgccgaacacaacggtcggggtggtgtcatccttggccggggcggagatcaggaccttcttggcgccagcgttgatgtgagcctgggacttctcggcggaggtgtagaagccggtgcactcgagcacgtactcgacaccgtcgttcttgacccacggaatgttgttggcgtccttctcggcgtagaccttgtattccttgccgtcgacgatgatggagtcttcggtggccttgacgtcaaccggagtgccatcgtcatgacggaaggtgccgtgggtgctgtcgtacttcagcaggtaagccaaggtagccggggtggtcagatcgttgatggcggcaacttcaatgtcaccagcctggccgccgcgagcctgcagctcgaagatgcgacggaaggcgagacgaccaatgcgaccgaagccgttgataccaatcttaactgtcatgtaattctcccttgtagggtggccttggcgcgctttggcacaccgggccattgtttaccaacagttgctactgtaatgccgactctgtacacatggcaacgtttcagcgtgcgttttgggtaaaaatgccgtattttttgtgagcgctcacaatttggattgcccgcaaccgacatgtgattttcctctcctttggaggaatgtctcgaatcatcacgagcaagcgcgcggcatgcaagtcagcgaaccagcagcttggacacttcggtgtccagctcgccgatatcgccgccgaattcatggaatctgctcacctgtggcaacgccacttcgatggggaaggtgacgatcagtgtgccgcgtttcacgctgatggccgcgtccacgccgtcgcggaactcgttgctgaccccctgcaccaccgtattggtcagcgtgtcgttcttgagctcatatttcagccccggttcgttcacgccaagcgaaacatcggagtgggagaacgccgacaccatgcggccgtcctcgggcaccggatgcgcggggaacgaaagcctaccatcggtgatggccgtgacgatgagcccgtcgccatacagatacccgcttgccccgtgtcgggccagcagcgccatcagttgaatgccggaaatcgtatggtcaatacggccgccaagcccgccgtacacgtgaaactcgcggcaacccgccgaccagccgaccttcagcgcggaaagcatgtccgggtcgtccttcaacgcgggcagcgcgatggtgcgcacatcggtgcggggcggccggccctccagcgaatcgaagtcgcccaccaccacatcgggcacgatgcccaactcgcgcgtatggtcgagtccgccatcggccgcaatcacatacgcaccggtgggaaccacgggcgtgcccgcatagtattcgcccgcaccaaaaatcacgcatacctgagtcattatgcctactgtagccggtatccacccatcgacacacggtccgcgaatgtccgggcatgtggtaagattcctatttggcttgagaaatcaagaaagcggggcaaccccacctggaagcctttcaaggcctcgggttcaaggcaaacagcctagcgattgcgatatacaacgcgcaatcaggaatgacgcaaagaactgatatgcgtctgcagaagctgagcgcatattggcgctggttttggcttgccatgaacccaaagcattgaacaggactccagcaaaggccccgccacggaattgaagtagaggattggagtcatcatcagcgacgaaccacgtattaacgacgagattcgcgtcccgcaggtacgcctgatcggcccgaagggcgagcaggtgggcgtcatcgcgacttccgtcgcgctgaacctggccaaggaggcaaacctcgatctcgtcgaggtggccccgaacgcgaagcctccggtcgccaagctcattgattacggcaagttcaagtacaacgagaagatcaaggctcgtgaagctcgccgca

SEQ ID NO: 1876 - DNA, 8640 bp, Unknown
  MAG_14  MAG No. k141_65627
gcgagatcggcgaagcaggccgtcccgcggtgctggatgtcgatggcgccttgcgcacggatggcgtcggtcaggtcttccgagggttggctgaacggctgttggcagtgtgagcctgcgcagcctcacacttttgtaggcggcgctggcgtttaagtccggctcgctgctggtgggcgaatcgcttgaccacagcacccgcgacctggtggtcgaggcagtggagcgcactgccggcgtggataggctgcattaacctgcaggccattcacatggacgaggacgccgtgccgcgctgccttggtatgaatgggggatctacgtcgagcccgatgtctggcgggcacctcgcggtaaatagcggcatagcgcattatcggtgcgatgctaagaggtaatggcccatgagcggttccaatcggcgagattgcgttgccgggacaccacgacatgggccatctcgataaaacgatgccgcgtgtcggctgttctcaggtcatccgcagtgacgagaatggcgatccagccgagcagttgcaatgcgtttcgctttgccgcgtcaattcgcatttgtgccggatcggcgtgataggctccctgatattcgaacgcgacgcggcagtccggatatgccatatccaatatgacgtatgagttgccgatattcacgcgatagttggcggtggggcatcccaagcccgaatccttcagcatcccaaacagcgtgttttccggcggagaatccgtgttctctgtcatgtagggcagtgcctcgtggcatttgttacgacctatgaaccgcggactgatttccaagtaagtatcgaaatccttgcgagtggccattctgcgccgtttatcgcggctcatcaaagaggctccaatggccgcaagttcctccaatgtggagtattgggccatctgagcccacatcatgaccggcgaggcaatccagaaatgttcatagtcctttttgcggatatccagttttcccttaaacacatggaagaccacgcctttgattcgtctgcgtttgttggcactggaaacacaggcgtgcacggcatcaacagatagcgtgcaatgtcgggggatgggcgcgccgtagtagttggccgcattgatgtatcccaccagcaatggaccttttgaacggcgcgcagcatcattgcaacgttcacgttctgctcggcgtcggccgacaatatcctcatgcataaaagagctcatgatgcgaccgtaaagctgatttggacttgaatgcaagccaggcagggcaatgtggttccagcttatggagttatccacattgtctatttgcgcagagaacggttctcagtagtatctgtgcgctcaaatgaacaagaacataacaatctcacatcatcgcaaatggcgacatggcagtgattagggcatatcccatgtgcgcttcgggcgtagagaagtgcgcacagatattattgagaaccgttctctgcgcgcctactctccggtggagcctctggccacgacctcggtgggcaggaacaccgtgcgctggaacggtcggccctcgatctggtcaagcactagggtggccaagctgacgccgaatgcgtccattggctggcgcacggtggtcagctgcgggtgcagggctgtggcgtcggcgctgtcgtcgaagccggcaatggcaatatcgtcgggcacacgcacgccgcggtcgagcagataattcatggctccagcggcgatgcaatcactgccgcatatcagcgcgtcgatatgatgctcggcgaggagctcgggcacgctggcgtcggcgccggcaagtcggctacccgacggctcagccagcgagtccagcagccgcacgacggcgttgcggccatcgggccgggtccagccgtcggaccgaatgaccagtgccgggtcgaaatcgccggccatcgcatcctggaatccgagcagtcgttcgtcggaacatggcaagtacggcggtccgatgatataggcgattcgccgatacccgcgccccaacatatgctcggtgagcttgcgtgaagcgagtcgattgtcgatatcgacggtggggaaggggatggcgctgccatagccgacgccggaaatggcgaccggcacgctgatattggcgaatctctgaaatagcgggtcatctttatggaacgtgttgagaatccatccgtcggcgaatccgctggaggcgagtctggcgatgcgtgcgccggccgcaggggagtcggagatcagcgtgatgagttgataatcggcattgccgagcgtctggttggcgttgagcaggatggtgttgatattggggtcggcgattagcgaatccggctgcccgtgcaccacgaacgccacggtttgcgtgcgttggcgtaccaatgatcgggcggcgttgttcggcgtgtagttcacctgcttgacggcggcggcgatgcgctcggctgccttggccgagacatgcggattgccgttgagataacgggagacggtggcgtaggagacgccggatgccgcggcgacgtccatgatagtggccggcttacggggtatggccatgcccgtctccttcctgtcctaggaccgttcacagtgattgtaccgcgcgattttcctgatgattccgcatggcccatgtccggtgcctgtggattgccgtgccggcgtatgaaagtcggtaaacattctctgccgtaagggtgtacgaagtaaatagtaaaagagatttaccgatattaagtgaagtacgacacgcacatgatatttgtaaacctttacgtgagtgttatactccttctcgtaaacgtttacaagaaatcaccagtcaatggagacggccagatcaagcgagccgcaacggttcacaactggacgggaaggaccatcatgaagcagcagcacaacgtacgccccgccatccgcagggtgctccaggccacggccatcgtcacggcagcggcccttaccctcgccggatgctcgatgggcgcaccatcctcggacaccggttcgagcgatggcaagctcaccgtctgggtcatgcagggcgatcaaagcgaggccaccatcaaggccatcaacgaccagttcaccaaagagaccggcgtcgaggtcaacatccagaaccagcagtggaaggacatcagcaccaaaatcaccacggctctgtccaccagcacccccccccgacgtgctcgacctcggcaatacgcaggtcgccggcttcgcggccagcggcggcctcatggacctgaccgaccacgctgacgagttgcgccagggcgtcacctggctctccggtctggaagagcctgccaccatggacggcaagctgtacggcattccggccctcggtgccgcccgcgcagtggtctacaacaagaagatctgggccgcggccggcatcaacgagccgccgaccacctacgccgagcttgaagccgacctgcagattctcaaggacgcgcaccaaggcgaggacttcaccccgttctatgtgccgggtgccgattggaagaccgccatccagtgggtgtgggacgccggtggcgactacgccgtgcagaaggacggcaaatgggtcagctccctgtccaccaaggaatcggtgtccggccttgagcagtggcgtgaattccagcacaagtggtcatccgaagcctcccgcccgctcgacaccgatagccccgacaccagccagctcatggccgaaggcaagatcggcgccgtaatcggcaacagcgcctccatccgcgtgattcaggaatacaacaaagacatcaccgccgacgaactcggctccttcccgatgcccggcctgagcggccagaaccagccgtcgatgatggccggctccgtgtggggcgtggcccagaagagctccaagcaggatctggccctgaagtggatcaagatcgcctccagccctgacatccagaacgactacgtgttcgccaaggacggctacctgcccaacaacgtcgaaggactggacaaggccatggcctccgacgacttcccgaccgccctgaccggcttcttcgaggccgccaagcgcaccaaggccacgcccgcctccccgcagtggaccaccatcgaaagcgacggctcgctgaccctgttcaaggacatcgccaccgacaccagcaaggccgaggcctccgccaagaagttcgacgaacacgccaacgagctgtatgccaagtgatgggttggaccatgacaagctcaacgcaactcgcgcacggcgaggccccggcctcacggccggctaagaaacgcggcaatcgcgccccggcgtttctgctgacgcccgccggcatcgtcatcatcgcactggtggtcatcccgctgggattcatgatcttcacgtccttcacggatttcagccagcgcacgctgttcaccggcgaattcgacttcgtcggcctcaagcaataccaatccgtactcaccgacccggccttctatgcggccctgctacgcaccttcggcttcaccgcagccctcgtggccggcagcgtgctggccggcatgggagtcgcccagctgatgaccaaactcggcggtgtgatgcgctacctggtcatcttcgtgctcatcttcgcgtgggccatgccgaacgtcgcatcctcggtggtctggaagtggctgttccagcccggttacggcgtcatcaactggctgctcacccagctgcacgtcttcggcgacatgaccaacacctcctggatcgacaacacctggctcgcatttctggagatctggctgctcgtggtctggcaggccgtgccatacatcgccatcacgctgtacgcggccaccacccaggtcgaccagtcctgcatcgaggccgcccagctggatggctgcagcaagctgcgctgctactggcagatcgtcgtgccgctgatctccccgagcatcatggtcatcaccatgctctcgattatctgggacttcaacgtgttcaaccagatctggctcatctcgcagggcggcccacaggacacgaccgccaccatcggcatcttcacctataagaaggcgttcgtcagcttcgaaatcggcaccggttcggccgcctccgtgctcgtgaccatcgtgctgctcgcgctgacctccgtgtacatccgttacctgctcaagtcaggagaggacctatgagtacgtcaatgagtgcaagtcctgcacaggccgtatcgcaggccgcagcgcagtccacatcaccccgccgccgaaccaaccccggcaagatcgcgcgccgcgccggcaccactatcctcgccctgctgttctgcgtcgtatggttcttcccggtctactggatgattatcaccgccgtaaagcctcgcgatgagatcatgaccacgacccccgtgttctggcccacgcacctctcgttcgacaacttcatcgttgccgtgacccagacctcgttcctgaccaacctcaagaacagcgtggtcgtgaccgccatctcgatcgtcctgtcgatcatcgtcgcgttcttcgcgtgcgcggccctgaccctgtaccgcttccgcggccgcaagccgatcatggtgttcgtactggccatccagatgacctccggcggcatcatcccgcagttcatcatctacaaccagctcgggctgctcaacaaatacagcggtctgatcttggcgtacatcgccatggtgctgccgttcgcgatctggaacatgcgtgggttcttcctgaacatcccgaaggacatcttcgaatccgcggccgtggaaggcgcgaacgactggcagatcctgtggaagatcaccttcccgctggccgcgcccggcatcgtctcgacctcggtgttcgcgttcatcaacgcctggaacgactacatgatcgcctatacgttcatgaaggaccagtcgaagtacacgctgccggtatggctgtcgtccttctcgacacccaccatgggcaccgatttcggcgggcagatggccgcttcggtgatcttctcgctgccggtggtggtgttcttcatgctcatccagcgtaacatcatgaagggcgtgacgaccggtgccgtgaaatagcgtatgccgccgtacctcaccaacgattcgtccgctgatggcggcgcgaccacgtgtcgcctgccattagcggacgaacgataataaaaacagtatgaaaggaacagctgtgcccacattcgaatatacagtcgatgccgcaacgctgtgtctcaccctgattcccgctccggtgacattggaatacacgcatggcacggctatgatcgggtccctggtgacgatcgagaaacgaattcccgaatatgccgccaccgaaggtgccgatgagacttgggaaacgctgccgattgagcagctgtccagcgagctcgagcgttactgcggcgtcaccgtccgtacgcgccgtgtccgtgcagccacaggtgaagacgacgccagcgccaatgccgccgaagatgcgcgagatgcgcgtgcgggtgcgccggcagcgatgaacggcaccgtcatatccctgggcctggattcacgattggcgcatgacgaatacacgctggatgtgttcgcctcagataccatcgccgtgcgtggcggcggcgaaagcgggctgcggtacggtctgcagacgctgcggcagatcatcgggcagacctcgcgtgccattccctgcctgcatatccaagacaagcccgcgttcgcggtgcgcgcctacagtctcgacgtgacacgcggacgagtgccgacgatggagttcctcacctggttcgtcgaccagctggccttatataaatacaatcagttccagctgtatgtcgagcatgccttcgcgttcgtcgagctcagcgaggcgtggcgtggcaccgatccgctcacggccgccgacatcacgtatctggacgagtactgcgcgcgtcgcggcatcgagttggtgccgtcgttggccacgttcgggcacatgtacatgaatctgcgcacccgtgagcatcgcgggctgggtgagttccccgaagacgccgaccgcccgttcagcttcatcgaacgcatggagcatcacacgctgaacgccgccgatcccaaggcccatgatttcgcctcgcgcctgattgaggaatacgcgccgctgttccgttcgaagtccttcaatatcggcggcgatgagacgttcgacttgggacgtggcaggtccgcgcaggacgcgccggaagccggccgcgatgaactgtatgccggtttcgtcagggatttgtgcgaaacgctcgcccgccatggtcggcagccgatgttgtgggcggacatcgcgctcgaaagcccgcgcacgatggatctgctgcccggcgacatcacgatgctcaactggatgtacgagccgcagatcgacgagagcaacatccagaccatcgccgcgcagggccgtcgccagttcgtgtgccccgcggtgcgggcttggagccggttcttccccgattatgcgggtgcctggctgaacacgtatcacatggcattggcgggtgtcaagtatggcgcggaaggcatggtggtcaccgattggggcgattacggccacgtcaacgatccgcgtctgagcgtgccgggcctgtgttatggcgctcagaacgcgtggaatccgattgagatcgatgagcatgagatgaaccgtcggatctccgttctggtgtatggcgacgagtccggtcgcatcatggattgcctcgtccgcatcgactccgatggggtgtcattcccctgggaccttgccgtgcaggtgctggagctggaatacggttccggcaccggcatgctgaatacggatgtggcatcgtatgtggaacggtcgtgcgggggagagctcgtgtttgaccgtacgctgggatgcgccgatgcgcgccgccggctgctcctgcggaaccatgcccgactcgaacgacgccgggattgcgaccgggcgttgatcgattgcggcagtgcggttgttgcggtgctcgatggctcggcacgaggaggattgaacccggaactgctgtgggtgatgctggatgggcagcggttgttcaatagactgggcgaggaactgctggtactggctggcggcgaggacgcctgtgacaccaaggatgtgaccggccgtgcgctggatgcctcgcgccgcgcccgtcttgccgccgatctggagttgtggttcgaacggtaccgtgtgcagtggctgtccatcggccgctacgccgaattggcgcgtatcgcccatgtggtgtggtcgtttgcggacatattgcgtaggggagcgctatagggagctcacagaaattcggtcctgctgagaacaaggtgaggcttacgcgccgtcaaacgcacatggtgatttcaaaaaatggcgaattgctgccattcttgcacctgtgcgtttgatgggaaatgtgcgtatgcctcacattttttgcataaagcatgaaaatgtggcccgttgtctatttgaaagtgcgacaccctttagattggagattgtccagataaccagtgaaggggtgtcgcgccttggggcaagtgtattcgcacctgtcggaagaggaacggcggatcatccggatagagatcggcaacgggacgagcatacggcggatcgccggcc

SEQ ID NO: 1877 - DNA, 5608 bp, Unknown
  MAG_14  MAG No. k141_66531
gatggctcgaggcgtcaaaagcgaggagctggaggagaccaagacctcgctggagaatgcgcgattcgagaatgctgagcttagcgctcgcaatgctgccgcacaggctcagattgaaggcgtgaaccagcaattggctttcgccaagtcacaacttgcccaggcgcagcaggctgagcagattcgcattcagcaggaacgtgagcgtgcagctacggaggcggaacggaagcgtcaggcggatgctcaggccgccgaggccaagcgtgctgaacaggaagcacgtttgaaagaacagagcaaggtactcgaggcgcttgcgccagtggccaagaatcttgataccttgcagaacaaggtcacgcagatcgaagagggtcgcaagagggaaatgggcgcattgggagcccaactcaaggggctcaacgaccagcaggcccgtttggacaaggaaaccagttccctgtccgccgcattgcgcaacaacaaggtgcgtggcgcgtggggcgaggcccagctcaagaacattgtcgagtccgccggattgctggaacatgtcgatttcgacattcaggtggtggtcacggatgccgatggacgtacgttgcgcccggatatgatcgtgcatctgccgggaggcaagaccattccgattgatgccaaagtgccttatgccgattaccagcgtgcctgcgagatcccggacaccgccagccccgaggatattgcccgccgcgatgatttgctgcggtcccatgccaaggcgttgcgcgagcatgtacgtgctctcggcgaaaaggcctattggaatgcctttgatgtggcacccgattttgtggtggccttcatccccaatgaggcgctgttgcaggccgcgctcgaagccgaccccacactgatggatgatgcgttctctcgcaaagtggcgctcacctcgccggtcacgctgtgggccgtgctgaaatccgtggcctatgcctggcagcagcagtcgctcaccgatgacgccaagcagctgttcgatttgtcccgagaactttacgaacggttctccacgttgggtgattatgccatcaaattgggcacccagatcaccaagacagtcagcgcttacaacaagttcgcgtccagtttggaacgccgtgtgttgcccaccgctcgcaagctgcaaaaaatcgaaccgaccaagatcatcgaggaagtaccgattatcgaatcagacaaaggcaatgtgagcgaactgtccgcccctgaagtggtgccggccgatgaaggtgatactcatctgactgcctcaggcgatagtctggagtcatgactgaatctggattccgccccactggtaccccggacctcgccgtcgcgaagagccataatgactttgccatgctggagccgcgtgaacagctagccaccttgctgagggagcatgtggtgggccgtccgttctccgaacttgccgcggtgactttcgaccaccatgccgccaccgtcatgggccatgtactgattgacgctttggaagatgcgggctattcggttgatgacttcgatgctgttggtgccttgaccgcagcatctgtgcccatggtgtccgccatgatccaggccgccgcctctcgtggcgaggacctagatggattcgtgatggacttcgtctacccgtccatcaagggcccctccatcgaaggccgccgtgtggtgctgttggatgcttggctgtccgaaaagtcgtacgtgcagaccagctcgctggtcaccctgcgcaacggcaatgagctgagcctcgactttggcatagtggagcagctgggtgccaaggtcgtggccatcgcctcgctggtcggtggcggtgccaaagacatcaatgtggtcaacccctccaccggcgacgagcaaacgctccccttcatccaggtcttcgacgaatccgaactgcggtaaatccacctttgacttccctcgcataaagtcagccgggctgagccgcgaagttgactaagaggaaccggtgaatagcgttatcgaggagaaagattgcacgcacccaaccagatttctttggctgccaaagcttcaggtgaaccggaattccgtgaaatcggccttgggccgtggtctgagacccatcccggcgagcctcgtcccgacgatccgacttctccgaattatgacggtcgtttcgactcggtgctgttgaatgacggcgaccgccgcaacgtattggatcgttaccgctactggaccgtcgctgccattaaggccgatcttgacgctcgagggcgtcatgacttcgaagttgcggtggaaaactggacccacgatttcaacatcggttccatggtccgcaccgccaacgccttccaggccaagcgcgtacacattgtcggtccacataagtggaatcgcaagggcgcgttgatgaccgaactgtaccagcacgtcgaacaccacccctccatcgccgaactggtggaaagctggcatcatcgcatcgccggtgaaatcgcctatgaacgagccaaggccggtgccgccgccatccatgcgcatgatgtggctgtggatggagacaacaagcaccttcatgagctgctggccgaaatcgatgcttgtgatgcgcgcatcaaggagcttcaagccgcccgcgtcatcgccctcgatatcattcccggcgcagtgccgatggaaacctataccttccccaagcggtgcctgctgctcttcggtgcggaaggccccggattgagcgagaaggccctcgaattggccgacgatgtggtctacatctctcaattcggttccgtgcgctccattaatgcaggcgctgcggcggccgtggccatgcacgcatggattgcccaacacgccgtatcaggcgtgtagccatgcgccgacaatcctgccgcatctgcccaatatgggccacattagaggcatgatctacgccaccaaatccatcgccgcggcattaattcgcatttgccgccggcatcgtcggcatcctgctcgccgcaggcatcagcagctccgcgcagtccacactggccgaagccgttaaaccggactactggattcccgaatggtggcagtccggcctgattctcatcgcctgggctgccgccgcatggatcggcggtctcatcatcaccggaaaagcggatatcagatatcaaataacgcgggttactgctttggcggttctgccggttcggccatggtcctggcagtttgtcatggctatggctttggcggttctgcagtgaccatggttctggtgactctgaccccatggatttgaccaccgtggttcactgcgcttaaccagctcccatcactgttccagcatgaggtatgccggctgcccgcagcttattgagtaaaggatgttgttgcatcacctcctcataggtgaatcggacaatggtgtcgactttggcccggtacagtgccgtctcccgttctttctccgcctgaactgcaccacgaacacccttgcggtcattcatatccgggttcacatatttttcatagccatcgaattcgcccacgataagccgattctcaggtagccgccagaggaaatccacgcgatacagagcaccggtttgcgggtcggtgatgttttgttgcagttctggggctaataggccgcctgcgatgatggtgcctcgtccaagtgactcgccaccattctcactcgccggattggcataatgcagtaggcggaatatcggcgtgcaatcacgtcgcatagtgctgcacacattcagaatgtccgtgatggcgacgccgttgcgcagcgccgaatcgataatgggcagtgcaaatcggaagtcgacggacagcccgcaatccaccaccgttctggctttgctggtcaccgggagtccattggcatattctggcgtgctgcttgacgtgaagatgcgtttgacctttgcactgctggcgttggggcctcgtgatgttgtggcgagagtgatggtgccagcatgaagatgccattggtgttcaaaatcgtggatggccgctgccgtgaccccggcgaacacccaatccggatgtctgttatgaagagttcgtgcaatatgtctgatacgttcgtcgggttgcagcgaatcccagtattccgaagcggcgtacatgttggggaatacacgtttgagttcgcgcgcctgcacgcgccgagccagcgccgagcggtgtgccttggttgttccataagcgcactgttgcgttgcttcagccttcgtgatgagtatgtccactgctttgtgatgtttcatgattcgacggtatgccaatggtgaacacggtgtctatctgtctggggttatgtggttctagcttcggtgcctagatgtgtgtttttgcctgattatcaggcatctgaccgtattggactgattatgtggattcttttgggtgggtatgcaaaatgtggataactggcgaggtgcgcagggcgattgtcgttcatatgttcgatgtaggtgtgtttgggctcattgtgagcttattagggtggccatgcagatacttcagtggggcacatttgcggttgggccgtggcgttgcctcgctgcggggcgtctcagcggggcgttttattggttggaccgcggttttgttttgctgggatggctgagcggtgcgtttcatcggtcagctcgcggttttgctctgctgcgagtcgtctcagtaaggtgaacttgcggtccggcaacggttttgccccgccgaagaagccagcagcggggcaaatgctcgaccggcttgagcttctgattcgctgaagggctccagtaggcgggaaaatgaggcttcccgacaactgcgtgtcacatacggctcatatagttatggccatgccaacattttcacgtgaagaaatcgtgcatttgggcgatctggcccgaatcgcgctcaccgatgaggaaatcacccgtctgcagggcgaactgaacgtcatcgcagactccatcaacaaggtccaggaagtcgcctccgacgatgtgccgccgaccgccaacccggttcctctggaagcctacctgcgcccggacgtcgccgaaaccccgctcacgcaggaagaggcgctcgccggtggcccgaagaccgaggccggcatgttcgtggcaccgcgaatcctgggaagcgaggagtaatcgatgagcaacgaaaccgcaactctcgtcaaactgtctgctgccgagcaggccgctgccatcaagaagggcgacgtcacctctcgtgagctcgtcgaagcccacctcaaggtgatcgaagccgccgagccgtccatcaaggccttcctgaaggtttccggcgatgtggctctcgagcaggccgacgccttcgacgccaagtccgccgaagacaaggccgccctgcctgagctggctggtgtgccgatcgccatcaaagacatgatcgtcaccaagggcattgagaccaccgccgcctccaagatcctcgaaggctgggtgccgccgtacgacgccaccgtcatcgaaaagctcaaggccgccggcatgccgattctcggcaagaccaacctcgacgaattcgcccagggctcctccaccgagcactccgcctacca

SEQ ID NO: 1878 - DNA, 9966 bp, Unknown
  MAG_14  MAG No. k141_66904
aacaccccgttcatctcacaatatgccagcacacgtagcgcttcccggcgcagtactactagacttgcaactatgcgtggaggcgcatgggcttccacagcgagagaagaggtccattatgacaaatccaagtatgcctccaatgccgcaaatccctcagccgagcggtcagcggcccgcagctccgcaatttacagcctcagcgcccgtattggcgatgagcagcaggcccgcggcatgactcccaccgttaccgcagccaccttctggctgtgggacgtcttgggaattttcatcatcgtgggaccgctggtctacttctacaagctgctgcatgcgatgaacgatctgtccgccgactacaacgcgcgcggctgaaacaatcccgtccttctacacttgccgacatatttgccggggcagtgtttttactgcgtttgccgatggccgcaccagtcagaccattattgttcggctccgcagtctcgttgattcataggagattccatttatgctttgccccaattgccataccgataacgcggaaggtagcaagttctgcgaaacatgcggcacgccgctcaccgccaccgaagcgaatactgcagcgtcgagtgcttccatgacaccgcaggacgcgccggttgcgcccacgccagcgggagcgactcccgctccggctgccgcttcagtccccggccccggcggtgcggcagtgccgccgattcctatgccgcagggtgctgctggcatgtcggctccggcggtcgtctccgcaccggcggctacgcagcccactgcgaccgttgccacggccacgcagacggccccggcaacggcaaccacaaccgccgcgaccaagcccggcccaaacaaactcatcatcatgctggtggcggtgctggcggccctgatcatcgcgggtgtcgctttgttcctgacatatcgttccgaggtgtggggcggcaagtcgctgcctgacccggcatccatcgcctccagcgtcaccgataagaacggcaagaaggcgtcggccgtcaaggccaaggatgtcacggccgcgctgaaggccaagggactcaacgcgaaaacggagaaggtgttctccggcaaggattcgggtgagttcatcggctataagaacgccgctccgggcgctcgtgtcaaggccggctccacggtcgtggtgcaggaatccgccggccccggcgtgccgaaagacactctgggcgcacaggtcaataaggtgactgagacgttcgccgatatgggcgttccggtccactataagaaggtgtttgtctctgacgccaagaagaaccccgaaggttcggttgtggccacctatcctgccgccggcactggggtcaaggacgacgagaaagacaagggcatctacattggcgtggccgccaagggtgacgacaccgctctgcccatcgacgtgatgggtcaggatgtggataccgtcaaatcccagctcgagtctgagggccacacagttaccgttgaacagcgtttctcttccaaggattacgtgggtaaggtttccggcgccagccccgctccgggatcgtccctgtcttccggcgaagacgtgaccctgtatcagggcatcgatgccagcgacaccaaagaagcctttacaggccatgatttggccgaaacaggcggtgacgcgctgctcggtaccacacgcgcagccgacggccagtggtgcactaatgatgggaagtgcatcaccatcgacaattacaaggtgactgaaggcggcagtgataatgctgactataccagcgattacgacggtactctgattgcctgcgacgccattcagcaggcgtactgcaacagtccgaaagccgactacctagtcacacaagattatggcgccttcgagctcatgccgcatatcagcctgaccaacttttgggccaacggcaaaatgtatgacggcaatggcgtgcatatgggtgattcttggcccacatccggcgaataccacatgcaggatctgttcctcgtagtgcctaccggctccgacttgcaggggttggaagataagggctacttcgacaaagacgcgcttgccgcagccaagaagcagaaggcggtggacaccaatcgaccgttcattctgtaccgcgatccgaagctctacgacactaccaccgctccatacaacggtgccgggaacggcgccaatccgttcctgccctacaacggatacaacggcagtaagtccgacatcgtcaagatgaagccggccccaagcgacgccgacgcctactatctggtcgaagcgtccgaacccgattgggattccctgccggacgcggacgtgaaggcgcccagcaccaaggacaagggcaactccaaggattccaaggattccaaggattccaacaagagcagtaagaaatccggcacaccggatgcggcctcactgaaggtgttttctgatttggccggtgcccaatacgcttacacgattgctggcgatggcagcgccttcaccaccatttcgttggatgatcggggcaacttctccggcactgtggacgaggcagatatgagcagtggcgattccgcagcgaatgcgccacgtatccagaccaagttcagcggtaagtttgcatccgccacatccaattcagatggcacggtaacgctgaagtgtgatgcgtcggctttcaaaattgacgacaaatccaaatccgacaagtcaggattcagcccgtgtggcaccttcaccggatatccatctggaacctccagcgatgcgttgccatctgaagcacaggccatgctcgtcaagcgtggaacgccggatggaccatccgattggatgctgattaacaccgaaggctctggtgtttttatccgcacccagaaataaataacagttaagcagggttcaggcggatccaacgcttaatactcagtgaggccagttcataccggcctcacgtgtttttatcgcttcttcaccaacgagcggatgacggccataaaaccgaggctcatggcaccggccagcactgcgaatacctgcgggcggcgcaattcgttacgcatgctgatggcaccggtcacgcagtggtcctcgaaccagacgcgcacctcgttgctggagtatcggcccaccagatcaccccaggtgagcatgcgggtcacgtagccggccgggttgctttcatggaattcaaacaggcggatgcctcgatagcgcgacttggggccatagcattcgaatccgcaggtgggtgcgtagcccaaatcaatgccatgcgcgtggcccacgaaggcgttcttgtgatcgtgaccacagaacagcgcgaagtagccgcctgcctcacgcaaggcgtccacttcaccgacgttctcgtctgcacagccaatcgcctcacccagccgcgatcccggccggcagatctcatggttgagcacgtagcaatgaccggcgtgggtacgtgcgccttccaccgcgttcggcgtccatgcgggaacctctttgaggcaatcgtagaattcctgcggcggaatgtgctggaaggcgatggcaggcaccggcttaccgtcgccgttgcgttcgccaagttcggactgtacggctcccagccaatcgatcgcctcggggcttggcgtgccatacccatcggaatcagccaaatcaagaccacgcggattgaccacataggccgggtattgggcgtcgttctcttcgggcttgccggcgtaatcgccggaattcaccatcatgacggacatagctacgcgcccggatccgtcggaagcctcaatgggcagggcaaaagtgcctggctcaaggctgtcgactgggttcaggcagccggggaattcgcggtagatgccgtcctgctcgtcggccaggatgccgcactggaaatcgtgattgccgtaggtggcagcgaacggcacttccgcttcgatgaccgggccaaggaagccggcaaacgtgcggcggactttgtcacgggtctcgtccatgagctcgtccaaagtcgtcggcacatcctgtggatcggatgttgtggagtagaccagcgtggacgcggtggacgcggtttgttgggcgtcggaatcgctgccgtcggacttcatggccagcagacgattgttcacgcggtctctggcccgccgcttgattccgcgcagcttggcctcgacctcggtgaccgcacgcacgcgagcgcccggttcctcgccacggcggcgcaggaaagtgtcgatgtaggcaggatcgtaaccgcggatctggtcgccggtgaacaccaccagatccgggtcggctttgcgaatggcttcacggataaggcggatggtatcggggagcacgttggggccgtcttggatgtcggccatttgcagcacgcggaagctgccgtcttcgcggaatcgcaggttcgtcatgcctcaccagtctagggacgtaatgctgtttcgcacagcatacgcgccggtccttcacgttccccgccgctccgcacggcagctgaatcactacgagaaatcgtagaacgtgtatcccttatccgctccgctcgtcacgttgagcaatgccttgccgttcagcgtatcgacgtcgtttcctatgagatagccgtctcccgtggcccccatatccgagtcatggtaggagcctgagaaggtgccatccttattgactttcattacggttccccatgcgccgacaccggaaccgaaactatagttacctgccgcctgtttcatggcctctttgaatgtggcgtctcgtttgccgctgtccttggacttgtcaccggtcgtctcaccggaagcggccttatcgccagtgcccttgacctcggcgtccggcagggaatcccagtcgagatcgccgttctgctccaccagatagtagacggtcgaatcgctgggagccggcctcatcggcaccagcgcgttctgatagttattgatactgctgttggtcggcacaaacgggtccacatccttgccccggctggcgctcacactgatctcgctgtacaggctcttgtcacgaaccagaacgtacgggcggctggtatccacggccttctgcttcttggccttcgccagttcggcggcgtcgaagtaaccggaatcatccaatgacttggcatcggaaccggccgggaagtagaccaggaagtccttcatgtcgtaggtcatgccggtcgacccgttctcagccccggccggtggcgtcatttcgccatcgtcgaacgacgcccgttcatagttgccgttcacgcagtactcgcctatcgaagcggacatcacctttgagccgcagttcggcagacccatgcccgcgtacagctcgaacataccccagtctttcaacagcagatggtttttcatcggcaatttgtccgcggccatgccgtattccgaatccgcttccagcatcgcgccgctgatgtcctgagagaagttggtcaggcccaacacatcggccttgtcttcaggctcatggcctttgatttgcaggtactgataatcctcggatgaagtggagccaaagggattcatcgaggattgctccagtgtgatgcagtccttggcggcatccgtcacctcgctcttgcagtacataccgatcattgcggacgcgtggatgctggccatcttgatgttgtcatacgagttggttttgctcagcacgtccatgttgctggacttatcgatgccgtaatacaaggtcaccgattgaccggaactcaacgtggaacccggagccgggtacgaaccggaaatcttgcccacgtatttctctgacgagtaatgcggttccaaatccacactgtagccttgcgactccaagtcgctgacggccttgttcttgtccgcaccaagaatatccaccgggataccatcgcccttggaggccacgccaatgtaaatgccgttgtccttctcgtcatcggtgagccctgcaccgggagccgggtacgtgacgctgacctgcccttccggagtcttgctgtccggcgaaatcacaaccttcttatagtgaatcggcacgcccatattcgcgaacgtgttcgtcaccttgttcacatccttgccgaccgtgcccttcggcacaccgggaccggccgactcctgcaccaccaccgtggaaccggccttgacgcgagcgccaggattcgtgccctcgtagccgaggaacacaccgcgatcctcgccggagaacaccggaaccgtcttcgcgttcaggcccttggccttcaacgcctcggtcacatccttggccttgaccaccgatgccttcttgccgttcttatcggtgacgctggaggcgatggacgccggatcaggcagcgacttaccaccccacacctcggcacgatacgtcaggaataaagccacaccggctacgatcaacgccagcagcaccgccacgagcgcgataatcagcgtattcgggccacgcttgcccgaaagattcggcaatgtggcggttgcggtcgttgtgccgctcggcggcgtggctgcgcccggagcgacaggagcacccggagcggcctgcggcactgctcccggtgcgatcgacccagtatgacttgctcccggtgcggtcggcgctcctgccacaccgctcgatgtcggcacgccgggctgcccataggcgttcccatcgtttgggccgggcagcggcgggtgatcaagcaccgtcatagtattgtccggcagcggcactggaatcgggccggccgccgcctgaggagcaggagcactcacgtcggttagcggcgcaccacagtgcatgcagaaccggcttcccccatcattgtcagcaccacaattcttacagatcatcattgctcttctctctggtcgaatgacgcactatagcctcattctactgggaaatgaacgcgatggaatagtccccactcagccgccaaccaaaaggcgtggtccgtatacacagttgcatgtgcaaatactgcttgtactatttgcgcaacgtgctatccaccgaggcaagcacttggctcatcagctgagcggcacgatcctgaccttggttttgcgtgaccacagagaccgcggccttgttgccattcacctccacgatggcgaagtaattccacgtgttctggatgcccatgccacgatgtgcatgcacggtcatgccgctcggaatcaccacgccctccgaagcaatatcagtgttcatcagaccagtgccaccgaccgcatcaacggcaaccagcatgcgggccgcgtcacgagcggtactgtaattctcatatccagcattgctggcctgtacatcaccgaaatcacggttgaagctggtgccgctgtacccatgggaactcagccatgaattgacagcactccatccgccaagggccccgacagcctgattgccggcactgttgtccatgccggtcatcatcgtatttgccaatccttccgcattgccgttgccttgagaggcaagatacaccggcagatacaggcctgcggcaacgaacttcttactcgactgcgacgtattggcaatggccgagtcttcagacgacgcatcggcgctgggagccacatccatcttcactagcgggttgtatccaccgctcatcggtataccgggtacaaacggattggtggtttgctcgccgttcttgtatgcttcgacgcttgtggtcttgtatcccttggggtcgcgcatgatgaagaacggccggtcggtgtctggcttccccgccttgttcgccgcagccagcgccttgttggagaaatagtcggaatcctcgagtttgctgatcttcgatcccaccgggaagtaaacgtagaagtcatccatttcgtaggtggcaccggattgctgaccatcagggatatcatcagtcctcacatattgaccatggtcacacccttccgtctccccatagcctcggtagaccgtgccgtcgcataccggccatccgtagccacggtacatctcgaacatgccccactgtttggccaacaagtggttgcgcatattggtttcattatcgggaatcgaaccatccttgtagtgcagaatgcacccgccaatgtctccggtgggcgtgcacagtgtgacccgatcgttccatatgccattggactcatcgcctttgcgcaccaaatacgggtaaccggacccgtatttcattccgtcttgacccttcgaaatcagcgagatgcatccacccgagccaggtaagaaaccatccttgcaataggtgcccgtaacacgccattcgcccgcagccgagatatacggcaaactcctgtcactcttgctagtgctggcataatccgcgtgcgggtcgaaatcataatcactacctgaaccggtggtcaccacatcttcagtgttgtcggctcccacaccgtagtacagacgtatcggttgcaatattttataatcattttcctcattgctcgcctcaaacggcgcaccaaaaatgtaattggaagctacgattttgccaaaatccttcttggcggaaaatcgcggctcgagaataacctcgatcttgttgttcgatgcgttttctactgcggttttcgcctcatccttatccataccgataacgtcggccggcatgccctcgactgagggatccgggataccaagataaatcgcaccattatcgtccactggctgccccagccgggtaggtatacacgactttcttcgtatcggccttggatgttgcggctactcgcttggcataaatcggcacacccatatctttaacggccgcagcggccttggcgacgcttatgacccggtaccggcgtctgcggtaccgcgatagtggcgggcgcagacgacgctgggccgaggctagagctgagaccggggccgggaatgggaccggcgggtggcatcggcacaggcggaacatcagtgaccgtattgtgtcccacggcaagtttcggtgccagcggagcaccgcattccgtgcagaaacggaacctatcgtcattgacagcaccgcacctatcacagttcatcgcgtcttctctctgatgaaatgatgcaatatgcctttcattgtacagagaaaacgcacactggcggagtcaacggaacagactcaccccgcgacgggccgtgcaatacgcgttgcccagccaggtatggcgggaattgggccagacagctcccagtcgcggtgcgttctggctcatccagatgctcggcacgcggccgtctgcggagcgtgagccgagcagattgaagccgttcttttccagcagccactccgggtgctgggtggcgatggccaagccttcctcgagggtgagcggcaggcgttcatcggagtcgataagcttgcgggccacgtccggctcgcgattgatataacacgtgccggtgtgcggattgacgaccagatagaacgggccttccggcggcatgaagccgtcttgaggcaggaagctggcgatgtcacgcggcggcatggtggtgaagccggccatgcgattgatggaggttcgtgcgatcagtgactcaggcgaaaccagttcgcgcgtgggcaccagcaggatgttcgatcccaaatcggaatgctcgagcgccccgatcaggggtcgggccagcgagcggaatgcggcggcggaaatatccgccacatccggatagccgagagccacgatacggtcgagctgtttttgggcctctactgatgcgatagacatggctaccagtgtagaacatcaccttcgcttcatcgggcagtcaccatctgggaagaccgctactgttgttccgcgcgtttcgtacaatgtcattgttttacggtcacccgtatgacggccgtccgaacgtaagtaacccatcgaaacccagaggtcatagaggtcatcatgtccgaaaaattgaaggtcggcatccttggtgccaccggtatggtcggtcagcgttttatcacgctgctt

SEQ ID NO: 1879 - DNA, 7599 bp, Unknown
  MAG_14  MAG No. k141_67158
ggacatgcacttccgcgagcagttctacggctactacgagggacttgacatggccatggcctggtacgccgcgggagcgcctcacggcgccaaaacctacaaccaaatcgtcgagaagttcgggttgggggcctcgcgtgattttctcaaggaagccgatcccttccacgatgcggaatccgatgaggaatattggacgcgcgtcgaaggcgcgttccgtcttatcgccgacaacccgaatctcaaggatggcgacgatgtgctgcagatttcgcatggcaacacactgcttagcctcggccaccggttcggcggccctgacctcgatctgaacgaacgcccggccaatggttcggtaaccgtgctcgacttcgacaccgacaagccgttcggcgaggccgtgaccatcgtttcgtacggcaagtagcaaatagcaagcaatacatatcgaatagcacgtacggtccacggcggcacgccgcaaacgaaagcgtcagcaggacacctttcgcctatagtcgcatgcatccacgcgcacggttttcgccctgcgcgtgcaatggtatgccaagaaatagggaaggagtgctacccttaggcgagtaagtgtgaccgcaaggaggaaacaatgggagtcggagagatcgctggcctgatcgcggccatcgcgttcgcagtattggccggtttcatgatctatccgctgatcaggctgggcaagatgtttgatcagatatcgcagacggtccgggagtccggcgaacacgccatccccgcgctggacgaaggcgtgaccaccgtcaagcaggtcaacaagtcgcttgaagacgtgaacaagatttccgccgcggcttccaccaccgccaacaacgttggtgcgttgactgatctgtatggctctttcctcggtaagcccatcatcaagatcgcttccaccttctacgcgctgaaaaccacgggtcagtccttccttgcgaagaacgccgcgaaaaccaccgtcaacgacaccgccgagaagggggagtgatgttcaaacgcatcttctgggtcggcgtcggcgtggccatcggaatcgttgccgtcaccaaggcacaggcctatgtcaaggccaatacacctgatgcggcacgccagttcctgcttggccccgatcaggacaatgtgccgatgaaaacactcgaagggttggtcaacgagttcaatgccgcccgtcgagcccgcgaggctgagctcaaccgtcagtacatcgagcgcgccaactgacacgcgcatgccgccttgccatctagtcactgaaccagctagaacaaactagtcctcataatccagtctttttccaccaataccaggcgcaactgcgcccattacccaaacaaggagttcatccgctcatgcgcactgcggacatcgcaaagcgatacctcgattactttgccaaacatgatcatctcgtcatgccttcggcatccctgatttccccgaaccccaccacgctgttcaccatcgccggcatggtgccgttcattccctaccttcttggtgagcagaccccgccgaagcgccgcatgacatcgaaccagaagtgcgttcgtacgctggatatcgatgaggtcggcaagaccacccgccatggcaccttcttccagatgcttggcaacttctccatcggcgactacttcaaggaagaggccatccactacgcctgggagctgctgaccaccccgcagagcgagggcggttacggctttgacccggaaaagctgtgggtcaccacctttaccgacgatgaagaggcccgttccatctggaagaacgagggcttcgatcccgagcacatgcagattttcggcatggaagacaacttctggaccaccggtggccctggccctggtggcccctgctccgagatctacgtggaccgcggccccgaatacggtcgtgatggcggtcccgcggccgatgagacgcgcttcatcgagatctgggacctcgtgttcgagaactacgaggtcgacaacgtcaagtccaagaccgacctgcacatcgtcggcgagcttgcccagaagaacatcgataccggtgccggtctggaacgcttggcctacctgatgcagggcaagcagaacatctacgagaccgatgaggtcttcccggtcatcgaggccgccgagcgcttgtccggccgcaagtacggcgaggacgaggccgcggatgtcaagttccgtgtcgtggccgaccacgtgcgttccgcgctgatgattatgtccgatggcgtgcgcccgtccaacgtcggccgcggctacgtgctgcgtcgtctgctgcgtcgtactgtgcaggccatgcgcgtgcttggcgtgaccgatccggtgattcccgagctgctgcccgtctccaaggaggccatggtcgccagctacccggagcttaacgacaccttccacgatgtctccgaagcggcctacggcgaggaagatgcgttccgtcgtacgctggagaacggcatcgagattctcgacgtggctgtcaagaaggccaagaagaccgccgacccggtggtctctggctctgatgcgttcactctgcacgacacttacggcttcccgattgagctgaccctcgaaatggccgccgatcagggcgtgaaggtggacgaggccaagttccgcgaactcatggccgagcagaagtcccgcgcccgcgccgacgccctcaagaagcgtcacaacgtggacctgtcggtctatgatgacttcaagaagacgctcgccaagccgatcgacttcctcggctacacggacatgtccgcccgtgccaaggtgatcggcatcatgcaggaaggcaagggctccgtgcccgccgtcaccggcccggccaacgtcgaagtcattctcgaccgtaccccgttctatgcggaggccggcggccagcttgccgatcagggcgagatcctgtccgacgacggtgcagtgctcgaagtcgacgacgtgcagaagcccatcaaggacctcatcgtccaccagtgccgtctgaccgaaggcacgctggtcgtcggcgccgaagtcaacgccaacatcgacctggcccgccgtggcgccatcgcccgctcgcacaccgccacgcacatggtgcacaaggcgctgcgtgaggagctcggcccgcaggccacccagcgcggctccgaggacgccccgaaccgtctgcgcttcgacttccagtggtccaaggccccggccaagtccgtgatctccgcagtcgaggagcgcgtcaacgacaagctgcgcgacaacctcgccgtgaccaccaaggaaatgaagttcgacgacgccatcgccctcggtgccatgcacctgttcggcgagaagtacggcgacatcgtacgcgtggtctccatcggcgaagacggctggagccgcgagctgtgtggtggtacccacgtggaccacgtcggcaagatcggcatggtcaacatcctgtccgaagcctccatcggctccggcgtgcgtcgtgtcgacgccgtcgtgggccagggtgcctatgacttcaacgctcgtgagcacgcgttggtctcccagctgtccgacaagctcaacgctcgcccggacgagctcgccgagcgtgtgaacgccctgctcgccaagctcaaggaatccgatcgtcgcttggcctccatgtacgagtcccagctggccgcctcggttccggcgctggttgctgacaccaagaactccgcggccccggtcaaggtggccgtcaagaacgtgggccacttcggcgcggtcgacgccctgcgcaagaccgtactcgacgtgcgcgcccagctcggtgaagacgcccccgtggtggtggccctcgccggcgtgaacgaggatgacaagccgatggtcgccgtggccaccaacgaggccgcccgcaaggtcggcatcaaggccggtgatctggtgcgtggcgcagccaaggtcctcggcggcggtggcggcggcaagccggacttcgcccagggtggcggtgtcgatgcctccaagatcgacgaggccctcgaagcgctcgagcacgaggcgcagaaagcctgattccgccagtggtgtggttaggcgttgatttgggtaatgcccgggtcggactggcactgtccgacccggagcttacctttgcacaccctgctggcaacattcatgttgccggcgactatttctttgctattgacgaggtcctgaacgtcatcgaagacgaacatgtggaccatgtaatcgtcggactgcccctgcagatggacggtacagaaggcaaaagcgccaaaaaagcgcgcaggtgggcggccaatctggagaagaggctgcaagcagagagtgaagacagtgattctacggagtatcagattccgcaggtgtcattgatagatgagagattgacaacagtcagtgcgcatcgtcaactgttcgaggcccataaagcttcgaacaagcacaggccggtggttgaccagcagtcggcagtggtgattttgcagacggcactcgaccgtacccgggagcagtgaggtatcggttatgaccgatgattttaacgagttctttgatgacaacacgcattgggtcgaacaggggtcagaaccaatgcgcgggaccgagccgccagaaccgccgaaatcccgcaaggagatgcgcaagcgacgtgcacagcgcaagcgcaagcgcgtcagtggcattatcatcgctatcgccatcgtcgccctgcttatcggcggcggctatttcggcgtaaccaagctcatcgcatggcgcgacagccggagcaaccagtcgacggccatcgcggactatcggggaccgggctatggcgaggtcgaattcaccgtgagcgagggccaaggcgcggcggagatcgccgataatctgctcaaggccgaagtcatcaagtctactgccgcgttcaccagcgtggtcaacgccaatagcgcgacactctatccgggaacgttcacattgaagaagcatatggccgcatccgatgtgatcgccgttctctccgacaccaaccaggcggcgggcttccttgaggttcatcccggtgaacgtgccaccgatgtgttcgccgacgccgcgaagctttccggcatttcccaaagcgaattcgacacgattatcaagaacaagggtaaggatattctgcccaatgaagcgggcggtagctttgagggatggctggagccgggaacctacaacgtcaagagcatgaagagcgcttcggaaatcctcaaggccatggtcgataagcgtatcgccaagttggatgaattgggcgtgccgaccggcagtgaccgcgaacgggtgatgatcatcgcctctatcgccgaggccgaggtcaacaaagccgattactacggcaaagtgacgcgagtcatcgagaaccgtttggagcagggcatgtcgttgggcatggattccaccgtggcctatggcaataacgtcaagcccgcgcaggtgaccaccgagatgacccaggacgagtccaacccgtacaacacgtacaagatctccggcctgccgcctacgccgatcagcaatcccggcgatagcgccattcaagcggcactgcaccccgaaagcggcaattggctgtacttctgcacggtcaatctggacaccggcgaaaccaagttcgccgcaaccgccgatgaacatgaccagaacgtggccgaactacgcaagtggcaagccgaaaaccagtagtcacctcattggctcccctcgccgaggggagctgtccgcaaagcggactgaggggagtaatacgggattaagccccaaccaccaccgccacaatcgcgcccgccaatatcaccggcacatacggcaccttgcccgcatgtgccggtgatgtgcgttgcgggtcgaatcgcgtccacaaggcaagccatgtgatgccggcaacgcccatcgccagccaccagaccaccacaggcaacaggccaaacagtccgacagacaatcccataggtatcaaggcggtcacatcgccgaatcccaatgaccgcggcaccagcaacgccaacgcgaactggatcaggcaacatagcacggtgaacaacagcgcctgcaacagcacgaacaggtcgttcgccaccactccatgcgcgaaatcggcggccaactggattaacgcgcccacggccacccatgcgatcggcacccgccgatgacgaacatcctcaatggacagtgcaagcccacatagcagaccgggtagcgtgaacaggtatggcatggcttaacattaacccctagtcagacgtacacatagacgtacacacatgaaacgagggaagttatgctgcgttggcagacggcaggggagtctcacggagaagcattggtggccatgattgaagggttgccggccggcgtgcgcattagcacggacgatatcgtttccgcactggcacgccgtcgacttggatatggccgtggtgcccgcatgaagttcgagcaagacaaggtccgtctgctgaccggtgtacgccacggcctgaccctcggctcgccggtggccatcgaaatcgccaacaccgaatggccgaagtggaccgaggtcatgagcgccgatgcactcgaccatgacctgccgcgcgaaggccgcaatgcgccgctgagccgcccgcgcccgggccacgccgatctgaccggcatgcgcaagtatggttttgacgacgcccgcccggtactggagcgctccagcgcccgtgagaccgcctcccgtgtggccttgggcgaggtggccaagcagttcctggatcaggcgttcggcatccgcaccgtagcccacgtggtggcgctcggtggcgtgcagaccaaccctgatttgccgttgcccacacctgacgatctggaagcgttggatgcctctcccgtgcgtacgttggataaagaggccgaggcccgcatcatcgaacgcatcaacgaggccaagaaggccgccgacacgttgggcggcgtgattgaagtgctggcttacggcgtgcctgccggcatcggcacctacgtggaatccgaccgtcgtctggacgcggctctggcctccgcgattatgggcattcaggcgttcaagggtgtggagatcggcgacggcttcctggaagcctcccgccccggttcgcaggcgcacgatgagatcgtggtcaacgccgacggccgcatcgaccgtctgtccaaccgcgcaggcggcattgaaggcggtatgtccaatggccaggtgattcgcgtacgcggtgccatgaagccgattccgtccatccccaaggccctgcgtacggtcgacgtgctgaccggcgaatccgcacaagccatcaaccagcgttccgacagcaccgccgtgcctgcggcatccgtggtggccgaggccatggtgcgtctgactttggcgaagtacgcgctggataagttcggtggagacagtgttgccgaaacacggcgcaaccttgagtcgtatctcgcctcgtggccggagcacatgcgctgaacgaagtggagtatggttccgagacgactgccgcggaaccatcagcaactgtacccaccaatcgtcgagaggattcgtagatta

SEQ ID NO: 1880 - DNA, 5163 bp, Unknown
  MAG_14  MAG No. k141_67360
cccgggggcgacggtgaacatatcggcggcaggagaagataagctgttctcaggggaacatcagcacaccaaaggagttacgcatgcgagatttcattttccataacccggtgaagatctacttcggcaaagggcaggcgcgccatatcgcacaggaggtggagcgtgtcgagggcgccgttctggtggtgtatggcggcggatcgattaaacgcaacggtgcctatgacgatgtgatggctgcgctggcaggaaccgggcgcaaaatcatcgagctgcccggcgttacgccgaacccgcgattggacaaagcgctggaaggcgtacgactggtcaaggagcatggcgtcggcctgattctggccgttggcggtggctcggtaatcgactgcgcgaaatttatttcgttgggttccggcatcggtgacgatgaggatttgtgggatgactacatcgaaaccggcaaaccggcacctgaagggctgattccggttggcgtggtgctcaccaccgcggcaacgggctcggaaatgggagatgcggccgtgctcaccaattgggaacgtaaccgcaagctcggctatacgtcgttcccgctgatgcccaggttctccgtgctggatccaagctacctgatgacattgcccgccgaacagacggtgtatggcttcgaggacatgttctgccacacgtgtgagcagtatttctcctatccggtggacgacaacctttccgacgaaatcgccgagggaatccaacgtcatattctgcgttcgtggcgagcgtgcttgtccgatccgaaagattatgaggctcgctccaatgcaatgtgggattccacgttggctctgaaccgcattatctcgcgcggcaaggaagaggattgggtgacgcacggcatcgaacacgcgctgtccgcatacaccgatatcgctcacggtgctggtctggctgtggtccacccgcattggatggcatacgtgtatttggtcaacgatgaggtgacggctcgctttgcccgctgggcggtcgacgtgtggggtgtgacgcccaccggcaaaaccgatcgcacggtggccgaggaaggcattgatcgctatgtcgatttcctgcgtcgcgtaggtgcgccgctgactctttctgaggccggcgtgcccgacgatcccgcctctctcgacaagtacgccgatcatgctggtgaggccggcggctcattcgtgcagattcaccgtgacgatgcccgagcgattctcgaggcatgcaaggaaccggtgtcgttctgacggttggactaatcccgtgatttgagccgccgcgtgctgtcccgcaccaccaaagacgtagaaagaaccacgcgcttctgaatcttgcgtccttcattggtatcgatgaccatgcgggctgcagtggcggccatgtcttgcaatggctggcggaccgtggtcaacgccgggcccatgtacgcggcggtctgtatatcgtcgaatccgataacggacagatcttcggggatacggattttcagttgacgggccgcctcgtaaacgcccatggcctgtaggtcattgcctgcaaagatggcggtcgggcgactttgttcgtcttcaagtaacgccatggctccttcgtaaccgcctggcgtggtgaaatcgccttcggtgatgagttcgggagaggtggggatattgcgttcggcgagggccgccgaatagccgtcaagccgggcacgtgagcagagcatttcatccggtccggtgatgatgccgatgcgcttgtggccgagttccagcagatgacgggtggcgatgacgccgcccatccagttgtccgcctgtacggagagatcatctaatgccggattgccggaagggtcgaagacgacgaaaggaatgccgtgtgattggaacatgctgcgttccttgtccgtcaagttggagaacaccagaatagcgccaatgggctggcggtcgatgatgccttcaacccaggaagagtcggggtgctgccggtcgccactttccgcaaccatgacattgatgttgtgcggcttggcctccgtgatgatgcccctgagcacctccagcgcccaaatggtctcaaaatcccgaaataccacctcgatggtgcgttgtttacgggagggggagacgcggcgaatgtagccgttgtctttcagggctttgtcaatggcctgccgggccgcctccgaaatatccgccttgccgttcagggctttggacacggtggccagtgagtagccagtctgtttggcgatgtctgcaagtttgaccttgttctcgccgttgcttttgcgctgttctgccgacgccatcattgaccgccttcatcagagaatgttgatatcagtatattcgaaactttcgtaaagtcaatttgacgataaagaatggtatgtatagataaaaaaggttggaatttcaacgattttgatagtaaaaaagccgatataaatttcgtttgaccgtcaaactaaggctctttatgataaaggtatcgaaaacataaagcgagttttcggtaaagttgaagaaggctgatggggtaggtgaaacggcgaagtttcactgaaaacatcattaattaccagctgttagatatgtaactggctgatatacctttcgaaactttcgtaaatcgcggatcggtttcatgctggtcaagaacaataaggagacgacaatgaagttcaagtccgtggccgccgcacttctggcggcggtaacctgtgtcagcatggccgcttgcgggagcggcggcgacacgaacgccgatggcaaggtggaaatcaccatgtggcacaactccaccactggcgacggcaaggcatactgggaatccgccgccaaggcgttcgagaaggaaaacccgaacgttaccatcaagatcgaagccattcagaacgaggatatggacggcaagctgcagaccgctctgcaggacccgaattccgcccccgatatctttatggcgcgtggtggccagaagctacgtgatgtggtcgaagctgggcaagccatggacctgaccgacaagatctccgacaccgtcaagaaccagatggccactgctgaagccaccggcaccatcgatggcaagatctacagcgtgcagcagtcagtgcttcccggcggcatctggtattccaaggatctgttcgagaaggccggtattactgaaactccgaagacctgggatgagttcaagaccgtggtgcagaagctgaaggacgccggcatcacgccgattgccgtaggcggtaaggacgcctggccggccgcccactggtggtactggttcgcactgcgcgaatgctctgctgacaccttcgacaaggcccagtccgataaggacttcagcgataagtgctggacccgtaccggtgatgatgtgcaggcgctgctcgacctcgatgccttcaacgatggcttcctgaccactccggcccagcagggcgcaagctcctccgccggcctgctcgccaaccacatggcagctatggaactcatgggcggctgggagcccggcgtgatcaaggacctgactccggacaagaaggacatggccgacctcggctacttcgcattcccgaccatggacggtggcgaaggcgatccaactgccatcatgggtggttccgatggcatggccgtgggcgagtgggcgcctgaagaggctgtggacttcctcaacttcgtctccgagaaggaatggcaggagaagtacgctgaggcgttctccaccatcccggccaacaaggaagcccaggatgtggtgaccaacgaggctctgaagcaggtgctgaccgtctacaacaacgcatcctccgtgtccatgtggctcgacaccgtgttcggtcagaacatcggcaacgcactcaacgaaggcgtggtcaacatgatggccggtcaaggttccgcccaagacatcgtcaagggtgttgaaaccgctgcggccaagggctgattcgctctgacccgaccgtaattcccgggctgcgcgaatgcttgcacagcaacaaccgcggcccaatttgttttcttaggaaggcctcaacaatgtcagtttcagcaggcgcgagggtacagcgccgcacgtcgggcttaagcgacaaggttcgcaaacgtatcgaaatcaccatcctttcgcttcctgccctgatcatgttcctcggattcgtcatcctgccggtgttcatggccggctactacggattcttcaagtggaagggctatggcaagcccaccgtcaacggccagttcatcggttttgaaaactacaagatcattctgaccgacccgaacttccagcaggcattggggcacacgctattcgtggtcgtcgcttcgctcgtcatccaggggccgctggccatcctcttcgccctgctgctcaaccagagattcaagggccgcgcactgattcgtaccctgattttcgtgccgtacgtcgtttccgaagtcatcgttggcaccggctggagcctcatcctccagaccacaggcgcattgaatgcgctactcaagaaaataggacttggcggggcggactggatctccgatccgaaaatcgccatctggacattgatgttcatcatttcgtggaagtacatcggcttcgccgtcatcctgatgattgccggcatgcagtcgattcccgaagacctctatgaagccgcgaaagtggatggtgctggattctggcgtcagcagtggagcatcaccctgccactgctcggccccaccattcgtatctgggcattcatgtcgattatcggttctctccagctgttcgacttggtctacatcatctggggtcagtacgtgtcgtctaccgcaggaacgtccaccatggcaacctacatggtgcgcgaaggtcgactcgccaacaactatggttacggttccgccgtggccgtggtgattttcatcatctcgctggtcattgccttgacctaccagcggttcgtgcttaacagagatctcgaaggggcgctcactgacgagagggatgccaagcgtcgtgccaagcgtgcggcgaaggaagcggccaagcttgccaaggtcaatggcaatgccgcagcagttgcaaatgaggtggtttcacaatgacgaccgcagtctccccgtccgtaggcaagggcaa

SEQ ID NO: 1881 - DNA, 2894 bp, Unknown
  MAG_14  MAG No. k141_67814
cacgaaggacgcggcatgcctgggtgcccgagtaatcgaactccgcagcctgaccgatcacgatcgggccggagccgatgaccatcacggatttgatgtcggtgcgcttcggcatatcacttaccttccttggagttgttcttcataagttcgcagaaacggtcgaacaggtaggccgcatcgtgcggaccggctgcggcctccgggtggtactgcacggagaatgcggggatgtccacgcactgcaggccttcgaccacgtcatcgttcagatcgatgtgggagacgaacaccttgccgtacttgccgttttaaaacggcgcgtcgacctgcttgccgatcggagcgtcgaccgcgaagccgtggttgtgggcggtgacctcgaccttgccggtggtcagatccttgaccggctggttgatgccgcggtggccgaacttgagcttgtaggtgccgaagccgagcgcgcggccgagcagctggttgccgaagcagatgccgaagaacgggtagccggcgtcgagcacctggcgcagcagctcgatttcggggccggcctgttccgggtcgcccgggccgttggagaagaagacgccgtccgggttcaggttctcgatttcggcgaaggtgatggtggagggcaccacgtgcacgcggcagccgcgttcggccatgcggtgcggggtcatgcccttgatgccgaggtccacggcggccacggtgtacagcggctccttgccttcgtactcgccgcatggctcgatggtgtaggcctgcttggtggacacttcgtcgtacaggctcaggccctgcatctgcggtgtgttcttgacgtcttcgagcagctgctcgatggtcttgagcgcgccggtggcctggtcggtcagggcgtcgccggagaagatgccggcgcgcatcacgcctgcggaacgcaggtgacgcaccagcttgcgggtgtcgatgtggctcaagccgacgatgccgttcttggcgaggtcgtcatcaaggctaccttcggcacgccagttgctcacgttcggagagggatcacgcacaatgtatccggcaacccagatgcgggaggactcagggtcttcgctgttgacgccggtatcgccgatgtgcgggaacgtctgcacgacgatctggcgatcgtagctcggatcggtgagcgtctcctggtatccggtcataccggtggcgaagacgatctcaccggtcgtctcaccgagggcgccgtacggctcccccacatatacctgtccgtcttccaaaacgaggactgcatcgtccttgtcatacatcggaattgcgatggtcccggactcgttctggctcaccaaaacccccttatgtttttcgggtattcgtaccaaggttaacggccagcgcagactcacacgccgttgggcgcaaagtctcaccccgctggcggggctgtcggcaaggtgccgacttgagaatgtgtggcgacacaagtgtccgcccatgaaaaagcctcccgaatggggaggctgaacaacaaatgactaatcgaccgtcggctgaatctcagcggacggggcagcggactcgtcggatgcaccggacgaatcgggcgaatcggaaacatcgccctcatcggtcggctcggatgcggcggcatcggaatcggacgattcctcatcggcctcttctgccgcggactccggtgccggtgctgcgttcttggcggtgcacactgcagacagcaggccatggatgaaagcgggcgaatcgtcatcgcacagggtcttggccaatgccagagcctcgtcgatggcgaccttgtccggcacatcatcgttgaacagaatctcccaagcggcgatacgcagaatgttgcgatcgaccacgcccatacggcggaccttccaacccgtggagtgttcgtccagggtcatgtcgatctgacgacggtgctcggccacgcccttgacgatttcaatggcatagtcgggaagcggggtctgggcaccgggatgtgcgatgcgctcgtcaagcagggcgagaatatcctgacttttttcgtcggcttcgtacagggtgttcagagcccttttgcgcgcggtggaacgtgccatactgctgctgtcctagtcctttatacggtcggtcgtctgttgaggatgcggagatcagttgttctcgcggccggtgtaggaaccatcctcggtgttgatcttgacgcggtcgccctcattgatgaacagcgggacctgaatctcggctccggtctcaacggtggccggcttggtgccggcgttggagcggttgccctgcaggcccggctcggtgtgggtgatggtcaggaccacggagcccggcaggtcaacgctcagcggggtgccgtcgtggaaggagaccaggcagtcggtgccttcgagcatgaacttggccttgtcgcccacgagggtcttcggaaccatgatctgatcgtaggtggtcatgtccatgaacacgaagttgtcgccgtcctcgtaggagtactggagggtgcggttgtcgacggtctcgaattccatcttcatgcctgcgttgaaggtcttgtcgacgatcttgccggaaagcacgttcttgatggtggtgcgcacgaaggcggggcccttgcccggcttgacgtgctggaacttcatgacggtccacagctggccgtccaggttcaggacggatccgttcttgatgtcgttagtagtctgtgccacgttattcacctatttcaaattcaaactagcttaggcaaagcccaaaaattgccttggctattatgccacaccgggtatacaggaagtgaacgctggggtttcccacgtgacccccgactagactggatgaatatgcgatccttcttcgaagccatatccgtgtcctgcgtc

SEQ ID NO: 1882 - DNA, 7186 bp, Unknown
  MAG_14  MAG No. k141_68349
cacctcggtcatgtcgcgcaccaagtcgtcgtccggctccgtgtcgtccaccacgatgatccggcgtccctgcgccttcaacgcgctctccaccagtcccgcgttcatgcgggcgagcctgtccctgtgctccacgatcagcgtgcccacggtcgggtcggacaatagccggttgagcttgcgccgcttgtcgttcatgcccgagccggtctccgtgaccacctcggggctcttgacgcccatgttgatggcgaacgccttcaaccggtcggcctgacgttgcaaatcgtccttttggtcggacgagctgacacgcgcgtaacacaccgtcctgccgttcgctgtgggggcggcgggctggttctcgtatttcgggtcgtggatgataatcgtgcccgtgttcatgcgctcgaacgggacgggcatacggttctcgcgacaccactgccacaccgtctgctcgttgaagccctcacgcctcgcccattccctgacacgcatgacttaattatatcacacgaaaacaaactaaagcaaataatcaatctagcaggttataaccccatcaccatctactttttaggaaacatcttcgctgagacctataagttgatccgagagtacattctgctgttggggagcaggattggcgtttattttattcctcgtccgccctgttctggcgcagctgctcaatgagatcgatgacagtttcgagttcaggagtcacatcgtctgaaggacgaacgttatcctcttcgtcgtccatctcatcatcctcatcatcatcggcaacggtgttgttgaggatgtcctcttcggtggcctcgtcgtcagcatcagacttggactcgtcgctggaatcagctgcatcaacatccacaacggaatcggatgcgttctgtgcaacagactcatcaccggcagactgggattgcgaggtcccgtcgcctgccgcctcctcagcgggctcagtatcgacggcgttcccgtcaacagtcttctgtgcttcgatatcatcaccggcaggctcgcctgtcttgtcggtttcgccttcggcctcgtcctgggcaacctgctcctgcttgcacggacggttggcaaccacgtcgatatgcagatcgtcaaaggctggcttggactgcacccacagctggcttggctcgggaggttcgatttcggaatgctcaccgcagccgtggtccagggagaccacgcggccgtcatccggactccacttgttggcgcacacgccgaacatacggtcgagttcgcccgcgagcggcacgaagaaaccacaggtggagcacaggttgccttcggcggttttggtgctcaacgctttggggcctcgcggaccttcataccagcgcttggcagcctgcgcacgacccaacgaggtcagcacgtgacggcgggtcagtcggaaggtctcgacggcatcgttgacatcctgcagcgaggattcctcgacttcgccttcctcgatgcgctcgtcatccggatcggtaccgatcgaatcggtgggagccagatctgtgggctcaaggcgatctttccaaggaatccacttgggcggcatcaacgcgccctcagtggggatcaaggaggattcgttgacggtccaggagtcgatctcctcgtcgtgatacagcgtcaccgaccattgccatccttcgtagccacggatattcgcggcgaagcggaagtcagtgacgtgatcctcaagatcatatgaggtaacgaaatcccccacctgatcgctctcgtcggccacttcgagcagcacggcgcgcgcgatggcgtgagggtccggtgtcacgatggtttcggtggtatcagtcatagatcagatcagtcctgtacatcgaattgatccgccaccgcacgcagcaacgtggccagctttttgctgtcggcagcagatgggtaacggtgacggcgcaacgtattgccggccgcatcaagcatcttgataaggtcctcgcagatggcggccatgtcatccgccttcgggcgggtggccttgaccaagctgggagtggaggcgatcaggcgaacatccatggcctgcggcccacgacggccgtccaccacggaatactccaccttggcccccttgcgcaacgtggtggcgccagtgggtagggcctgagccggcaggaacacgtccttgccttcctcactggtgatgaagccataacccttggctgcgtcaaaccaacgaactcgaccggtgggcattgcgaaccttccttaatcctcaatggaaatagtaaaccgaaggtacagtttacctcacagggcttgacctcacgctttgggctgagtcgcctgagtcttacgctcagagctgaaccaagaagtcttctgtttggcgtccttggttttgccggtgggccgcttgggctcaggagcgacgatctgctcaatcggcagcaccacggtgaaggtcaggcctcccccatcggtgccggtggcgcagataaagccgtgatgtgctttgaccacggattgcgcgatggccatgcccaaaccggtaccacccttttcgcgggcacgggatgggtccgcggtgtagaagcgttcgaaaatcttcgagcgcgattcaggcggcacgccggggccatggtccacgaaacgcaatacggcgtatcgatagccggtctgcatcgaggcacctacttcggcggcgtcgatgaaccgccgcattgacgcgtcgctggcgggcatgcgagcgagctgtcttggatcgatggcggccggcatcacaccgagcgcggcctcggcaggcgaatcggcaggcgtgtagcggtggatgttgcccacgatgttggtcaccacctggcgcagtcgagaggcgtcgccgggcagcacgacctcgggccaatcgccttcggcaaggttgaattcggcgggatggttcaaatcgcgcgccggttcgagggaaatctgcatgcggcgaacggcacggtccgggtcgagcgcatgcaagtcgtcgacggcgtcggtgaccagcgacgagagtttcaccgtgccggtcacatcgatgccgcgcccctcatcgagacgggccaaagacagcagatcctcaacaagaacagtcatgcgctggctggaccgttcgatatgttcgatggactcgtccgcacgctccaaggcaccaggcatatcgcgctgcatcttatacagctccgcatagccatggatggcggccaacggggtgcgcagctcatggctggcgtcggagacgaaccgtttcatcttgtcggtggtctcctcctgttcatggaaactggattctattcgggtgagcatggagttcagcgaggcggccagggagccgacctcggtgttttccggcgcggaaggaatacgttggctcaggtcgccggcggcaatctttgcagcggttttctcgatgcgcttcagcggcgtcatcgtgtgctggatgatcagcgtggacagggagccgccgagcagcaccacggcgatgccgaccacaatgcagtatcgggtgagtgtgttgacggtgtcgatctggtcggccagtgacaagccgatgtacaccacggcacggtccttgccgttttgctggaaggtcaccggcagaatacgccatggtgccctcgccgtgacgatggcggcatggttggcattgacagtggggttggccagtaccttggcgatggtgtcagaggaattggagtttccgttggccggatcgttctggctgtccgcactgtcggactgcaccgtgatgatctgcttggccactgcctgcgtagtgaatgcctggccgagcgtgatgccactggtatcaccataggtaggaagaatcggcaccgatacgataccgtcctgcatctgcggcatcagcggggtcacgaccagaggattgccctctttgtctttggtgccgtcggtgtattgaatctgcagaaagtacgagttcggccccgatgagtcattttttgacagcagatcgatattgttgaccaccagctggctttgcgagcttaactgggtgtcggttttctgcagcatgtagttgttcaccaacgcgcggatggagaaggaaatcaccgacacgccgataagcagcacggcgatggtgcaggccaccagcttgctgctcaacgagatacggtcgatatgccgcatcagtatgtttttcttacgctcgcgccgctcttggaaatgggcggcgaacggcggcattgcaggcatgggattcgtgttcggggcggcgttcggcgtgctgctcggcggtacgccgcctgactgcttatcggggatactcatgagattgcgatgcgttatggatggggcgactagttcttcggttcgcgaatcatgtatccgataccgcgcttggtttcgatcagcgaagtcaccttgcgcttgccgccttcgccgtcgtcgacctcgatgccgtcgactttcttgcgcaggtaggagatgtacgattcgacgatggctgcgtcgccgccccagtcgtattgccagacatggtcgagaatctgtgccttggacagtactcggccctcattgtccatcaggtagcgaagcagcttgtattcggtggggctcaggtcaaccggctgccctgcacgggtcacatcgtgggagtcctcgttgatttccaagtcggcgacgcgaataatcgggtcgtcttccacctgttcgcgggtacggcgcagaatggcgcggatgcgagccacgacttcctcgaggctgaacggcttggtgacgtaatcgtcaccgccgacggtcaggcccatgatcttgtcttgggtgtcgtcacgagcggtgaggaacagcacaggggcgttaatgccttcctggcggatgcggcgggtgacggtaaatccatcgatgtcaggcagcatgacgtccaacacgatgagatcaggctgcactttttcgataacctcaatggcttcggaaccggaagcggcggtgtttacctcgaatccggcgaagtgtagggaagcgaccagcagttctcggatggacggctcgtcgtcgacaacaacaatcgatgcttcaataggcttactcatgcttcctagagtgtcgcgctcttctgggcgtttcctgaatgtcatcttggagttcggccttggaatccttcttgatctccttgcgccgacgaatcaccaccatgaccacgatgatgatgaccagcgccaccaacaccacacccatgatgattatgcctacggtcaccgtggatgatgaggtggaggcttttttggatttcacgatttgatccatcattgccgttgccgcgccagaccagctcggcgggttttccagtaacggctgctgtgcggcttcggatagcttatcgacggttttgttatcgagaagccacttatcggagttcttggacacgacgaccaccaggttgccgtcattcgaggccacggcaagcatcactgtgttcggcttgggattcatggactccatcacggttgccgcccagtcttccggtttctgttgactattgaaactggaaagatacagcagatgcacgtgtacaccggtttccttctcggttttggcgatggcatccgcgacttcggccgcatgggagcccaggagattttccgtatccgtgatgttctcggtgatggtcacgccgctgtcggtgctgctgctggagctgtcagagctgtcgcccgagttatccccataggcatttgcggttatccacattgcgttcatcgctactgcagcaagggcgcaaatggcacaaacaagccattttcggaccatattcccgaaggccgaacaggacggctccgaagataggaccacaatagttgtttttccgtcttcccgattcgttgttgacatatcctccaccttagcggccggtattggcaagcggccgccatacataccattaaccctctagaaaaggagcaacgatgccccaatatcaggtagattccgagcgaatccaatcatcctcggccgcagtggccacttcgatctcgcagatcaggcaggccgtgggcggcatgtacaccaatctcaatgccttgcaggacgcatggcgaggttcggcggccacccagttcaccgcggtagccgaacagtggcgtgcggcccaacagcagatggaggcctcactcgagtccatccaacgctcgctgacgcaagcctccaccgtgtacgctgacgccgaaatccaagcttcgcgcctgttcgccagctagtttcttggctctcctccctgaggggagctcgatcgcgaagcgaaactgagggagtatccctacaccgcagctccccttagtctcactgcgttcgacagctcccctcaaagaggggagccagaatacaaaaaaggggactcccgaaggagtcccctttcagctcaatcagctagcgatcgcttgcggatcagtagcccatgtcggcaccggcggccggggcagcaggcttcggctccggcttgttggcaacgacggcctcggtggtcaggaacagaccagcgatggaggcggcgttctgcagagcggagcgggtcaccttgaccgggtcggtcacaccggcggccagcaggtcttcgtaggtgtcggtggcggcgttgaagccttcgccatcaggcagggaacggacggtgttgatgaccacgtcaccggacacgccggcgttctcggcgatctgcttgatcggggcttcgatggcgcggaacacgatggcggcaccggtagcctcttcgccggtcagggaggcgacggcctcggccttctcggctttggcagcagcctgaacgagggccacgccaccgccgggcagcaggccttcctcgatggcggccttggcgttacgcacggcatcttcgatgcggtgcttgcgctccttggcctcaacctcggtggcagcgccgaccttgatgacagccacgccgccggccagcttggccagacgctcctgcagcttctcacggtcgtaatcggagtcggtgttctcgatctcagcgcggatctgggccacgcgagcgtcgatgtcttccttggagccagcgccctgaacgatggtggtctcgtccttggagacgatgaccttcttggcgtggccgagcacggaggtgtcgacggactcgagcttcaggcccagttcgtcggagacaacctgagcaccggtcaggatggccatatcctgcagc

SEQ ID NO: 1883 - DNA, 3326 bp, Unknown
  MAG_14  MAG No. k141_68363
ctcagcacacttaccggccacggattttgcgcgctggtttcagcggcgcgtgcaggcagctgatcgatagggcgaggctcattcggcagattgatggtgccctgatcaggcgcgaaagtgccttgacccggctcaaagccagccgaggccagtgaagcggcggtcggtggacggccggtagatgggtagcccattgcagtagtcatgcactccactataagtgcgttggttgatgacggtaaatatttaccgtcgcctgaaaacggtgtgatgatgaatgcgagaaccgtacgaagcgatgtatcagccgatgatggagatggtctggtgcatcagaagaaaggagtcattatggcgaagaaacgggtgctatgaagaggagtgagatatgcgttgcgctgacgattgagagtcgttagtgagctcgctgtgcgacacgcgagcagaaaacagttacgctaatcacacacttgtggttttggcggaaaatagccgaaaaccctataaatagttcgacacaccactgttgagcactagatatagtggtggagatgccgtattcttctagaggttcaaaaaacgacatcaatgtaatttcgtgtggcccacgtcgagtgcggccaaaatgcggaactcaggagagtgttcgccttataggaaaggggtgcccgatgggcgcacaggtgttggaggaaatcgtcaccgataacgagaccaaggtggccgccaaggcctccaccgtgctcgttgagaagcgtgatggtcgtgtggtcgacttcgaccccattaacatcatctctgcggtcaagtctgctttcggtgacctgaacaaggaagtcggccccgaagaagatgccatgatccgtggtttcgccaaccaagtcgaaggcgaaatcaaggggcgttacgccggccccgccaagatcgaggacatccagaacctcgtggagcacgccctcattgacgcccacctgtacgatgtggctcgcgcctacaccaactaccgtctcgacaaggacattcagcgtgccaaggccactgatgtcaacgaggccgtttcccgcttcatcaaccacgacccgaccctgattcacgagaacgcgaacaaggattccaacgtctactccacccagcgtgatctgctggccggtgccgtgtccaaggccgccgcgttcaacatgctgccgccggcggtgtccaacgcccacatgaagggcgacattcacttccacgatgccgactactcgccgttcactgcccagtccaactgctctttgccgaacttctgggacatgttggccaatggcttcactcttggcaacgctccgatggcttccccgaagtccatcgccattgcggccacccagattacccagatcatgaaggacgtggcctccagccagtatggtggccagaccgccaaccgtgccgacgagcatcttgcccagtatgccaagaaggattacgagaagttcctcgaggaagctcgtgagaccatccccgacggcatgccggttgaattcgcccgtcgtcaggtcgagagcgccaagaggaacgagcccgccaagctgcatttcggttcccgcgaaccgctgccgatggacaccccgttccacaccgacgttgacgaacttgagcaggagcgtgaaatcctcgccaagattcgtacccgcaaggccatctatgatgccatgcagaccatggaataccagatcaactccaaccgtgtgtccaacggccagaccccgttcgtgactgtcggctttggtctcggcaccgactggttctctcgtgaagtgcagcgcgcaatcctgctgaaccgtattcgcggcctcggcaaggaacaccacaccgccatcttcccgaagctcgtctttactgtgaagcacggcgtgaacgccgacccgggtgacccgaactacgatctgaagcagctcgccctcgagtccgccaccaagcgcatgtacccggatgtggtgttctacgagaacatcgtcaagatcacaggctccttcaaggctccgatgggttgccgctccttcctgcagggttggatcaacccggagaccggcaaggatgaagaagatggccgtatgaacctcggcgtggtcaccgtcaatgtgccgcgtatcgccatcgaatcccacggtgacaaggctcgcttctggaagctgttcgaggagcgtatggaagtcgcccatcaggccctccagttccgcatcatgcgctgcaaggaagccaccccggtcaacgccccgaccctgttccgcttcggtgcgttcggtcgtctcggtgccaacgacaacgtggaccagctgttcaagaacgagcgtgccaccgtgtcgctcggctacatcggccttgccgagaccaccgcggtcttctacggcaagaactggattcgcgaccacggctgggatccggaaggcaaggagttcgcgctgtccatcgtcaagcgcatgaacgagctgtgcaagcagtggagcaaagcggagggctaccactattccgtgtactccactccggctgaatccctgaccgaccgcttcaaccgcatggaccgtgaaaagttcggccgtatcgaaggcgtgactgaccacgacttctacaccaactccttccactacccggtgtggttgcagcccaccccgatggagaagctcagctacgagaaggacttcccgtactacgcttccggcggcttcatcaactactgcgagtacccgtgcctgcaggacaacccgaaggcgctcgaagccgtgtgggattacgcctacaacatcggcatcggctacctgggcaccaacaccccgatcgaccactgcttcgtgtgcggcttccagggcgacttcgagccgaccgaggaaggcttcaagtgcccggagtgcggtaactccaacccggacaagtgcaacgtcaccaagcgcacctgcggctacctcggcagcccggtccagcgcccgatggtgcacggccgtcacgaggagatcgcccaccgagtcaagcacatgagcggcgaaaccggtcgtgtgacgctggatgacggcaccacccgcgagtggttcgaagaggccaagtagggtttatacttgctccccgctgacgggaactgtcgagcgtaagcgagactgagggtggtcatcctttatggtgttgaccaccctcagtccgtctgatgacggacagttcccgtcagcgggagctaatgctttccgtaaggagggaatcatgccggagttgcatacgaccaagcccgaacccaagcgccatgactttgcggccagcgagaccgggcgtggcccctccgtaccctccaacggtcttgc

SEQ ID NO: 1884 - DNA, 9818 bp, Unknown
  MAG_14  MAG No. k141_68632
ggcaagggcaccttcgtcggttccctgtcgctggaccctatggtggaaacgctcgccttccggtcgatggcgtcggtcggcaagaatttcaccgatctgcaggacgtggtcgaactgcggcgcttcctcgacctgggatgcgccgaggaggtctgcgcgtccctggcgggaaccgagcagccgcgcctgacggaacttgccgagcgcatgagcgccgaagccaaggaaggcaagacgttcaccgggctcgacatcgaatttcacaggggaattctcgattcgctcaacaacaccgtggccaagcagatggtccgctccctgtggctcgtgcacatggccgtgctcccccagctcggactggcggtttccagcgaacttgaccgtaccgccgacgcccatcaccgcatgctcaacgcggcgctggccggcaatgtggacgactaccgcgaggccgtgttcgaccattacgagccgatcgaatcgattctcaagcgtcgcatcgtccaggagcagtaaacccgaaaccgcgggccgattggcgcgggcaatccagtcggcccgaccgacatgcgacacgccccttcaaaaagtaacccgttacacgatccgacggcccgcgcaccacaccgcggtcacggtgagcgtgccgggattggtgagcagcaggtcggcggcgtagccgggggccaccaggcccagcggcgcgccggttacggggttcggccgatcaaggccgagcgcatgcgccggggtgagcgtggcggcttcgagcgcgtcggtcaggcccatgccgagctcgcgcacggcgcgctgcaccgccacttcgaggatcagcgtcgagccggcgatcgcgccgttcgacaccagccgggcgtggccgcccaccacgttgacgtccagcgcgcccagtttgtaggcgccgtccgcacaaccggtggcggccatcgcgtcggtgacgaacgcaatgcgatgcggcgcgaaacccagtgccaggcgaagcgcgggattggccacgtggaagccgtcgttgatcagctcgatcgtgacgcgcggatcctcgaccgcggccggaatcgggccgggctcgcggtggtggatgccgttcatcgcgttgaacatgtgcgtcatgatgcccgcgccggcgtcgatcgcccggcgtgcgacgtcatagtcggcgtcacagtgtcccacggcggggaccacgccggccgcggcgaagcgccggatcgcgtccatgccgcattcgcgctcgggggcgatggtgatctgccttagcgtgccgtcggcggcctcaagcagacgctccacgcgctccggggtcggatcgcacaggcagttcgggtcatgcgcccccttgcgggccaacgccaggaacggcccctccagatgcgagccgagcacgtcgggccgcgttgccatcacggacctgacgcattcgaggttccgcgccatcacatccagcggattggtgatcagtgagagcacctggcgggtggtgccgtgcagcatgtggtacgcgcgcgccacggcgatgccctcggcaccgtcgtcgaacgaacgctcccaggcgccatgcgcatggatgtccacgtagccgggcgtcacgagcatgccgccggcatcgacctcggcgacctggtccccgccgctgagatgggcgatgcgggtttcaaggtcagcgtcgctcgtgcccacggcgtcgattacgccgtccgtcacgctcacccatgcgttgagctgcacgccacgcgcatcggccttgactgcattgcgaatgacgaaggttcccgccctggcggcgagcgcatccgcgaccatcgtcgcctgatagcgtttttgcatctgcgtttcctcagatcttctgccaggcgggcttgtgctcgtaggaataccggtagtagtccttgccgcgcagtttcgaggcggccgcctcgtccacgatgatcgtagcgtgcgggtgcagctgcagggcggatgccgggcagtacgagctcacgccgccctccacggtctccgcgaccgcctcggccttgcccgcgccgaacgcgagcagcacgaggtggcgggccttcatgatcgtgccgatgccctgcgtgatgcagtgcgtgggcacctggttgatgtcgttgtcgaagaagcgcgcgttgtcgatgcgggtccgctcggtcagcgtcttgacgcgagtgcccgaggcaagcgacgatccgggctcgttgaagcccacgtgcccgtcggtaccgatgcccagaatctgtacgtcgatgccgcccgcggcctcgatcgccgcgtcatatgccgcaccggcgccggcgaccttgtcgccgtcctccagcgcggtgccgttcagcgcgtcgcccggcacgtgcaccttggccgggtccagtcccagcggctcgaccaccgtgcggtggatggtcgcatggtacgactcggggtgcgtcagcggcaggccaatgtactcgtcgagcgcgaaaccgcgcaccctggatacgtcgattccctcgtccctgacgattgtcgcgagcgcccggtacgccgccagcgggctcgagcccgtggccagtcccagcaccgcgtccggcttggccttgatcagatcggccacgcaacggccatacagttcgccggcctcctgctcggatttgacgatgatcacttcagccatggcaattcctttcgtatgagcctattggcgttgcgccgcacgaacgccgccacgcgcttgcatgcgggcgggcattcgcgcaacgcatatggttgtgcggcaatcaggcctcagtggaggcggaaacctcttcgggggtgcgttccagcttcatgccgcactcctcgagcacggtggcgatgcgtttcacattctcgcccttgagcggcagcaccggatcaggcatctggttggtgtcgaacacgcccagcagcgccattgcggtcttgaaggcgcccactccggagccgaagcccgccacgccctgcggcacggtgacgatgcgcatcagcgcggccagccagtcctgctccttcctgaccgtggtccagtcgccggcttcggcggccttccacatgcgtacgtagccggtggcctccacgttggccaggcccggcacggagccgtcggcgccggccatgtaggcaccgtcgaccacaacctcctggcccgtcagcagcgtgagcggatggccggccttggcgttgtcgtccacgaggaagcggaaggccacgtcgtcgttcgaggagtccttgacgcctgcgagcacgccgtccctgcccagcttgaccagcaggtcgcccggcagcttggtatgcacgcacaccgggatgtcgtaggcgaacagcggcaggtccggcacggcggcgtgaatcaggcggaagtggcgctccacctcggccatgccgcccagggcatagaacgggcacgtggccacgatggcggacgcgccgagctccttggcctccttcgcatgctcgatcacgcggttggtttcggtgtcgatgcagccgacgaacaccggcacgcggccgtccacgacctgaatcacggtctggatgatctcgcggcgacgcgcatcggtgctgaacgccacctcgccggacgagccgagcgtgaacaggccgtcgacgccggcgtcgatcatgcggttgatcgagcgggcgaagctggccttgtccacttcgccggaagcggtgagcggggtgacgacggggggaatgaccccgcggaattgggttgccatgatgatgtgtcccttctttgaggattgtctttgaggattaaaaatggactgctgaaattattcggcgttggaatcgggcgaacgcgatttcaacgcgaggaaggcctcacgcgcattcggccgcggtgggatgcagcagcgagggcgccgcgtccatgaggatcctggtgtacccgtcctgcgggttgcgcatcacgtccatcgtcttgccgcgttccacgacggtgccgtggttcatgaccatcacctcgtcggagatgtagcggacggtttggatgtcgtggctgatgaacaccatcgacaggccgagcgtcctcttgaggtccgagagcaggttgaggatctgtgcgcgcaccgagacgtccagcgcggaggtgggctcgtcggcgatgatcgcgtccggcttgagcgacagggcgcgggcgatggcgacacgctggcgctgcccgccggacagctgcccgggcagggcgcccagcaccgaggtgggcaggccgaccatgcggatcagctcgtgggcgcgcctgtcgcgctcctccttggaaccgagcttgtggaccaccagcgggtcgagcagctggtcgatgacgctcatgcgggcgttcagcgcagtcgccgggtcctggaagaccacggagaccacgcggccgatgtccatgcgctccttggcggtgcggtgggtgacgtcctggcccttgaacagcaccttgccgctggtggcctgctgcaggccgcacatcacgttggccgtggtggacttgccgcagccggactcgccgacgatgccgatggtctggccgggcatgagcttcaggttcaccttgttgaccgcggtgatcctgttcttgtggaacagccccgatccggcgcgggtggtgaacaccacctcgacgtccctgagctcgatgatcggaacgttgggatccttcctgggggtttcggcggcgtggctcatcgggcacctccttcctgggtggaaactgtcgccgcggcgggcgtgacgtcggcatcggccggcagggcggcgtaatagtgatgcgtgccgggcacccgttcgaagatcgggcgcgtgttgaggccaacgtccgggtggctggagcggggagcgaagcgatcgcccttggggaagtcggccggggacggcacggttccgggcacctggtgcaggcgcttggcccctgcctcgatcgaggtgaccgagccgagcaggccgcgggtgtactcgtggcggggatcggtgaggatctccttggtgaagccctgctcgaccacctggccggcgtacatcacggtgatggaatgcgccaccttggccacgagggcgagatcgtgcgagacgaagatcatcgcgaagccgagcttttcgcgcagttcgttgagcaggtcgatgacctgcttctgcaccgtgacgtcgagcgcggtggtcggttcgtcggcgatgatgagcttggggtcgcgggtcagggccatggcgatgagcacgcgctggcgctggccaccggagagctcgtgcgggtaggattccagcgtgcgcttgggatcgaggcccacgagctcgagcagttcctcggcggagcgggtgccgccgcgggaggtgagctgcttcatctgcgacttgatcagcatcgaggggttgagcgaggagagggcgtcctggtagaccatggcgatctcgtggccgcgcagggcgttgtgctccttgggatccatgccgacgaggttcttgccgtcgaacaggatctcgccgctgatctcggccttcgggtccagcaggcccatgatggccagcgaggtgatggacttgccgcagccggactcgcccacgaggcccatggtctcgccgggacgcacagagaagctcacgtggtccaccacgttcacgtcgccgtggcgcgggaacttgatgcacaaatccttgacctcgatgaccggggcggccgtgctcgtcggctcgaaccggtcggtgcgcttaagttcggcctccttgagtgcggcgagggaatcggccagggattcggcctgctccctgtaggcggcgactgggtcggtcaggaggcgatcctccctgcgctcggcctcggcgtcggcggcggacttggtcaccggggccgtcggggcggccaccatggcgtcggtgatgccctcggacaggatgttgaggcacagcacggtgatcatgatcgccagacccgggaacatggcctgccaccagtagccgaagatcacgccggccttggcggaggacaggatgttaccccaggtcggggtgggctcgggaatgcccgcgttgatgaaggacagcgacgcctcgaacacgatcgcgtcggcgacggacagggtggtgaacaccatgaccggggcggcgatgttgcgggtgacgtgcttgaagaggatccacggggcgcgggcgccggagacgatgaccgcgcgcacgtagtccttgccgtactcgctgatgatgttcgccctgacgatgcgggcgatctgcggcacgtagagcacgccgatcgagatgatgatgccgatcatcgactggccgaggatcgagacgaacacggcggcgagcgcgatgccgggcacggacatgaacacgtcgatgacgcgcatgatgagctcggagatccacgtgcgggtcacggcggcaagcgcgccgatcagtgagccgacgatgagcgcgaagacgatcgagctcaggccgatgaccagcgagtagcgggcaccgtagagcacgcgggagagcacgtcgcgaccgagattgtcggtgccgaaccagtgttcgccggtgggcgcctggtagctcatcgtgatctcgagcggatcgtgcggggaaaggacgggtgcgaagacggcgcagacgatgagcagcgcgatcaccacgaaggagatcttgcttcccacggtcatcttgctgaagcgattgaatttgacgccgggcctgcttgcggcctcggccgccttgttcttgccgaatagcatcgtcacaccgtcctgattcgcgggttgatcagcacatagagcagatcaacgatgatgttgatgatgatgaacgcgagggccacgacgagcaccacgccctggacgagcatcggctggttgccgttgatgccgtcgaacatcgcggtgcccatgccgggcagggcgaagatgacctcgatgacgatcgcgccgcccatcaggtagccgatcttcatgccgagggtggtgactggggtgatcagcgcgttgcggaacacgttgcgcgagacgaccacgctcttgggcacgcccgcgccgatggcggtgcgcacgtagtccttgtcgagctcctcgaccatcgaggtgcggatgatgcgggtcagctggccggccacgggcaggccgagggcgaaggacggcatggccatgcgggccaggtacgcgccggggtcctgcgtgaacgggacgaggtcgccggagccggggagccacgccatcttgatctgcagcacgtagatcagcagcacaccgagccagaaggacggggtggcgatggcgatgatcgaaaccacgcggatgatctggtcgacccaggtgtcgcggtacagggcggcgagcacgccgaacacgatggcgaacacgatggcgatgatcaggccgatgaaggtcagctgcagtgtgacggggaacgcctgggccacgcgggccgcgacggaatccttgttgacgccgtacacgcccatgtcgccgtggaacaagccgacgatgtagttgaagaactgctgccaccacggcaggtcataccccatctcgtggcggaaggcggccagcgcctcgggggtggagttctcgccaagcgccgcgacggcgggatcgtactgggagaaggacatcaggaagaacaccaaaaaggtgaccccgagtgccatgaacggcaaagcgatcagacgcctgcccaacagtcgtaacagattgctcactgtaaaagctcctatgcgtgcgccatcggcggttcagatgcgccgcgggcggggccggggcatccgcacgttcgcaggacgccccggttgccttgccgcccgttcggttcagccggtgatggcatatgtggattgcgtcagttcagcttggccttgaccaggttgatgccggtggagccaatggcctcccaagaggagaacgcgcccttcctgacggccgtggttgtcttgcgatggaacagcgggtagagcggcagctcttcggagagcaggtcgaagcactggttccagtactcctgtcgttcggaatcggaagaagcggcagtggccttgtccatcagctcatgtagctggttgtagccgtcagagcccttccagaaggagcgctgcttggtccaggcgttgtcgccgtaccaccagttcatcagcaggtcggggtcgttgccgaacacagagggatcgccgggggcgaggaccatcgagtagtcagcgtcgtccttgtccgtgatggacgggtacagcgcggaggacttcatcgactggatgtcgacgttcatgccgatctcggccaaatcgttcttgatctgcggtgcgagctgggtgatccaggaatggtcggtggtgtacagcgtgaagctgatcggcgtggtgaccccggcttcggcgagcagttccttggccttggccgtgtccttggtgtagacgttcttcgcctggtggtagtactgcgaatccttgggcaggaagctcgtggccgcttcggcctggccgctcatctggttggagatcagcttgtccacgtcgatcgcgtagaacacggcctggcgcacgcgcttgtcgtcgaacggcttcttcttggtgttgaacatcaggaacggcaggttgaagccctgcgcggtcttcagctcggagccggacgactggagggtctggagcgcctgggccgggaccatttccatgatgtcggtcttgccgccctgcatggcggtgacgcgggcggtgtcgtccacggtcacgttccacaccatgttcttggcctgggccgggtaggagccgttgtacaggtcgttcctctcgaatttgacctgctggtcggtgatctcggcgtacttccacgggccggagccgatgggcttgttcttcaggtcggcatcgctcatggacgacgggactatctggatcaacgccagtcgctgcttgaagagcgggaacgccttcttgagcttgaacgtcacttgggtgtcggacttcgcctcgacggaatcgatgaagtcaagcatcgaaatgtacagcgagccggtggcggtggtgcgctggtaggagctgaccacgtcattggcggtgacggcggtaccgtcggagaacttggcgccgtcgcgcagggtgaccacgtactcggtgtcggagaccttctccggatcgcccttggcaagagcggcatagggcttgtaggtgctgtagtccagcgcgtacagcggttcggtgacgtgccagttcgcggccatcggcagggcgccggaggtggtggacgggctgaagtcgcggctcgcataggcaacctgggcggtaatggtgtccgccacggcagttccggtcttcgcggcggtctgggtgccgccaccgcatccggacagcagcatcaggctggcgacggccgcggccacggcggccttgaactttccgtttctcttgatcatgcgatctcctcatcattgagtgaatttcgaatcaccgtccgacagacgacgcgatcctttcctaattgcttcattgaccgttccccggcctgcgtccgcttcggcctttccgcgttacggcggaccattgcggtttgtgcgggactcctgcggggaaccaccaacatcgttgtcgaacctccttaatggtaagacgtctgatgtctgatttcaaatcggcgtgttgaggaattcactcgtcaaggcccctccgcgctgatctgcctatacttcaccagccttgaatatcggcaatatttcgggcttcgccgaccgttatcgttccgaaaatgtttgtttaccattctgcaataagacatctgacgtctgttaacataacggcaactttcgccgccgacgaacgcggcaaacacgggatatggcgccaaacaacaagaccgccgtggtgcggtcga

SEQ ID NO: 1885 - DNA, 13920 bp, Unknown
  MAG_14  MAG No. k141_69137
gtgccatcgcccataggcaaccgcccgccggactcgacaccgctcggttcgccgacgtctacagcgcctacgagcaggaaaagacctcgcgtggcgaaatcgattttgacgatattctgctgctcgtatgccatatcatggatgattttcccgaagccgccgcccaaattcgttccaccatcggctggctcaccgtcgacgagtatcaggacgtctcgcccctgcaacacaggctgctgaccctgtggctgggcgggggaggacctgacggcaagagcgcgatgaaccgcaacgtatgcgtcgtgggcgatccggcccagaccatctactcgtttgccggtgcttccagctgggatctgctgcgtttcgccgatgaattcgggccgctcgccgccgatgtcaatctcaacaccgactatcgttcgacgccggaagtcgtgaatctcgccaaccgggtgcttgcggccgcgccgaaccgtgaggattacctgaaactggtttccgcccgcgaatccggcccgcgcgttacccgaaccgcttatgagagcgatatggaagaggcgcagggcgtggcggcacgtatcgcccggttggtcgccaacggagccaagccgtccgattgcgcgattctcacccgcatcaacgcccaacagccggtattcggtgccgctttgcgcgctgcaagactgaaataccgcgttcgtaaggattcgggatggcaatcatccgcgctcgccgacgatgccgcgtccaaacgtgcgctattggaggcgatgggtttggacgccaccggacttgccgcaaacgacgatcccggcgttacgatttccacgatccacgcatccaagggtctggaattcaagcacgtgtttctgatcggctgttcggaaggactcttgccgtacggttcgccggaaacgggggatgcgctggaagaggaacgccggcttatgtatgtgggcatcacccgagctgaggattcgctgcatttgtcgtatgcgcggaccaaggatggttatggagcgcaacacagacgcccatcacgatttttgtgacgggcgtcggtaatgaatgtgaatgttcctgaacgttcaggaacgggaattggctgaaggacggttgactatgcctgcgtatcctccgagttgccgttgccgccatcttctccatcttcgccgagcagcttggacagttcggcatcccaatcgatatcgccggtcttgccatctgcggcagggtgggaggcggaaccgttggcatcggaagaggagcctgaaggggcgtcggatgacggagacgcgccatctgcgggcttgtcgctaggcagcgaaggcagcagatcgggatgcgaccacttggcgtcacggccttcagggccttcggcggcggtgatcatctcccacaatccggcggcctcgcgcatgcgcttggggcgcagctgcaaaccgagcagactttcgaacgtacgctcggcggggccacccatcgcgcgctcgcggcgcatcatctcacgcaactgttcgatatgaggcagatgggccataccggcgcgccacaccacgcaatccacccagccctcgaccatcgccagcagcgattccagcgaagccagcgcctcgcgctgttcgggagtgtcggggatgccgaccttggtgagattcaccgcgccggaaatcgactccggatccatcgacgtggcgtcacgcagctgttcctccatcgcatccagatcgatggagatgccgcgtgcgtacttgccgatgagcgcctcgaaacgcggcatcagccacggtaccgaggcatacaggcgggcgtgagccatttcctgcagggccaggaaggaaagcacttcagattcgggaattttctcggtggtctcgaatccggagagcgcagcctcgaacgcggcggcgtcggcggaggcatcggagccggagacttgggcggtaccgtcagttgccggagtatcgctgttgccggccgaagtgaagccaatgggattggcggaagcgtcggtggatgtggagaacggattgaccgagtcggttgaagtgccggccgtatcggcctcgggcgcaggagtctcaccgttcagcatcttcgcgtattcggtggcgttctgggcaatcagtccaccagccggattcttcagcaatgcgatgccctgatcgaaactgccatgcacttcatggctcagattgccggccgcatgccccaactgcatggcaaaggacgtgttgcccagcagcttcatcagctgggctggatctttcatgccgtcgggaatcggaatcggcaccggtccggcgaacatgccggcgatctcgccatcgccgaacgcgccgccaagacgctccgaaatcaccgaagccaaagcgtcgttcatcgactcggccacaggagctgcgaacttcgcccactggtcgatggtgccttccacccagccggcgcgggtcagcacatccggatcgccgggcgcgggattgaactcgcaggcggtatccagccacaggttcgcctcactcatcgcgcggcgagccgcctcgccatccacggcggacacgctggacgcggaaccggaggcgttggcctgctgcaaggcaatcgacttggcgagcttgacgttgatcggcccttcctcgacagtgcgctgcatatcgcccatcgtgttgagtccgccggcgctgaacgcggccatcatctgctggacttcggatggattgggcagtcggctggggtcctgactcatcagctgttcacggatctcctcaggcaactggctgatctgctgccaggccatctcgccctgaatggggccgaagcatttgatcagccactcgtgaatcgcgttgtcgtccatgcgtatccttctttgccgcggtgtgttaccccaagtgtagggtctgcccgggcctgttcgctcgtggccgagcaatattttcggtttatgttcgttttcggctgatttcggccctccgcttacactgtagggtatgtttgcacgccacaggaatcaggaaccagacttcgtccaggagcagaagagcccgactgcggattcggaagcgggggatgggcgcatgccatcgttcgaagtgaagcatgattcgcgcctatctcgtggaatcagccgtgctcgggcctatgcggccgctcgtccgaaacgccatttcgtcggtgcattcgccgtgttgcttggtgtggtgattctgctgctgcccagcccgtacgtcatcgagatgcccggacccacccaagacgtgctgggcaaggtcgaggatggtgcggttatcgacatcaccggtaccggcgtgacgacgtataaggattccggcaagctgctgctgaccacggtgaacgcgtccggcgtgcccgggtacccgatcatcaacgcgcaggccgtctggggttgggccaatccgcaggtggaggtcatgccgcgtgaggccacggtaccggtgggccagagtgcggaccagtatcagaagaaagtcgaacaggacatggccggttcccaggattcggccagtgccgtcggtctggcgtatgccaaagcccatgcggacgaactgggcattgacgccagtacattgcaacacgccaaggtgacgatgcacgtggacagcatcggcggaccgtccgcaggcatgatgtacacgctcggtctcatcgacaaactcacccccgccaacgagagcggcggcaagaccatcgccggcaccggcaccatagacaaggacggcaaagtcggcagaatcggcggcatagagctgaagatgcttggcgccaagcgcgatggcgccacatggttcctggctcccgcatcgaattgttcggatttggccggccgcgtgccggatggtctgcgcgacgtcaaggtcgccacgctggacgaggcgtatcaggcgttggtggccattggcaaggggcaggccgacgatttgcctcattgcgaggcatgacacgcgcggccagtcgttgtttctggtgagacgactcgcatgggtctgcccacaatgcggcgattttcggccgcgttaacgcatttgttcgcgaagacttgctaatgtgtcccctgtgaatcaaacggcatcacagaacgctgaagaatttggtttcgagcccggcgatatcgtccaggagtggctctgggacgacgatgtggacgattccattcgtgcccagattgaagagctcacgggcgaggatctcgtggacgaggattacgactccgctgtggacggcgtcatcgtatggtggcgcgacggcgatgatgaggacgaattgtccgatacgatcgttgacgcctacgcggtactgggcaatgacggcccgctgtggatactgactcccaagcccggccgcccgggtgccgccagctcctccaccgtgcagtccgccgcacagaccgccggtatgaacgccgccaccccgctgaccgtcagctcggactggaacggcatccgcctgcgcgcattcggcaggggccgctgataagcctcaatcaatacgcttgactttaagcgtgttgactggcgtcgcgtgctgcgtagtgctgctgggcgtgactgaatgtcatcgcgattgagcgctacggcacgcgtatgcgacaccacgtgtcgcgcagtgccggccatacgctattgttgtcatttgcgggcaattagctcagttggttagagcgccacctttacacggtggatgtcgggggttcgagtccctcattgcccactttcatttttcatcacttcgtgcaatcccctcattccacagacatgggctgtgacgatattccctgacagtcttcggcaaggggttctgaaatctcagtgagatgcgcgcagaaggaaaccggcagtactgctacaaaatcgtgaatttcggtcttcttggtcagatgcgtctcaatagtcacgtaaagttgtggcagagtgtttatatccagcaggaggtcgaatagccgatggcgcaggaacttcgtgaaggggacggcaagtcgggcatcgcacgtgcgggcaagcgcaagtgggggtatgaccccgctcaggtggacgctttcttggagcgcgcccatgctctgtatgacagcgagggcatgaatctcacccagcatgacattcagaacgtgtcctttgatttgcgcaagaacggctatgtgatcgcacaggttgacgccgcgcttggacgtctggaacgtgccgtggtcgataagcagaccacatgggagatcgcacagcatgggcgtgtgacgtggaaggcgaagaccgagaagctgtatcacgaagtccagaaccatgcggagcgtgacgagcgcgaacgcttcaagtccggagcgcccaagcagccttcgtacgataagaagcaggtggatcgtctggtcgaccagattgtggacaaggcggcggccgcattgggcgttgacggcgtgaccgaagacgatgtacggtctttggccgatctcaatgcgaatacggtcaacaatgtgatcttcacccagcgcaagggcaagaaaggctatgacgagcgacaggtcgattacttcctgaacgcctgcgtgcagttgctgagtcgcttggaatcctatgcacgtgtggccgatttcgtgtccggcgagcccacggctcctgcccagaccgccacgaacgtgaccgttcaagcgaacggcgtctcgccattgttcgcttccggaacgcagcgcccggcaactgacgaacgttttgcgccgtctgccgttgctcatgacgaatcattcgatgccctgcatcaggccgagcagagcttgttcactgctccggctccggttgctcccgcggcgccggccgcggcggcaccgatcgcctatgcgtcggctcctgcatcgttcgatgcttccacaagcaccaataacaccaatgcggaacagccggtttcctttgctcccgcagcatacccggtgcatacgtccaacgagtctgcggcgaagcccgtctccgagacgccttccgtggctcctaccgcagctgttgcggctgagcctcccgccagtgccccgtccgcaccggtttccggtgtgaccgctggcagcgccccctcgtttgctccggcacagtcgtcatacgaatccgcagctccgtcatcgaccccgtcggtgttcgcggaacagcccgtggatatggtgcaggacggttcctctctggccgctctcgcccacatggctgcggtttctcaggaacttccggcggtggatgcgccgtccttcgctcccaagatgcccagccttgatacaccgaatgcgctgaaattgaatgaggtaccgggttcggtttcatccccggcaccctccgccccggcagcgcaacctgtgaatagcactgccgacgaggctgcgtccgctgccatgccggtctcctttgctcccaccagcaagccggatcgtaacacgaactccattccggttcgcgtatccgatagtcagcctgcagacagcacggtctcccgtccggctgtggaatcatctgaatacgttgccgcctcccacgacacggaagcagctcagccgtcacaggataaggacgattccaacgattcgttcccgctgctgttcccgcttggcggtaacttcgattcggatatccccgacctgtcgttccccacactgaacaatgacgatacgaagaaggaaaagtgagcatagcctccaactccaccgtcatcattctcggatccaccggatccatcggcacccaaggacttgacgtcatctcgcgtcaccctgaacgatttaccgtcaccggtctggcggcgggcggagcacatatcgagctgctggcgcaacaggccgcacagttccatgtgcccgaagtcgcggtgtttgatgagaccaaggttccagcactgcaagcggctctcgcacaggccggcgcacaaggtgtccgcgtgaccggcggtccggattcggtcatcgccatggccggatccggtgcgaatgtcgtattgaacggcatcaccggctcgatcggcctcgaaccatcgatcgcggcgctcaaggccggttcccagctggcattggctaacaaggagtccgtagtcgcgggcggtcatctgctgttcagcgcgcaagtgcgcgagaaccagatcaacccggtcgattccgagcattccgccatctggcaatccctgcgctccggaacccacgccgaagtcgccaagcttgtggtcaccgcctccggcggcccattccgcggctggaaacgtgtcgacatggagaacatcactcccgagcaggcgctgcatcatccgacgtggaacatggggccggttgtcaccatcaactcctccacactgatgaacaagggcctcgaagtcatcgaggcgtcccgcttgttcaacgtgccgcctgaacgcatcgacgtgaccgtgcacccgcagtccatcgtccattccatggtcgaatttgtggacggcgccacgatttgccaggcttcgccgccagacatgcgtctgcctatcgcgctgggcctgtccgcgccggaccgcatgaccaatgtggccgccgcgtgcgactggacgcaagccgcaacttggacctttgagccgttggacgatgaggcgttccccgccgtgcaactggcccgccactgcctggccgcctccgagaagcatacggcggtgctcaatgcagccaatgaacaggccgtgcatgcgtttcttgatcatcggctgccgtacctcggcatcgtggacacggtcaaagccgtgctggaccagatggacgccgagcttcgtggtaacccgctgttcacggacgtggaggaaatgaaccagcttgagcttgaagcccgccgacgcgccgacaacctgataaacaagcaatgatgaataccttgaatacggaaaatcccatcgaaaagccgttccgcaaaaccggtgatccggtcgacctgaccagcgaatcgcccttgcacccgcgccgcaagtcccgccgcatcatggtgggtccggtgccggtgggcgggggagcccccatctccgtgcagtcgatgaccaacacgctcacggccaacgtacctgccacgttgcagcagatcgccgaactgaccgccgccggctgcgacatcgtgcgcgtggccgtgccgagtcaggacgatgccgacgcgctgccggaaatctgccgcaaatcgccgattccggtcatcgccgatatccacttccagtccaaatacgtgttccaagccatcgacgccggctgcgcggccgtgcgtgtgaaccccggcaacatccgtaagttcgacgaagtcggcccggacatctgcaaggccgccaccgacgcgggcatctcgctgcgtatcggcgtgaacgccggctcgctggacaaggaactctacgccaaatacggtggcccgactccggaagcgctggtggcctccgccttgaaggaagcgcacatgttcgaggacgtcggcttccacgatttcaagatctccgtcaaacaccatgacgtcatcaccatggtcgaaacgtaccgactgctcgcatccaagggcgattggccgttgcacctcggcgttaccgaggccggccccgcctggcaaggcaccatcaaatcctgcctggcgttcggtgcgctcttggccgagggcattggcgacacgattcgcgtgtccctttccgcgccgccggtcgaagaggtcaaggtggggtgcaaactcctggaatacatgggattgcgcccccgcaagttcgacatcatctcctgcccgagctgcggccgcgcccaagtggatgtgatccagctcgcatccgccgtcaccgaaggcctgaaggacgtgatcgcgccgatccgtgtagccgtcatgggctgcatcgtcaacggtccgggcgaggcacgcgaagccgacctcggcgtggcctccggcaatggcaagggccagatcttcatcaagggcaaggtcatcaagaccgtgcccgaagaccagatcgtcgacacgctgctcaccatagcgaacgatatcgccgcccaaatggaggccgacggccaagtgcccgtcaattccaccggcccggtcgtggtcccaatccagcatcccggtcactgattcggccgaataggccctcggcgtaaatatcgcggtcagattacaatagcgcacgtgtcgcaagaagaagagcatcgcctgactgttcgatccaagccgtggaccagcacccaccggctgatggtcagcctgcccatcttcattatcctgatcggcgtgctggtctccatttccaacctgaccacggtgccttggaacatcgaacccaccggccagtcgatggccacgctcaccgacgataccgaagtcaccttcgataacccgtccggagaaacgctgccggcgaaaggcacgtatgaggtcaccgagcgatacatcacgctgaacatgaccagcgacggcaatctgaccaaggagcctggtgatcggggcaaggccaatgcggacggcgtccaagccatcaaggtattgattcgggaacctcagaacgcatcaggcaagcgccccggcgtggtgttcatgcacggtgccggatacggcacctgtgacaactcctttggcgatgtggcctccgatatggcttcggccggctttgtgaccgcagtgctcgacaaacccgtctggagcaccaccgacatcaaccgcgattatccggcctcagccaaggcatatgatcaggtcatcgaatacctacgagcccaaagcgatgtagacgccgccaaggtcggcatctatgccacctccgaatcgacatggatctcctcatatctgctcgaggacgatccggacgtcgccttccagattcttctgagcccgatggtgttcagcccacgccaatcactgggatttttcgtcacccaggacttcactcttgtcggcgcgaacgaaggctatcgatccatcgtccaacgcgtgttcagcgcggacaccggcctgttcggactgaacaattccgacctcgccacgctcaaacccgccgcttacgccgtacccacctatgtggcttacggttcaaaagacgtgatgacggcgcaggtcgacggcgtgcgtgcgattctctacaacgcccacaaagccgataactggaacgtgaccgtgcgcagctatccggtcgccaaccatgtgctgcgtttgggggatgagtccgaagcgggcaccccgtttgcggacgcctatgtggacgatctcatcgattgggccgtcggcacttccgccggactcacgcagaccagcgaaaaggtggccggcaccaatctgtaccaatcaatcggtctgccgggcgctttgaaggcaagacgcgtcggcaccatatatggtgtgatcctgcacgtcacggtggtactgctgctgctcgcatccatcgtgctggcactggtggcgctgggccgcaaaatcgcggcggatgcccgatggcggcgcgagaaacgcgaggccaaacgtgcgggcatgctgataccggaacggcctgtgatactcggtttcgcacatggtttcggcaacgcgctgctgactttgaccctcaccactcttgccacgctgctcatcttctttgccggacttggacaggtgattatgggtgtggtcaaacttgcatggggcagcgctcctaccgagacgccgggcgtcatgtattggagctggccggtcatccaagtggtgtccgtgctggtgctatgggcttggtcccgcgtctttatgcatctgatagaggtcgcttccgcccgcggactgattcagataccccctcgtcgtgaatccgttcgagacatcgtcaccggtgccgacccggtactcgcctccacccgtctgggccgagtcctgttctggctggtggccttcaccatgctgtacatactgttggtgttcgccttctggggcctgtttatttactgactacttcattgagtagagtctgccgggcgtcgcggggaaaggagatgagatgtcgctgtaccgagacgaaggtgtggtgttgcgcacctccaaactgggcgaagccgatcgtatcatcaccatcctgacacgtgggcatggcaagattcgggcggtcgccaaaggcgtgcgtcgcaccaaatcacgctttggtgccaggctcgagccgttcatgcgagtcgatgtgcttatcgctgaaggccgctcgcttgacgtggtctcccaggctgaagcggtcgccgcttacggtgctccgatcgcggcggattatgcggcgtatgaggccgccaacgtcatcgtcgagaccatcgataaactcgccagcaccgaacacgagcagctgacgaaccaatatcggctgctcatcggcgcgttgaacgcgctcgccaaacaatcccacgccccgcaagccataggcgactcctatgtgatgcgcgccttggccttggccggttggacgccacgattgggtacttgcgtggtatgcggcaaggcggagccggcgtacctgtccatcgcgtccggcggcgtgatgtgcgaagccgaccacactaccgatgcgcgccgtatcgcgccgttcgtgttaaaccagttcgatgcactgattcgtggcgattggtcggtgcttgatgccgcgcctgtggagcgggttgtgcaggagttggttgaagattggggggagtattacctcgaacgcccgattcgttcgctgcgcttgatagattcatgagtatggcttttgagaacgttgattacacgtcgttggacattcccgcagctccgttcagcgaccttgcccgtattcccgacttccccaagaacaaggtaccccgtcatatcggtgtgattatggacggtaatggtcgttgggccaagcagcgcggcatggtccgcaccaatggtcatcaggccgccgaaccggtggtgttcgacactatcgccggtgccatcgaagccggtgtgcggtatttgagcctgtacacgttctccactgaaaactggaagcgttcgccccaggaagtgcgcttcctcatgggcttctcgcgtgaaatcatccaccgccgcgtggaacagatggacgagtggggtgtgcgcgtgcgttggtccggccgtcgccccaagctgtggaagtcggtgatcgacgagcttgaggccgccgaggagcgtaccaagaacaacaaggtcatcgatgtggtgttctgcatcaactatggtggccgtgctgaaatcgccgacgcctgcgccgccatcgctcgcgaagtgcgtgatggcaagatttccggcgaccgtgtgactgaaaagatgattgccgaccatctgtacaatccggacgttcccgattgcgacttggtgatccgtacttccggcgaacagcgcacctccaacttcctgccgtgggaggccgcctacgccgagctcgacttcgtgcccgaactcttcccggactgcggccgtgacgtgctatggcgctccatcgaccattacatccaccgcgatcgccgatttggcggcgtgaaataaagaacagccctgtggaccgttcgttcacgccgcctggccgaggccgataggacatgaccaggtaatgatgagtccggcgaagccggtccttgattgctggggggtgtgaaatagtccttgttaagcccctcaaaattgagggggctgagccgtaaaacaaacagcccgatgggctgtttgtaggcgaaggcgagacgagagtcgagccagaagaatgcgagcggcagcttgtccgtaattgcggtcgagctgtccgtgtagcggactgaggggagttaccggcacacctcagccatcctctctgcaaactcatccaaaaaacgtcccgaatccgcaccaagtgccacatgcacatgcggcatggaatgattcaccagcccaaccgggtctccggtggtccggcctcgtactccattgaaatcaccggtattggtctccgcgcgcaacgcaagatcaaaacaatcgaccagtgaagaatcaagtgcaaccgccgccgccaacggatcatgcaacggcatgccgccagagaacagtgcggggtcggcttccaaatttgccttgatggaaaagtccgcgagatcagccaagaaccgcccgcgcttggtccccgtcgcacgccactggtcggccgccgatcgcggtagcaaacactggtgagtcacatcaagtcccaccattgtgatgtctgcgccggaatgaaatacacgattcgcggcctcagggtcttggatgatattcgtctcggccaccgcatcccaacaattgccgggttgggtaagcgtaccgcccatcatcaccagcctgagtttcggtgcaatatccggtgcccgagtaatagccgcatccacatccgtcaacggcccggtagccagcacggtaacgtctcggccaaactcacgaacctgctcaatcagatactcaatcccatccgcagcatcaacggagcgcctccttttgccccagctggcgagagctgtcgatgtagccgactggggacggtccacaggccgagagcgacccacacgagaacaagaccccgacgccggatgagcatgagcgtcccctaccaaatacccgccaacagaaacaaccccatcgggcacatcctcagacatgtcatccccagacatatcatcaccaggcacaccagctccatcagccagagccccggcccctgccagccaagtattccccagtccatccttcccatgaaactgggcacaccctgcatcgggaataaacgcatcagcccaagaaggatgctcggagcccaaaaacaccggaatatccgcccggccaaacaaatcaagcaccgcgcaagtattggcataagccgtgttcgcatccacattgccataactggcgatcacaccgctcagctcgcactcatccgccgaccccaacaaatacgccaatgccaacgcatcatcaacacccgtatccatgctggcaa

SEQ ID NO: 1886 - DNA, 9567 bp, Unknown
  MAG_14  MAG No. k141_69525
agacgatgaggatcggggccatggccatcaggtagctggcaaacgccaccggatagttggcggtgaactgcgagctgaacacgaactgcgccagcgggatcgtctgatccgcggaattggacagcaggatcaacggcaggaggaagtcgttccacgcccacagcgcggtcaggatcgcgatggtggcgttgatcgggcccatcagcgggaagatgatggtccagaagatgcgccaggtggacgcgccgtcaatgcgggccgcctcttccagcgacaccggaatcgaacggatgaagccgatggcgatgaacaggttggtgcccaggccgaagatcatatacaggatgatcaggccgaacttgttgtcgaggttccacccgcccatctgcttggccagcggcagcatgatcacggagaacggcacgaacatggctgcgatgaagaagtagtacaggaagcggaagaaccgcttgtccatgttacgggccaccgcataggccacgaacgtgttggtcagcagggtgagcacgatggcgcccacggtgatgatcgccgagttcagggccgcgcgcggatagttcaccatgttcgaggcctcggcgaagttgccccactgccagctggtgggcagggcgaacgtgccggcttcggccggggttttcagtgcggtgacgatggtgaagtagagcggcaccagaatggtcaggctcagcaccgcgaccaccgcggtcagccaccagttgatcttatggtccttgcggaacttgtttttcttgggttgtgcagcaacagcgctggtcatgatcacaccttctccttgctaccgaagaacttgagctgaatgaacgcgatgatcgcgaggacgatgaagaacatcaccgcattggcggtctggtaggcgtattcgccaccggtcaggccgccctggtagatgaggtaggtgaccgtttccgtagcggagttcggaccgccaccggtcagggcgaccacctggtcgaaggtgcctaaggcgcccttcatcgtcaggacgaggttgatggtgaagaacggtccgatcagcgggaaggtgatctgccagaacttctgccaggcgttgacgccgtcaagggcggcggcctcgtagatgtcggtgtcgatggtctgcaggccggcgaggtagatcagtgtggtgtaggccacgccctgccatacggagagcaccacgatcggcgcccatgccagcgattcggaggtgatcatcgattcggacagccaccctatgcccaacgccttgccgagttcggggatcggcatcatgaagatgtacttgaacacgtagccgaccacaagcacggccagggtgtaggggatgaagtagatggcgcggaacccgttgcggaacgcgatcttggagttgagcagcacggcgatgaacatggacagcaggttcaccagaatcgtcaccacgatggcgatgaagaacgtgaacaggtaggcgcgcccaatgcgctcatcctggaacatggccttgtagttggtcaggccgatccatttgtatttgccgtagcccttggaattggtgaaggagtacatcacgccgcgcaggaacggccagtacaggaacaccatgaacaggatcatggccggaacggtcatccagtagtatgcgggatcgaccttgcgatgggagaaagcggagacacgcttcttgcgtggtttttcggcaatggcggacatggtgaacctccttactgtacggtcctggcttggatctgatcccactgcgtctgcattgaattggtgaacgcctcaacgttgccggtggtcagcaggctttgcaggctgccggccatggtcatggacgaggggatgtagtggtcggcgaaatcagcgatgcgtccctccttgtagaagtggaggatgttctgcagagcctcgtcgccggcgtaggtgtccttgaacggggtgaagcagaactgcgattcggcgtattccttgagccggtcctcgtccatcaagaattccacgaacatgcgcgattccttgggatgcttggtggtggccgaaatggtgagcacggtgtcgtcgccggcggtgagcacctgctcgtccggatcgtcggtggcgggcagctgggcgaacttcacgttgatgtccgggttgaccatgcgcacctgcggcacgacgtaggtgcccaggggcaagatggccgccttgccgttggcgaagtcctgggtggcctgctggtaagtaacgcccggattgtcctgcgtgtactggtagaactcgacttccttttccgccacgggaccccacaggtcggcgaatgtggcggtgccgccgctgagcttcgagtattcgctgatcggcacaagtgtgccggccagggaggcgaacggcgcctgagtggtccacggttcggcgaggctgccttcgatcggcgtgatgccggcctgctggatctgcttcatcgcggcgatgaactcggaccaagtttcgggcaggttgtccgggtccagcccagcctgacgccacaggtccacgttgacgacgtagccgttggcgttgccggcgaacgggatgccgtacgcgcggtcggcgctggtgtcgtacagtttggccagatccttgagcagcttgaccatctgcgggttgatgttgtcgaggatctcgtcgtcggtgaagtcctggaagattcccgaggcggcgaattcgccgaagtaacggccgccgtccacggtgaggacatccggcaccttgttcttgacgaagcgcgtgcgcagatcggtggcggcatcggcggtgttgatgatgtcgatggtgatgttggggtgttccgcctcgaatcccttgaccagcttcttgaactggctgactgcctctaccttgtactggaagaattcgagagtgacgtttccggcggtggatgtgccacaaccggcgagtgcggccacgcatgcggcgccggcacagacggcggcgatggcgcgggatatgctgcgggtctttgccgccatacggttcgggcgtcgatcatgcccggaggacgaccagcgctcggtccaagacgatgcggacttcatctgctgcttctcctttcatttacacttcacgacttcgctactccgcgactgtcgtgatgtatacgttaacacccatatttattgatatcaaacggcataattacaggatttctgtaaacggttacattccgtcatggtatgattgtggccattatcgagcacccatgaggaaggttcgcgcgtgatacattccacgatctacgacgtagccgtcagggccggggtgtccgtggccacggtgtcacgaacattcgccaaaccggatatcgtcaccgaggccacgcgcaagaaagtgatcgaagcggccaacgaactcgacttcgccatctcccggtccgccaccgcgctgaaatcgaaacacacgttccgtatcgctatgctcaccggcgaggcgatcgccacctggttcgactccaatctgtacaaggggctgaccgaggtgctgcagacccatggctacgacgtgtccctctacggcattgcggacaccgaacagcgcatgtcgttcttcgacgagctgcccctgcgccgcaatgtcgacgcggtgatcgtggcctcgttcaacgtaaccatggaggagatctccaacctgcagggcatgggcgtgccgctgatcggcgtcaacgtgccgcacaacgaggggttcaacgccaccgtgtccatagacaacgccaagagcatgcgcatggccatcaatcacctgcatgccctggggcaccggcgtatcgcctacatctgcaccgacgtctcggaggcgccgatggaatacagtgcggactcgcgcctgcagagattcgaatcggcctgtgcggcgtatgaggatatcgaacagttgaccatagccctgccccgcaacgacttcaccgtggacgaggcgatcgcgcgcatcaccgtcatggaccagccgcccacggccctatgctgcctgagcgacgggacggcgctgcccctgctgtacaagctgcccaaagccgggatcggcgtgccgaacgacatgtccctgatcggattcgacgacagcgactatgcggccgagttcgggctgaccaccattcatcaggatccgcaggccctggggcgcaaggcagcggaaaaggcgctgtcgctgattgattccgcgacgttcggcattgacctgggcgagccgttcgagaccgcgcgcacgttcctggccatccgcaataccacggcggcgccccggcggtagtcggtgtcgtcaggcgcgggccgattgcagacgttcgcaggcggagcggatggcctcgtcggtggcggtggcggagaaacgcaggtaggcgggagcgccgtagaattcgccggggctggggatgatgccgatcttggcgagctcggccatatcggcccagcagtcgccggacttggccttgacccatacgtacagcgcgccggagggcatttgtgccgaataaccatatgccttcagtgcgtcaaccagcgcggataggcggcgacggtaacgcccccattgctcgtgcacggcggctgtgtccttcagacctgcggccatggcggcctgcaccgggccggggataatctgtccgatctgcttgcggtattcggccatttccttgaccagccggtaatcgccggcaaccagagccgtacggtagccggccatgttggactgcttggacagcgagtagagcaccaggatgccagctgccgaaccttcacacacatgtgaattcagggcacatggcgtggcggagagactgaatgcggtatcggaggcgggctcgttggattcggccaccggtgcggcaggcacagacgcagcagatgcagacgcggcaggcgcagaggacgaggctgtattgcggcgcaccgaacgccagtccatcaacgcatagcattcgtcggagagcaccacggcaccgatgcgacgggcagcagccacgatgtcggtcagccagtcagcggagatgacctcgccggaaggattacacggcgagttgatccagatggccttgacgttcggaatattcacccaggaatcgacgtcggtcacatcatcgactttgaccacggtggcgccggcaagttgggtaccgatttcgtaagtcgggtaggagacggccggttggacgaccacatcgccttcgccaaggtgcagcaggctggccatcagtgccacggcctccttggaacccacggtgggtacggcggcagcgttgatggacttcagatccacaccgcgcagttcgcggaaccatgtatcgatagcggccttaaggtcggcgctgccggcggtgaccgggtatccatgggcgttgggggcgtctgcgccggcaaccagcgcctgctggacactgctcggcaccgggtccacgggcgagcctacggacaggtcgatcatgccacccggcacggttttggcggtggctttgaagccggcgatacgagaccagtcgtatggcgacgaatatgcgtggaagcccatgagaacccctttcttggacggtatgttcctaagatacgacgaaccctcggccgtgatagaccgagggttcaatccgaactatgcgctgtgtgcagcgcttatccgcaaatcagcttactggttctgcggcggcagcgcggcgacctgttccgggtctttgccgattgggccattggcggaagcgccgcccaaatcgccgacttcagcgaagaagttgacagcggcatccttgtaccaagcccactcgtccggcagatcatcctcatagaagatggcctcggtggggcacaccggttcgcatgcaccgcagtcgacgcactcgttggggttgatgtacagcgagcgggaaccctcgtaaatgcagtcgacggggcactcgtccacgcaagccttgtccttgacatccacgcaaggctgagcgatcacatatggcatggaatcctccttaacagatactggtacgagggtacgcgcccgttgggacgctcctcgctctcagccgttaacggccttatcggtttcggcggacagcgtttcggtcaggtcgcccttgccgaggcgcgcatgccagtagccgtagccgaagtagatggcgacgccgaccacgagccacaccacgaaacgaatccaggtgagcacggacaggttgagcatcaaccagaagttggccacggcgatgaggatcggaatccacgggtcgccgggcatcttgaaggcgcgcggcaggtcggggcgcttcttgcgcataatcgggatggagatggccaccagcgtgaaggcggacagggtgccgatgttgaccatgtcggagagcacgccgatgtcgaagaaggcggccacgagcgccaccaccgcgccgacgacgatctgcagagcggccggggtgccatgcttgccggtcttggacaggccgcgcggcagcagaccatcgcggctcatggcgaagacgatacgggtcaggccgagcaacagcaccatgaccacggtggccaggcccagcacgatgccgaagctgatgatcttggcggcccagtcggcacccaccagttcgaaggcggtggccagcgaggggctgtcttgcttggcgagatcggcataggagaccatgccggtggtcaccacggccacgagcatgtacatgacgatgatgagcagcatgcccacgccgatgccgagcggcacgttcttgtgcgggttcttggtctcctcggaggcggtggccaccacgtcgaagccgatgaacgcgaagaacacgagcgccgcgcccgaaaggatgccgggaacgccgtacacggatggggtcatgccggtggcgaactgccacagcggctgggtcatcacgccggtgacggcggaggagccttccacggtggaggccggctggctcggcggaatgaacggggtgaagttggaggccttgacgtagaagaagccgacgatcaccacaaagaacacgatggcgatcttgagcacggtcatagcaccgtccacgcgggcgccgatcttggtgccgaatacgagcagcgtggtaaagaacgccacgatgatgatcggggcgatatcgatatggaaggagccgaacgccaggttggtgttggcgttccagcccatcaggcgcatgaaatcgttgaggtatacgccccaatatttggaaatcacggagccggccatcagcatttccagaatcagatcccagccgatgatccaggccatgatctcgccgaccgtggtgtaggtgaaggtgtaggcggagccggccaccggaatcatcgaagcgaattcggcgtagcacatcacggctgcgccgcacacgatgccggcgatcaggaagctgatgatcacggccgggccggcgtggaaggcggcggcctgcgcgcccaccgagaagatgccggcgcccacggctacggccacgcccatgattgacagatcccaccaagtcaggttgcgcttgagcttgcggccctcttcacccgtttcggcaatggtctgttcgacggatttcgtacggaacagttgcatagtgctcttctttttctctgttgtttgcgcaccgaatgcgcacaataccgacaatcgagtatagaagagcccgcgtgtcttgtctattaataagacttagagtccgcaatatatgggattaatatccaactccatcaatcaatagcgcgattacagcacgccgacgcagaccggttcgggcaccaagtccactccgaacgcgctcttgaccgcctgctgaaccgcgcgcgccaaagctgcgatatcggctgcgctcgctcccccacgattggtcaaggccagcgtgtgctgcgtggatagactggccggcgcgtacgcatcgaccttatatcccttatggcagccggcatggtcgatgagccaggcggcggacgtcttggtgccgggagtgccgtcaggcagagtcgcgtcgaacttcggcgcatcttcgggcagggccgccgcttggccggcggtcagaatcggattcataaagaacgagccgcagctgtggcgattgtagtcgggagcaggcaggccgtcatcgccaacgggaacgccggcggcctcattgagggaggccagacgctccagatcggtcaggatattggcctcgcgcttggcggtggccatgtcgggcaaggcgtagcgagtgggatcctcaagcatgcccttggcggcacgtactgcgagcacggctttgcggatgtcggcggtggccatacggtcgcccacttcgacgccaagcgctttggcaagctgtccgtaacctaccgtgccttcggccgagtgggtcagggcaaaggtgacggagagcaccacgtaacgtggcgtcgggaagaatcggtcggccggctggccgggaccggcgtacatgctggccttcagtgcggagtatcgatagccgaatcgaagatcggcgggtgtgaggtcgcgcgttgttttggtgtctcgatcccagacttccaccgattcgaccgaagtggcgacttcctgtccgtaggcaccgatgttctgcaccacggaagcgccgactgtgccgggaatgccggacagtccctcgacgccctcgagcccgagctctacggtgaaggccacgaaatcatcccaattggcaccggcctcggcattgacatgcacggtgcgatcctcgccctctaccggtgcagcctcgtccggcacagtgatgaggcgtcgggcgtctcgaaccaccacgccgtcaaaaggcttatcggaaacaagcaggttggagccgccaccgataacgaccaagggcaggcctttggaatcggcatcctccacggcttcgatgagccccacgcgcgtggtcggctcgatgaaatgggcgatggggccgcccacgcccatggtggtgatgtctgcaaagcttgtcatgacttcctatcttagtggcgcaggtgcgatatcggggcaatcatcggctgaaacggcagaacgcccgcgaggggttcgttcagacgcgggatttctgccatttctcacgcgatgcggatactgattccgcaccctaccactcggctctggagtcaatacgcaaaaacccggccgaatgggccgggttttgtaaagctgtgatgcttgcgatcaacgagtctcgcggtgcacggtctgcttgccgcagcgcgggcagaacttcttgagctcaagacggtcgggcgtattacgacggttcttagtcgtaatgtagttacgctccttgcactcggtgcaggccagcgtgatgcccggacggatgtcggcgctcttagccattgtcattcacctctgtgttcttaggtatagtgcgcgcccaccggttagcgggcgcgatttgtagcgaggaagaggctcgaactcttgaccttacgattatgagtcgtacgctctagccagctgagctaccccgccagagagccccgagtgagaattggactcacgacctcttccttaccaaggaagtgctctaccactgagctatcggggcgtggcggatagtggattcgaaccactgaagcacgaagcggctgatttacagtcagctcc

SEQ ID NO: 1887 - DNA, 9159 bp, Unknown
  MAG_14  MAG No. k141_70218
gcagtccgcgatttctcagaagacttccgacaagaagcaaaccagcaaggagggcagcaatgccgaagatgaaaactaattccgccgcttccaagcgcgccaagatcaccggcaccggcaaggtgaagcatgtcggttccgccatgcgtcacaacctcgagcacaagtccgctcgcaagcgtcgtgaactgtccgccgacgatgtgctgcgcggcggccaggccaagaagctgcaccagcttctgcagaagtgagcatagggcttacccggaaataataagactttagaaagctgaggaatagattatggcacgtgtcaagcgcgcagtgaacgcccacaagaagcgtcgcgttgttctcgagagggcttccggctaccgcggccagcgctcccgcctgtaccgcaaggctaaggaacagctgctgcactcctttaactacaacttccgcgaccgtaaggctcgcaagggtgacttccgcaagctgtggatccagcgcatcaacgctgctgtccgcgctgagggcatcacctacaaccgcttcatccagggcctgcgtctcgccggcatcgagctggatcgtcgcgctctggctgagatcgccgtctccgacccggacaccttcaagaccatcgtggacgccgccaaggccgccctgcctgaggacgtcaacgctccggttgaggcctgattgcttgaagtcgtgacttcacactagaaaccccgcttccgagcggggtttcctattattagccccctctgacgaggggggctcccgcgcagcgggtggggaagagaacaaacacatgaccaacggattcaccaaactcacagagcagttcctcgtccacatcggcgtggagcgaggactcgccacggccaccgtcaccgcctacgaatccgatatcgccaaatacattgattggctcgaaacccgcggcatccacgaaccggacgccataaccaaacaagacgtcgaagactacatcgccgcccttgaccaggcgggggagtccgcccgctccaaagcccgaagactggcctcgatccatgaattccatcgcttcgcgctcggccagcacgcggtgactgccgacgtttctgccgcagtcaaggcacccaaaggtgccagcaccctgcctgacgtactcaccgtggacgaggtaacccgtctgctcgacgcggcggcagccggcggctcaaccgatccggtggtattgcgggacaaggccctgctcgaattcatgtacgccaccggctgccgcgtctcggaagccaccggtgtgaatctggacgacatcgacctggacgagcacatcgcgcgactcatgggcaagggctccaagcagcggcttgtgccattgggcagctacgcatgccgggccatcaccgcatacctcaatgcggggcgtggcgagctggaacggcgctccagcgccaagattcccgagagacgcgcactgtttctcaacaaacgcggcaagcgcatctcgcggcaatcggtatgggaaatcgtcaaagcaaccggggagcgggccggcatcaccaaaccactccatccgcacaccttgcgccattccttcgccacgcacctgatccaaggcggcgcggacgtgcgcaccgtgcaggaactgcttgggcacgccagcgtgaccaccacgcagatctacacgcacgtaagccccgaaaccctgatcgaaacgtatctgacctcacaccccagagcgcggtgagacacaccattttgcgacgcgtccgcccctagcggaatcgcggcggggggggggagcaccaaagtcggccggaaattcaaggcgtgacaatacagtacataacagcgaaccgtcagccaggaagaggtattcatgctgcagatcaaatcgatctcgaagcgctataaaaccggtgatttcgttcaacaggcgcttgacaaagtcagcctgaacctacgcgacagcgaattcgtcgcgattctgggtccctcgggttccggcaagaccaccttgctcaacatcatcggcggcctcgaccggtatgacgacggcgatttggtgatcaacggcatctcgacgcgccaatacaaggatcgcgattgggattcgtaccgcaaccacaccatcggcttcgtgttccagagctacaatctgattcctcatcagacgattctgtcgaacgtcgaactcgcgctgacgatttccggcatcggcaaggccgaccgtcgcgaacgtgcgcgcaaggcgctggagaaggtcggactcggcgaacacatcaataaaaagccgaaccagctgtccggcggccagatgcagcgcgtggcgatcgcccgcgcactggtcaacgacccggacatcgtcctggccgacgagccgaccggcgcgctcgattcggacacgtccgtgcagatcatgaacctgctcaaggacgtggccaaggaccgcctcgtggtcatggtcacccacaaccccgaacttgcggaacaatatgccacgcgcatcgtcaacctgcgcgacggcgtgatccgctccgactccgacccgtttgtcgtggatgagacggccgaacagccggccgtgcacaagacgatgggccgcgcgtcgatgtcgttcgtcacgtcgctggcgttgagcttcaacaatctgaaaaccaagaaggcgcgtaccctgctgacctcgttcgccggctcaatcggcatcatcggcattgcgctgattctatcggtgtcgactggcgtgaacgcatacatcagcgacatccagcgtgacacgatgaccgcctacccgatcaccatcgactcccagaccttcgacctgagcagcatgatgggcggccagatgggcggcgatgacggatacggcggcaagacgcacagaaccgacggcatctacccggacgaccgcagcgtcaagcaggcatccagcctgaccagttcgattaccgaaaacaacctgacccgcttcaagaaatacctggataattccaagagcgagattcaccagtatgtgggttccgccggtatccagtacacgtatgacgtgaaattctccgtgttcgaccacgaccccgatggcacgctggtcaatgcggacggcgtgacgatcggtgccagcgactccacttcaatggcctcgcagatggcgtccacaagctcgtccggcatgtccggcacctcgtcgatcacctcgcagcagatgtcgatgctgaccggcaaaaccgatgagaacgccgcgcccgactcgttcaatgagatcatgcctggagcggacgacagcaagctcgtaggcaaggtcatcaccgacaactaccaagtggtcaacggttcatggccgaagtccaaggacgaggtggtgctggtgctcgacgacaacaacagcgtgccgctgaccacgctgtacgagctcggcctgctgcccgcctccgactaccacgagatgatgtccaagctcaacgccggcgacaaggtcagcactccacaagacaagatcgactatgctaaggcgctcgaccagacgctgtacatgattccggcatccgaccagtacgtcaagggcgatgacggccactaccgattcatcggcaacgacaaggatgtaatcgaacagcgcctcgaaacggccaccaaactcaaggtggtgggcgtcgtcaaggcgaagaaggatgcttcggccacaccgttggccgctggcgtgggatacacgcgcgctctgaccaatgatctgatcgaccgtgcggcctccagcgccatcgtcaccgatcagaaggccaacccgaacacgaacgtgctcaacggcatgacgttctcgccctcggacgacgccaccaaggcggccgacgcgcgcacctacgtggtttcgctgggcgtgacgcagaaggcgaacatggccaagtcgatgatgagtgccgggcagcggtccggtacgggcgatcaggccgacgcgatggccgcgatgagcgaacagcagctcgccgacagtttcgactcgtatatcgccacggcttcgaacgacgtgcttgtcgcgatctacgaccagtacgtgtcgaccggcacctacgacgacaacctcgccgcattcggtgtggtgagtcgtgacgcgcccagctcgatcaacgtctacgccgacagcttcgaagacaaggaccacatcgccgacgcgattaccgactacaacaacaccgtctcgaagaaagacaagatcacctacacggattatgtggggctcatgatgagctcggtgaccaccatcgtcaacgtgatttcctacgtgcttatcgcgttcgtgtccgtctcgttgattgtttcctcgatcatgatcggcatcatcacctacatttcggtgctggagcgcaccaaggaaatcggcatcctacgcgcaatgggtgcctcgaagcacaacgtgtcccaggtgttcaatgcggagaccggcatcatcggcctatgctccggcctgttgggcgtgggcttgaccgtgctgctcgatattccgatcaacgccgtgttgcatcacttcatcggcaatgcggacgtcaatgccgccctgccggtgaccggcggcgtggtgctggtgatcctaagcgtggtgctcacgctgatcggcggcctgattccctcgcgcaaggcagccaagcaagacccggccaccgcactgcgcaccgagtaagcgcatcgacatagtacgagacgagatccataaacctcggaacactggaatgcccgctgcaaaacggtgttccgaggcgagcccggcgagtacattaggataggcgagcaggtattcccggcaaagggggcgaggggcaacgatggacgactggcgagacatccgcgataaagacagcgcattccgtcaaggaacgctgcctatggcgggaacgtatgtcgttgcacccccagcgaacccggatgttgataaggtagacagtatgcctaccgatttgcttggacgtgaatacgaaaccttccccgcacccgaaccgctgcaacagcacggtccggcgcgtgtcattgccatgtgcaaccagaagggcggcgtaggtaagaccaccagctccatcaatatcgccggtgcgttggcccagtatggccgccgcgtgcttatcgtcgatttcgatccgcagggcgccgccactgtgggactgggcgtcaacgcgaataccgtggagaacacgatttacaccgcgctgttcgatatttccgtggatccacatgatgtggtgcagcacaccgcattcgagaacatcgatgtgattccggcgaacatcgatttgtccgccgccgaggtccaactggtcacagaagtgggccgggagcagatcctgaacagtgtgctgcgcaagctcaagtcggaatacgatctcatcatcgtcgactgccagccatcgctcggcctgctcaccgtgaacgcgcttgccgcagctgatggcgtgatcattcccgtggccgccgaattcttcgccttgcgtggcgtggccctacttatgcagtccatcgaaaaagtgcagtcccgcatcaatcccgcattggaagtggatggcgtgctcatcaccatgtacaccaagacactgcactgcgaagaggtctgccagcgcatttacgaggcgttcagcgaaaaggtgttccacacgttcatctcccgctccatcaaactgcccgattccacggttgccgccgcgcccgtggtggtctatgcacctgagcacaagacatcaaaggaataccgtgaggtggcacgtgagctcattgctcgcggcatcgtggcgtaacgattgtttcgataaacgatgaatgagacttccctttctcggctcccctctctgagggaagctggctcgcgtagcgagactgaggggagctccgcggaagccgaaatcagcacggaggaatccgccacttccggcttccgggtcaacctcgaggtctattccggtccgttcgatgccttgctcggcatgatcgccaacaacaaactcgagctgaccgaagtttccctctcctcgatcaccgaggaattcctgacatacgtgcgcgggctcgacttcacgaaaaacatggatgaggccagcgcctttctcgacatcgcctctattttggtcgaggccaaaagcgtggcgattctgcccggcggcgaaggcagccagcacgacgagcaaagtctcgaggcgctgcgcgaacgcgatttgctgttcgcccgactcctccaataccgcgcctacaagcaggccgccggtgatttccgggcgcgtatcgccgccaatgccggccgattcccgcatccggcggccatggacgagggcattgccgccatgttgcctgagctggtatggacgctgaccccgctcgaactcgcccaactggccgcccaggtcatcgccaacgcgcccgcctccgaagtatcgatccaccagctgcacgtgccgctggtcgatctgcgggcccaatcgctggtggtgcgcgaccggctgattgcagcactggaatccaagggcgaccagtcgatgtcgttcagcgaattgacccgggactgcacttctcgtattgaggtggtggctcggttcatggccgtgctcgtgttcttcaaacaaggtgtgctgcagtatcagcaagatggtccgtttgccgaactgcacctgaggtgggtatccggcgtagacgaaacgatgaacgacgtgaacatttccgaaggcgattttgcgtaaggacggcgactggtgactgaacggattgacgcaacgaatgcaaccgagcacatggcggatgccgaatcgacggctggatccgcaaaggccgaggtgaggggagtggaggagacgcgccccgaatacgtggatttcacggtagacgattttcccggcgggctgcctgcatgtctggaagcgattctgatggtcgccgaccagccgcagaccgccaccgagctggcccgcattttggcattggaccgcaacacagtcgaagaggcattgcaagccctgcacgatgactatgagggcgatgaatcccgtggcatccgcccgcgcggcttcgaactacgccgcaccgctcgtggctggcagttcgccagtcgcgccgcgttcgagccggtcgtctcatcattcgtcaccgacggccagactgcgagactcagtcaggccgcactggaggcgcttgccatcgtggcctatcgccagcccgtcacccgagcccaagtggccgcgatccgcggtgtcaactccgatggcgtgattcgctcgctcacggtacgcggccttatcaaggaagacggcgtggaccccgaatcccgcgcggcccttttggtcacctccgaatccttcctcgaccaaatgggcctgaagagtctcgacgaactaccctccctagcgccgttcctcccgcccgtcgccgaaatgacacagtcgaaatcggaagacacggacgtgatttcgtagcgattggggcccgctacctgaccaatattcgtgcgctagaccatccaatatgtgatttatggtcattgtgactataagtagtgctatgctctcaatgcagggagaacaaccggtatggaaagaggcatggcatgggattcggcaatgtgtccgagcgccgcagcgcaccgccacaggtcggcgtgtcagtggtgattctggcactcggcccgaaaggcgataccggcgacagtgccgccgattccggcaacgccgcgaactcggctcattcccgtctctggctgcccctggtcaagcgcgtccgtcagccgttcctgggctgctgggcattgcccggcggcgacctgcgctccgatcggtcgttggaacagtccgcctacgcggccctcgaatcgaccacagacctgcacccgcgatacctcgaacagctgtacacctttggaggcccgacccggtcccatggcggattgcccatggtatccgtcgtgtactgggcgctcgtcggccagaccgaggccgcgggcttcgaggacggtgacaacgtacgatggttccccgaagacgaactgcccgagctggcgttcgaccatcgccagatcatcgactacgcgctgctccgcctgcgctccaaaatcgaatactccgacgtggccacccgactgctcggccccacgttcaccctgcgccaactgcacggcgtctatgaggcgattggcggcgaaaccctcgacttggcgaacttccgccgcaaaatgcttgcctcgggcgatcttgaagacaccggggagaaggtgcgcgaaggccgccaacgaccggccaccgtctaccgctacatccccaaacgacttgtcgagaatggcatgccccacgaatccgatggcgacgacatcgtggaactgtccagacaaggcgagcgtgaagacgctctcgacgcgctgatcccatccgcgcgcatctgatttttcccgccgacccgcttcgggccggcatcacagacgtatatagggaaaggaaccactatgaccgcactatccactgcgccgtccgttgacgagatcatcgccaagctgggcgcgcaaagcacctgcgatgcaggactgacccaggacccatggcacttcgacaccaccacacccagctacggtcccggtgcctcgatgctcgaccgtctgcccgccaacgcgccgcgccagcaggtgctgccagacgaataccgcaaggcctccgacgaggaactgcagcagcgcatctccgacgccaagcagcgtcttggctccaaactgttgattctgggccacttctaccagcgtgacgagatcatcaagcacgccgatttcgtgggtgactccttccagctggccaagaacgccaccgaacgcccggacgccgaccacatcgtgttctgcggcgtgcacttcatggccgaaaccgccgacatcctctccactcccgaacagagcgtgaccctgcccaacctgtccgccggctgctcgatggccgatatggccaacatcgaccaggtccaggaatgctgggaccagctcggcgagatctgcggcacccagccggacgccgatggcttgcagcagatcatcccggtcacctacatgaactcatccgccgcgctgaaggcgttttgcggacgcaacggcggcatcgtatgcacctcgtccaatgcgcacgccgtgctggaatgggcgttcgcccgcggcaagcgcgtgctgttcttcccggaccagca

SEQ ID NO: 1888 - DNA, 14990 bp, Unknown
  MAG_14  MAG No. k141_70483
catggaccacaacggggtcccggaatatgtgcgtctggtcgcctgcgacatgagcctgggcttccggaagggcatccgtgagcatctgccccatgcgcggcggatcgtcgacaggttccacgtggccaggcacgccaacgaggccgtcgacaaggtcaggaagacggaaggccgctccaacccgctgctcaaacggaccaagtacctgtggctgtgcaacgaggaaagcctgaccgaactgcaggtggagaccaagcgcaacctgacgaggcaacggttgaagaccggccgcgcctgccggatgcgcgaggtcctgcaggacatccacacggacagccgcaccccgtccgaggcatgggtgcgcctgcatcgcctgtgctcgtggatgatgcactcccgcctcgagccgatgaaggacttcgcccgcatgatccgacgccacttcgccgagatcgtcgcatacttcgagcacccgtacaccaacgccgtgctcgagggcgccgacagcgtcatccagaacgtcaaacgacgggcgagaggcttccgcgacatggactacttcgccaccatgatctacctgacctgcggcagactcgacctcaaagccgccaccaccacttgaccatcacccaccacaaacagcgaatagcctcaatttgttatctttaccgcgcttgcgtggacagagaacgctcagacctcgaagatcgccgcatattcgcgagagaacccgcctagtcaatgagatatggattgaaaacacgctcggtgacggggatatggagcatcagcatggtgccgtaaccaagaatcaccagcaggaacagtccaccgggcatgtagaaccagctggccaccagcagcgccacgaacacggcatccacgatgaccagggccacggtcatcgcgatgtgggagatgccgaagatgaaggcattcttcaaggtgccggccacggtgttctcgaagcgtgcctgaagcgcgaacacccattcgaagccgataagccagaggatggtcagcgcgaatttgatgatgagcagcggcgtgatctgcaggacgatccatgaccagaccagtgcaatcagcaccaccaagaacggcagccacagcagtgtggctttgatgaagttggctttgaatgacttgaagtagttggcggttacgcctttgccctcgccctcgatggagcggcggcaagcatcatggctggcggtcagggccgcaccgatggtgatgagcggaatcgaagtgaccagcatcagaatgttgatccatacgccgtcaacaagattgctccacgcgcgcatgaatttcgagtccggtgccagccagttcatcaactactccttgtgtcgcctgtggctcccctctctgaggggagctgtcatcgcagatgactgaggggagacttgatggagctcaggatactcccctcagtcggcttccgccgacggctcccctcaaagaggggagccggattggtggagctcagcccttgaccgctccgccttcggccctgcaattacggactcgcctacgacgaggctcatcattagcttcgccgctgtcgcggctcagcctggagcctgctggaagcccactgggcttccagccatgggctgacgacgcgagtcgtcagcccttgacggctcccgccatgacaccagagactatatacttctggcataccaagtagaagacgatgatggggatgatggccagcaccaggcaggccatcatggcgcccatatccacggaaccgtagccgcccttgaggtattgcacggcgaccgagatggtcttgtatttgccgaggtcgagcgtcaggtacggcagcaggtagtcgttccagatccacatggcttcgaggatgcccaccgagacgatcgacggcttcataatcggcaccacgatctggaagaagatgcgcggcactgacgcgccgtcgatcatggcggactcctcaagctcctgtgggatgcccttgatcacgccggtgaagatgaacacggccagaccggccccgaaaccgaggtacacgatgcacaggccccacggggtattgagcttcagcatgtcggcgatcttggagagggtgaacatcaccatctggaacggcacgatcatgttgaacaggaacagggtgtagagcagcttcgcagcccagttgttcacgcgcacgatccaccatgcgcacatcgaggtgcacaccagaatcagcaccaccgagccgacggtgataagcagcgtccagccgaaggaggcgaagaactgcgtggtctcgatgccgcgcacatagttctcaagtcccacgaacgccttgccggcaggcagggagaacgcgttcttggagatgtacgccttctgcttgaaggagttgatcagcaccaggacgatcgggaaaacccagaacagggagacgacggcaaacagcacggtccataatgcgccatgcttcacaggcttgttctcgttcatcaggctgccacctccttgctcgtggtgagcttgttctgaatcagggcgatgaccgcgaccaggatgaagaacagcacggccttcgcctggccgacgccttcccagcccatacggccgtagaaggtgcgggtgatgttcagcgccagaccttcagacatgttgctcggcgcaccgttggtcaatgcgaggttctgatcgtagagcttgaaaccgttggtcacggtcaggaaggagcacacggtgatggacggcatcatcagcgggatgatgatgcggaacatggtctgccgtccgttggcgccgtccacggccgcggcctccagcacatcggcgggcagggcttgcaggccggcgatgtagatgatcatcatgtagccgatctgctgccagcacaccaggatgaccaagccccagaacccgtaggacgccttataggtcagggcgcggccccagtgggctagtacgccgttcaggagcagcagccagatgtagcccaggatgatgccgccgataaggttcggcatgaagaataccgagcggaacagcgtggagcccttgatcgccttggtcagcatgtaggcgatggcgaaggcgatcacgttgatcacgatggtggtcacgatggtaaacgcggtggagaagccgagcgcgtgcaggaattccttgtctttcaacgctttgccatagttcttaagccccacccattcaccgtcggtaacggtggtgaattcgcaaaagcttaagtagacgcccatgatgaagggcaccaggaacccgatgatgaatgcggcgaatgtggggagcgcgaacagcgcccaccatctgcgtatcgccttgccagccatgctgatcatgacttttcctcctccttgagtccgctgcgttgcgacactgcatcgtgcgccggctgcggagttcaactcaatgcgagcctgccgatcgagaaccgcatgcacggcctgttctcgttcaagcctatgttcatagtaaacgtcgaatcattatatgtcaaacgttgtcattttcagcgtttcaagctcgagcatactccggctccagcaatcttctttcaactaagataatggctatataaagcctatctaacgccgtcatagacactttgcaaacgtttgtaatacaatcgttgtcatcgccgcagatcaatcaatcagcatgtacactggagtcagttgtgcatgtgtattgcgattttccattcaacgcaagggggctgcaatggctacgagcattcaggatgtcgcccgcgaggccggcgtctccatctccaccgtctcacgttccttcaccaggccggatctggtgtcggccaagacccgcgagcgcgtgctcgccatcgccgacaaactcaatttctcactctcccgctcggctgcggccctgaaatccggccgcgccctgcgcatcgcagtactgatgagcggccatatccgcctgtggttcaccgcctcggtcatcgaggggctcaacgaggtgctgcacacgcagggctacgatatttcggtattccagatttccagcatcgaggagcgcaaggaattcttcgagatgttgccggtacgccgtaacgccgatgccgtgattgtggcgtctttcgatatcgacaacaacgaaatcgcgcaactggcttcggtcggcgtgccgatcgtcggcatcaattcagtcgagcccgaagcccgcggctttaccgccgccgtcaatatcgacgacgtgcagggctccacgctggccgcccgccatcttatcaatctcggacatcgccgcatcacctacatcagcaccaatcgcgaggtgtcgctgagcttctccgtgcaaagccgattcgactcattcaccgcctgctgccgcagggaaggcatcgagccgcaggtcatcgtctgcaaggtcgatgacgatggacgttatgaaatcagcgacgtggtcgaccaactcatgagccaagatgagatgcccaccgccatcgcatgccaggaggatggcatcgctttgccgcttatgttccagctggagcgcaatggattctccgtgcccggcgacgtctcgctggtcggctacgacgatagtttctacaccggcgatatcggcctgaccaccatccgccaggatccggtggaaatggcccgcgtggcagcccgcatgacgctcgatctcattgacgaaaagccgatcgagcaaccctacatcgtgttcccggcccagctgaaggtccgctcctccacctcccgcgttaagtaggctcgcacaacaaagcccaccatagaaaaagtgtgaggcaaccgcacaataacgctcaatcgcacattgtggagaatggcgaaaaatcgtcgattcatggccccacagcgtgcgattgagcgggtgcgcgcctcacacttttctgcggcggacgattttgcgcgagactcagcaatacaaagcggcgcccctggagaaggaaaggcaggggcgccgcggattgttacttatcggctaggggactctatgagactcagtgcgaggcctcgtattcggaagcccaaccgtccacgaaggcggtcttgacggcatcccacttgccggtgccctgcgcgtactcgagcagcgcctggccgaccttgttcttccattcctcggacggcatcatggtgaagttccaagaaacctgggtcttgccggactcctggtcttccacggcggcctcggtcagcgggttgtcgcttttgacgtcatcgaaggtcttgaacggggcggtgaagcccatgtcctgagagagggacttcttgccggtatcagaggtgatcacccaagacaggaagtcctcggtggccttcttgtcggcgtcggaagccttatcgttgatgcaccagtagttctcggaaccggtggtcagaccctgcttctcctcgcccttgacgccgatgtagatcggcatcatgcctacctgatcggcggtcatgccggccttctgcaggtcggtccaggcccaggtgccgttctggtagaaggcggcctcgccgagcgcgaactcggagttcgcatcatctccggtcttggcgctcagctgggtgggttcggtggtggagtcggtgatgtacaggtcgaagatcttcttgtagttcggcaggtaggtgcccttgatcttggccggctgctcggtgacgttgtcgtccttgaactcgtagtaaagcggcagattggccaggtgggtcttgaagcgccagtcggagctggagtcgaagccggcggaggtgaacgcgcccttgatgccgagctcgtccttgcgggcctgcatgtcgtcggccacggccttcagggtgtcgaagttgtcgatttcgtccatggacgtggccttggcgccatccagcgcgaagtacttgttgaggatgtccttgttgtagatcaggccgtaggtttccatcacgtacggcacgccgaccaccttgtcgccatccttcagggccacatcttggttggtgagctccttgtacacatccgtattggacatatcggcggtgtacttcttccagttctggtagccgaccgggccgttgacctggaacaaggtcggggcttcggttttggcgatttcggacttcagggtctgctcataggtaccggaggccgcggtctgcaccttgacctcaacgcccttttccttggtgtattccttggccagagcggtccactgatcagccgcttccggcttgaaattcaggtagtagaccttgcccttggcgtcatcgccggaggtcgagcttccgcaggccgccaaagtgccgagggacatcgcagcgacagccgccatcgcgactgctgacttgactgtacgattcatcatcgaacctttctctttcatcgtcgacccggccgtccccggtcaggacaggtacgctagcacgcacctttacgactatcgacatgcactattgtgcaacggtttgcttctttttgcaaacgatagcaatatcggcgcgtcataaatcatcattttcaggccattgtcaacaaatatcccattaattcagtcatttttgcctcattatcgcaatgcaagcgttcgcaactatgagagcgctaacacatctttcatggcaatcgattgccacttattcccatcaaaaaaacaacacgccgacgctatcgtttgcaaatcatttatcgacataccgcaattcccaccacaaacaataaaggcccgcccgcagtagcgggcaggccaacgcaatcgcagcgcaaccggagctaggcattccaccgttcgatgacgttatctcccttatagacgctgagcaccgagtagtgcgccgtatccaaacgcagcaaccgtgcgaaatgcgggtccacgcccagccattgcgaggtgaggatgcgcaggatgtgcgcatgagccaccaacagcacattatggccgtctttcagcagcggcgtaatctcgtcgatggcgctcttggcgcgtgccgccgcttcttccagcgtctcgccaggcccggcatggaccggcacctgttcgcccgaaggcaaggtctcgacccagtcgccctccagcgtgggcgtcagcgagcgcggcccgtcacgccacacatcccattcaaaaccgctggcctcactcacctgctggcgcgtacgcccctcggctcggccgtaatcccattcagcgatgccgtccaacacaccgtggtccgcaaaaccagccaattcagcggtttggcacgcccgcttcagcggactggaaaacacacagctctggctgaatccttcggggaaggcctcgcgcaggcgccttccggcatccgctgcctgctgctcgccgaccgcggtcaacgggatgtccgtgcgcccggtatgctgcccggattcgctccacacggtctggccgtggcgcagcaacaccaaaaatccattgccgccacgagagttctcgacggcaacggtgccgttcacgttctgttcgctcatgcctccactctagtctgcgctcgttcatgactccaccattaacgcccatcttttgcgctgagatgattgagatgctattagactgagagtcatgagcgacgaaacgaacaccgacttcccctccagcgccgaccgcgcggtcgacagcctgcaccgcatcgacgagaaggtcaacaggctgcgcgaggaccggctcaacgaccctgattctctgggcgacaagctcatcaagtcggcagtcccagcgctggcaggcttggttgccggcaaagcattccagatgatatgggacaagggcacaagcaaacgcaatctgcgcaagggactggcggcagacgcgccgcaaagtctggcaatgagtctggcattcgccgccgtttcggccgcactcggcgcagtggtttcgcagctgtcggatcggggctccaaggcgttcgtcgaccaccgccatcgcaagcccagccgctaatcccccggttggatgatggtttctgttggctgactgatgactcatcgctggaatttcgtcaaggaaccatcagtcaatcgacaggaaccatcagtccagcacagttccgccacacaatatcggcatttcactgtgaggtaatccaccgtggcgtccggcgtctgccgtgcgacaataaagccatggttaccaacgcaacaatcgaggctcttctgggccgccgctccatccgtaagttcaaggacgaggccatcgacgacgatacccgcgccacgctcgaaaccgtcgcccaacatgccgcgtccagccagttccttaacgactggtccgccatccgtatcaccgacccggccaccaaagccaagctcgccgaattcggccatcagccgtatatcgccaccgcgccgttgctgtacgtgttcgtcatcgacgagcaccgcaacgcacgcatcgccgaacgcaagggtatcgatcccgcttccgacgaattccatctcaagtacagctatcgcttcacccaagctcagaacgacgccgtgctggccccgcacgccatggagaccgccgcctattcgctgggactgggctgcgtgattctcggctctctgctcaacaacatccccggccttatcgacgtgctgaatctgccggaatacacgtatccggtgctgggtctggccatcggcaagcccgatcagaacccgaccgtcaagccgcgcatgccgcgcacgatgcagttcttcgagaacacctacccggctgacgccgatggcgtactcgaccagctgcccgccttcgacgaggaagttcaccggtactacgatctgcgccaagccgaccgtccggtggacgctttcagcgatcaggtcgccacgatcagtcggcaggatgtcagccatcagacactgctcgacaaggccgccgctcagggcttccgtctggatcagtgagaccagaaccaacgagatagcctcggataggctcgtcactgagtcgtctcggtctcagcactgcgacgactcagttccaacacctcaacatttcatcaccggataccggcaaaattgcacagccatcccgccggtgtcacaccatcaacaaacgttcacatatcagtcccattatgcggacaaccaacggccagttttgcaagaaaacccgccaaaccagcagtatccgcaccagtggtgggaatagactgcatgtggccgcaatgactacgaaccggaaaagagggactggatgcggacggtttggcaagtctttctacgcgattgcagacgtatcttacgcaatcccgttgccgttgtggtgacgctcggcgtagcaatgctgccctcgctgtacgcatggttcaacattctcgccaactgggatccctattcagccaccggcaatctgcaagtggccgtagccaatgaagaccaaggcaccaccaacgatctggtcggccatctcgatgcgggccggcaggtcgtcaagaaactcaagcagaacgacgaactcggctggcgcttcgtagacaatgaggaacaggccgtccacggcgtggagaccggcggatactatgcagccatcgtgctgcccaaggatttcagcgccagcttggtcgaatcggtgaccggaacctccaaacagccgaaaatcaagtattacgtcaacgagaagaagaacgcgatcgcgccgaaaatcaccgacaccggcgccaccaccatcgatgagcagatcaactccgccttcgtcaccacggtagccaccaccgttgcctcggccatttccgaaaccggagacgatctcggccaagccactggcaaagtccagcacgatacgatcgatgatctcaatacggtgatgtccacgctgaacaccgttcaggattcactcaccgacttacaggacacgctggcccaatcagacacgattctcgccgacgccaaacagaccaccgcctcactcaagcagaccgtcgcggccgcgcagaatgcctcccgccagtccggcacactgttggcggaaacacaggccgggtcacaagccttctccaccacactggtcggcgcgctcgacagcagttcagcacaactctccggactggccgtccacgtcaacaacgccgccggcagcatcaccggctccttcaacagcgcgcagaactccgtcgacaccatcaccaacacactttcggccccactgaacgccacccaaacgtcaatcagcgatctgaaagacgcgctgaccaaagccggcatcggcaaagacaccaccgacccggtcggccagaacatctggaaacaaatcgatgcgctcgactcattgatcagcaaacagcagacacagctcaacaccttccataccgacaccacacagttcatcaactccggcaaagacgccaccacgaacctttccggagccatgaccaacaccaccaccggcggcatcgcggcgctgaataccgcgcgcggctcgctgaccggcaccgtaatgccgtcgctcacctcatcattgaacagtttcgccgccctgaacggcacgctggatggcacgttgacttcgttgtccggcaccttggatcaggccgacgggctgttcgaccagcttgtcgataccctgaaccaaacgaaaaccaccatcagcagcacgcaggattcgctgcgccaggcggccagcgatgtcgccaccgtacgcaccgatatcgccacgctcgatagttccgccgcttaccagaaaatccgggatacgctgcatctggatgacaagggattcggcgagttcatgggcaatcccgtcaccctgaccacgaaagtcgtgtacgccaccgacaattacgggtccgcagtcaccccgttctacacgaatctggcactgtgggtaggcggtttcgtgctgattgccatctacaagcttgaggtcgaccgcaaaggcattcgccgtatcaccgctacgcaagcatatcttggccgctggctgctgctggtcaccatcggattcctgcaagccatcatcgccaccattggcgatctggtgctcggcatccaatgcgagcatccgctgctgttcatcttggccggaatcttctgttcgttcgtctacatcaacattatttacgcgctggccgtggcgttccgccatatcggcaaagccatcgccgtaattctggtcattgtgcagatacccggtgcctccggcctgtatccgattgaaatgatgccgaacttcttccgcgaactgcacccatggctgccctttacctacggcatcaacgcgatgcgcggcccgatcgccggcctgtacgcgaaccattactggctcgacatgctgcacctgttctggtatctgccggcggcgcttttcgtgggacttgtcgtacgccggtatgcgatgaacctgaacgcgctgttcgaccgtcgtttgggagataccgacctgatgatcaccgagcacaacagcatggtgaacgaacaggtgagcttgaactccgtattccgcacggtgtccgacagcaaggaactgcgcgatatcatcgctcatcgcgcgcaccggttcttcgcgcggtacccaaagatgatcgttgccggtctgacattgctgaccgtactcccgttcgtattcctggtactgctgttcgtcacccaagagaaaatcgccatgctgacctcctggattctgtcgattattcttatcgacgcctatctcattgtggttgaatacgcacgcgaaacctacgccatgcagcttggcgtcagtgccatgagtgccgacgagttccgcaatgtgatgctcaacggatatgtgtggcggcgtttccacggccacggacgtcacgaagcggcgatgggcagcaatccggatatcggcgaaaccactgaacgactcacactgttcggcgatcaggccgccgagacgactgcgcacaccgcacagtccgagcagtccggtcaatccgggcagcctgagcaacccggtcagtccgggcagtctgggcaaggaggcgcacgatgaagcttatctggaaaatattcgtacgtgacgtgcgccaagccacccgcaatgtgatcgccgtaatcgtggctatgggattggtgattgtgccggcactgtacgcctggtacaacatcgccgccagctgggacccgtacggcaacaccaaggccttgaaggtcgccgtggcaaacgtggataagggctataagtccgatctgatgccgatcaccatcaacgtcggcgaaaccgtgaccaatacgctcagggccaatcatgaccttgactggcagtttgtggatcgtgctaaggccatcgatggcgtgaactcaggcgaatactatgccgcgctgattattccaaagagcttcagctccgatatgatgacgctgttttcaccgaaaatcaagcacgccaagctcgaatactatctcaatgagaaaatcaatccgatcgctccgcatatcaccgaccatggggctaccaccgtggccatgaccatcgaccagacattcgtgaagaccttggcgagcgtggcgctggatttggtttccaacgtggccgattacgcgcaaagcccgcaaatggagcagtacgtcaacaacgcctccagtcatattgccaccatgtcgtctcgtttgaccggcactgcgtcgcagatggattcctatgccaatctgctcggggccgccaacagcatcattgattccaccgataagctgctgggatcaacaggctcagctgcggccataaccaaaaaggcgttgaaacagacccgcaacggcgtctccagcctcgacaaggcattgtccggagccaccgatggcgtcggtacggcattgcagcaggccggttcatcctacgacaccattgccaagcagatcgatgccgcttttgccgatgtgggctcacaatcctcgcagatatcaaacaagctgaccgatatgcaatccaaagtggaggctcaggccgacagctttggaaagtatgccgccgctttacgagatctcgccaaacaagcggcttcactgcccgtgggcggagataccgttgccgctcaactgaacgcggctgcagaccaagccacaaaggcgcagcagagcatgcagcaagccgccaccgcgttgggcgatgcggccacgcacatagcaaatggtactgccgatgccgatacagcgcgtcgagatctgaaatcacaaatcgccgccgccaaacaatcgattactcaggcttcagacacgtacaagagcacgctgaaaccgcaactgaacaatctgacctcgtccatgggcgaagtggccacgcaggcaagttccgtaatcgacgggcttgcgtcgaccgtcagcagcgtgtcaggtctttctggcggcgtttcagacagcctgacggatatccagtcggccttgactgacgcagctagcgctttgacccgttcggcgaagaaactcgacaacttgtcttcccaactcgcctctatcaccagtggcggcaccaacgacctgtctgtgatttcctctgcgaagcccgatgccattgcttccatgctggcggcacccgtagcggtcgaccgcatcgcgctctatcccgttgccaactatggttccgcgatggctccgttctacacgattctgtctatctgggtcggtgcgatcattctggtcgccatgttgaaagtatcgatttccgaccatgagaaggcccgtatcttagggttgggcaatgatctgccgctcggttcgggagtgggtcttcgcgaggccatgattgccgggcggattgccggaccggccgccgcgttggatgtgctgaagaagccgcgtgccgagtcttccggcaatgcgcggcagttcggtttacgcttgcaccacgaatatttcggccgatacatgattttcggtttccttgctttgctgcaaggtacgctggtgtgcctgggcgatatgttctatctcggcgtgcagtgtgagcatccgattcagtttttgatggtcgggtggttgtctgcactggtgttctcgaatattgtgtatacgctggccctatcgttcggtgatatcggcaaagccattgccgtagtactgctggttatgcaggtagccggttccggcggcacattccccattgaaacactgccgacgttcttccaggtcgtttctaaatggctactgttcccctatgcggtggatgcgatgcattcggccatggcgggctcattcggcatggaatactgggtttccatgggcaaactggcactgttccttgttccctcattgctgttgggacttatgttgcgcaagccggtaattcgcttcaacgattgggttatccgcaaccttgaaagcaccaaggtgatgtgagtgttggacggagtgtgtccgagcgccctgaacgcttagcagcctacgacctggcgtgtttggaccgtaacctgcctcagatacggcgttggcgaggcctgtggagcttctgacgctaacgtctacgtggcttgtagccctttttacgactgtgtggcttgagttgctggttcagcggtacatgccggtaactggattgtggatcgcgatgtgtgaggtgccagcatccgcaatattcgcaacggtacacccatagctcggctccacgctcgatcaggctttgatcagcggcacgctgagcctgcgccttatcgtggtacatgattttattcgacgtggcgcaacgtttaggggtgaagtaatgcatagcagaagccagtgtagagcgaccccataaccaagccagtttctggctcccctctggaggggagctgtctgcgcggcggaccggggggccgggcgttgggctcccacggtcgcggacgcgccgcgccgttcggcctcgccgtcggggctggccgggaatggtcccgggcgtgggtctcatgggtatgcggggaggtcccggtgcccgtgcgggttcgggccggggccggttccggatatagggaaagccccggtacctttgaggggtatcggggcttcctgtacgtgtggtgcggcggcgtgctactctcccacaccctgtcgggtgcagtaccatcgccgtgccaggccttagcttccgggttcggaatgggaccgggcgtctc

SEQ ID NO: 1889 - DNA, 11548 bp, Unknown
  MAG_14  MAG No. k141_70792
cacccagctcatggccgaccgtaagggccgtatggacggcatgaccaaccacggctccggttgggtccgcctgcagttcaccgtgccgtcccgtggtctgatcggcttccgcacggctctgctgtccgccactcgcggcaccggcatttcctcctccatctccgctggctatgctccgtgggctggtgccatcaccattcgtcagaacggttccatggtttccgatcgtcagggtgtggccactccgtatgccatgcagcgtctgcaggcccgtggcaacttcttcgtcgaaccgcagtccccggtgtacgagggtcaggtcgtgggcgtgaacaacaagcccgacgagctggatgtgaacatcacgctggccaagcacatgaccaacatgcgttcctccaccgctgacgtgctcgaaaccctgaccccgccgatcaagatgagccttgaggagtccctggacttcgccaacgaggacgagtgcgtggaagtcacccctgagtccatccgcgtgcgcaagatcatcctcggccgtgaggactggtacaagtggcgcgccaagcagcgccgccagaacgccgcccagcagggtaagtgatctggtgcgactgtagccgaccattctctctggctcccctctctgaggggagccaagtttattcctcgccaagtcatatccccacctatactgaaacgcatgactgtgaagagcactactgaactgcgtccgtggtcgtatcgccagaacgcgctggtcaaatcgttgatcacgattgcggcgggcgtggcttccgcctttgtgggcacgttcgcccaccgtatgggtgcagaactgagtattccgtatggtctggtgctggcatttctgctgatcggcctatcgacatggtgcgcccgttcgcgcatgggcgcggtcggactggccctgcacctcatcgcctcctcgctgaccgcatggggcatggcactgaccaccacatccggcaaggcggtcatcgtcgccggattccaaggcgacatgccgttcttctcccagcatgccggctacatctggctgtacggcctgatactggtccaagtcgtcctgctcattcttcccgcccgctggttcgttattcccactcattctgaatcgcgcgcgtaactatatatggcggcacatttccgcgaatgcgtcgcgtatcggcgggcgtaggggattacggccgctaccatagaaccttatggcacgcatgaaactgttttacttgggcccggaaggcaccttcacccatcaggcggcaatgacggccgccgaccagttcgccacactcggcgacttcgacctcaccgccctgcccgacgtgcccgcgatcatgcaggccgtacagtcgcgccaaggctggggcgtcatcgcatgggaaaacaacgtcgaaggctatgtggtcccgaatctcgacgcgctgatcgacgcccccgacgcggccggcttcgcccggatcagtgtggacgtggccttcaacgccttcaccgtgcgcggccacagcatctgcgactgcaccggcaaccccgtcagcgcccacccgcacggcctggcccaatgcacccggttcatcaccgaacaccatttgcagcccgaacccgcatcctccaacgccgccgcctgccgcgacctgaagcccggccgcgtggcgctcggccccagcatctgcggcgaactctacgatctcgacgccctcgccgaacatgtgcaggatttcgatggcgcgcacaccgaattccttgtcatcgccccgcgtgatgtggtccaggaattcaacgcccgcgcccaccgcaatgacgccggcgacttcgaaaccatcatcaccttcatcccgctggtcaccggccccggcgtgctcgccgacctgctggacgtcctgcgtgatgcggggctgaacatgaccagcttcatctcgcgcccgatcaaaggccacgacggaacctacagcttcatcgccacccttgacgccgccccctgggagccaagattccgcaccgcactggaagagatcgccggacacggcgactgggcaaaaaccctggccgtctacccacgccgcgaacgcccgaacccgccggtcgacgcctggatgctgcccgagggcggcgtccacatcaccaatcgcgcgtcggaaggctggcagtacgccgagggagcaaggaaggaactgctgtggtagacacagtcggaatcgtcggactcggattgattggcggctcgctcgcacgccgcctgaccgagcgcggcgtacgcgtcatcgcgtggaaccatcgctcacacccctacgcccaggccgaagccgatggcattttctgcaagagcacgctctccgaactcatggatgccgagccggatgtggtcgtgctgtgcaatccgctcaaggcgatgccctcaatcctcgccgccctagccccgcttatgggcgaccatccgaacaccacgctcaccgacgtgggctcagtcaagggcatggtccgcgatcaggtcaaggctgccgcgctggggaagtgctacgtcggcgcccatccgatggccggcaacgaactgtccggctggcaggccgccgacccgcatctgtacgacggtgccctatgggccatcaccgtggacgagtccacggactaccgccgcttcctcgacgtcgccgcgatgatcaccaaggacgtcggcaaccgcgtcatcgtcgtggacgacgagacgcatgacaaggccgcggcgatgatctcccacatgccgcatgtggtgtccaccgcgctgatcaacgaactggtcgccaacccggaccgcaacatcgccgccgcgctggctgccggctgctggagggacatgacccgcgtgtccctgaccgacccggaccgcacgcgcgcgatggtcgaggaagactcgctgaacgtcgaagtgctgctgcgccgcatggcggcacgtctgaccgatatggccgaccaactgcacgctggtgccgacggcgagcaggatgtgatgggattcttcgccgaaggcgaccccttccgccggtacaaggccgccgtgacgcgagccggcatcaccgctgcacaagctggtacggccaccgcgcagcaagccggcacaactgccgccggattcccggaacgcgagctcgccgtccccgaagccggctggcagcagaccttgctgttctccgcacgccggggagaagccatcaccggtttcatccatccgcgtcaggccatcgtccaactgcgccccgccatgtaactgcgccccgccatgcagcccgtgtgcaggttcccctcgccgcccgtcacgaagaaggctgcgcgagggggatgaagttcccgcttgttttcgtgagaagaccgtgtggctccgctgttcgaaagacccaaaggagtaaggtagtctgtaccgtttttcaggaaacgcatagaagttgatgcggcggatggctaaggggatgatgacgtatgacgttaccaaggcagattccggccggtgcccgcgtggtggtgcgcatcaccgacggcattgacccggtcgaccaccgtatgaagttccgcgactatgtggggcatgtggtttcctgggatggatacacgttggagatggtgcgtgacgccgccgccaatggttcgcgcccggcccagaacgtgaccatccatcaggaacagattgccacattgaaacccgtgccggagcggcgtaacacgccaccccggccgtaacccaaggccataaagaattcggaggagaacgagagtgtcatctacgcagttcgacggcgatatcgactccttcgtctcctatctgaagtccaaccgcggcctgtcagcgaatacgctcaaagcgtatcgcgcggatctcacggcatgcctgcatctgttcgagctgcgcggcgtgaccgatctgaacgagatcacgctggatgatctgcgcagctggatggcggtggaatcgcgcgatcacgcccgcagcagcatggcccgcaaaaccgtggccgtgcgcgggttcttcgcgtgggcctatgagcatgggctgaccaccaccgacccggccgccacactgatgactccctcgattcccagcacgctgcccgcggtgctcaccgaatcccaggccgagcaattattggatgtcgctgaacatgccgttgcaacaaaccagtacaaggacgatgggggagcggcagccgcgtccggcagcggcagcggcaagacagctgataagtcggccgataccgtaaaccgcagtgaggcacccgcccgtgcagacaagcgcgacaacgcccgagtcaccgccgaatcgcagcgcaacgccgcgattctcgaactgctgtatgccaccggcatccgtgtcgccgaactggtgtcgatggatatcgccgacatcgacttctccaatcgcaccatcaaagtcaccggcaaaggcaacaagcaacgcgtggtgccgttcggactacccgcccagcgtgcgctggagacttggctggaacaggggcggccggtactggcccgtacggcaacggatgcagtcaagtcccgtgctgccaacgccctgttcctcggcgcacgaggcggccgtattgaccaacgcatagcccgtgacatcgtgcacagagcggcccgagaggccggcgtgccggacatcagcccccatgcgttgcgtcattccgccgccacgcacatactggacggcggtgccgatttgagggaggtgcaggagatgctcgggcattcctccttgaaaactacacaacgctatacgcacgtctccatcgagcagctcaagaaccgttacggacaggcctttccgcgggcatgaccactatgtggacattggttaacaaactcagcaaagactgaacctagccggcaagaacccctgaattttacatgggtgtaacaaaaaatacactgcttgtctcccaagtgcgcaaaaatgacaggtaatcagcaacggggttggattgttcgagacatcgtgagatgcaagtctcacggtgacggggaatccagccccgtttgcatgaggcggggctgagacgtcctgcaacctaatgaataggagaaatcatatgaagaagaaagctcttgctttcgctgccatggcctgctccgtggccatgctgctgagcgcctgcggcggctccaacagcaacgctgcctccggtaacaccgctggctccaacatcatcactgcgtacaactccgaaccgcagaacccgctgatcccgggcaacaccaacgaaaccggcggcggcaagccggtcgacctgctgttctcccgtctggtctccttcgacaaggacggcaaggcttccaacgaagtggccgagtccatcaccccgaacgatgacgccacccagtacaccatcaagatcaagtctggctggaagttcaccgacggcactccggtgaccgctgagtccttcaccaaggcctggtcctacgtggccaacgccaagaacgcccagaagtgctcctccttcttctccaccatcgccggctatgacgatctgcagaaggatggcctcaagggtgacgagcagctctccggcctcaaggtcgtggacgacaccaccttcaccgtcgacctgaaccagtccgactccgtgttcccgattaaggtcggctactcggccttcgccccgctgcccgagtccttctacaaggacccgaaggccttcggccagaagccgatcggcaacggcccgtacaagctggaccactgggatcacaacaaggaaatcgccctcgtcaagaaccctgactacaagggtaacgagcagcccaagaacgacggcgtgaccttcaaggtctacaccgacgactccgccgcttaccgtgacattcaggccggcaacctcgacgtgatggaatccgtcccggccgccttcaccaagaccttcaagaccgacaagaaggtccaggcttactccgaggtcggctccgtcatccagaccttcaccatcccgtcctcccttgatcacttcaagaacgacgaggaaggtcagctgcgtcgtcaggccatctccatggccatcaaccgtgaccagctcatcgacaaggtgctcaacggcaacgccgccgccgccaccgagttcacctccccgaagaccccgggctactccgactccctcaagggtgccgacaacctgaagttcaacgcctccaaggccaaggaactgtgggccaaggctgacgccatctccaagtacgacggccagctcaccttctcctacaacgccgatggtggtgccaagccgctttacgacgccgtcgtgaaccagctcaagaacaacttgggcatcgacgcggccaccaacccgatcccgaccttccaggaattccgtgacgcgatcaccaaccgtcagatgaagggcgccttccgtaccggctggcagcctgactacccgtccgccgagaactacctgtggcagctgtactccaccgctgctgctgacggcaacggctccaacgacggtgactacaagaacccggccttcgacgacatgtgcaagcaggccgccgccgccaagtccgtcgatgacgccaacaagctgtaccagcaggctgaggaaatcctcctcaacgaccttccggccatcccgctgtactactccaacgcctccggtgtggcttccctcaacgtgaagtccggctacgccttcgattggcagaacctcccgacctacaccgagatgtccaagaagtgagtctgactcactgaacggataccgttaggtagttcggaaataaagggcgaggatcgcaagatccccgccctttttgttgtgtgaggggtgcttgctcacgccatcgggaaccaagttaaagtatccactatccgaccgcaaccatggacatatccaccagcattgcccaatctcaaaccttgcgttaacgcaaatttacatatcacagtccgggcatgcggtaaactgtcggagtatttatcgaccggcgggggcgtactataccctttctggccggtctaggaaataaggagcaaccgtatgggtaagtatcttctgcgacgcattctgcagatgattcccgtggttctcggtacgactcttctggtatatgcccttgtattcgccctgccgggcgaccccgtcaaggccatgttcggagacaagcctgtcaatgaggccgtcgcagcccagatccgcgcagaataccatctcgaccagccgttcatcgttcagtactttatctacctgaagaatgcactgaccctgaacttcggcgataccttcgccggccagcccgttctcgacgaaatcacccgcgccttcccggtcaccatcaggctcggcttgatggcgttcgtgttcgaggcgattttcggtgtggtcttcggcattatctcgggcctcaagaagggcaagtggtacgacaccgttatcctgatcgtctccctgctgcttatttccgtgccgaccttcgtcaccggcttcgtcatgcaatatgtctttggtattcagtgggcgatattgccggtgacggcaggcgccgaccccggcttccttgatctgctcatgccggccatggtgctcggttcggtgtcgatggcctatatcatccgactgacccgctccgaaatctcctccaacatcgccgaggattacgtgcgcaccgcacgtgccaaaggtatgtcgaacggtcaggtcatgctgcgccacgtgttacgtaactccctgattccagtcgtcacttacctcggccaggacatcggcgccctgatgggtggtgccatgatcaccgagcagatcttcaacatccacggcatcggcttcctcacctaccagtccattctgaagggcgaggcaaacctggtggtgtccatcgtcacgttgctcatgctgattttcgtagtgtgcaacctcgttgtcgacatgctgtacgcggccctcgatccgcgtatccgttacgcgtgatagggaggagtgagtcacatggcaaacgaaaccactgaaaacgagctcaaccagaccggcgagccaggaaccgaatacttcatggaaaccctgcccggtcaggaccgttacgtagctcctctcgacgagaccccgttgcaggacgtcgattccgtcgacgaatccgcaccggccaccagcatgtgggccgacgcatggcgaaccctgcgccgcaacccgctgttcatcatttccggcttgctgatcctgttcatcatcgtggtggccatcgcccccggtctgttcaccaagcaggatccgaacgcctgcgatctgggcaactccttgagccccgcctccgccggacaccccttcggctacgacctgcagggctgcgacgtgtacacccgcgtggtctacggcacccgtacctcactgtccgtcggcgtgctctccacgctgctggtcgtgattgtcggtaccctgatcggtgccgtcgccggcttcttcggcggttgggtcgacgcggtgctgagccgtatcaccgatatcttcttcgcgctgcctatgctgcttggcgccatcgtggtgcttcagatgttcaagacctccaagtccatctggaagatcgtgctggtgctgacgctcttcggctgggtcggcgtatgccgtatcgcccgaagcgccgtgctggaatcgaagaacctcgaattcaacaccgcttccacggccctcggctccacgcctgccagaaacctgttccgtcacatcctgccgaactccctggccccgatcatcgtcatcgccaccacctcgctggcctcctacatcgtggcggaagcgacgctgagcttcctcggcgtcggcctgccgaccaccacggtgagctggggcggcgacatctccagcgcgcagaccaatctgcagaccgatccgatggtgctgttctacccgtccgccgcactggccatcaccgtgcttgcgttcatcatgatgggcgacgccgtcaaggacgccctcgatccgaagagccgtacggcctgagcgaggggagtggagaaacattatgactgacaacaccaacgccaagatgctggctatgcagaaagagcatggtccgctgctcgaggtcaaggatctggccatcgacttcaccactgacaccggcaagccggtgcatgcggtgcgcgatgccaacttcaccgtctaccccggccagtgggtggccatcgtgggcgaatccggctccggcaagtccacctccgccatggctgtgctgggcctgctgcccggcaccggtcacgtggtcaacggttccatcaagcttgacggcgaggaaatcgccggcgccaagcagagcgagttcgacaagctgcgcggtaccaagatgggtctcgtgcctcaggacccgatgagcaacctcaacccggtgtggcgtatcggctcccaggtcaaggaggcgctgaaggccaacaacatggacgtggcccacgagaagcgctccgccctcgccaaggctctggccggcgacgaggtcgaagtcaagggcaacgacgacgagaccttcctcggcaccaaggaactgcccgagctcatgaccgaggccaagaaggccctgaccgaagccggcgtgtccggcgaggccttcgacaaggccgtcgcccgcttcaccaacgaatgggttccgggctccgaaacccgttggcgcgtggccgacgacctcatcaaggccggcgtggccgacgatcaggcctggtacctcgccaagaagtacgtcatcggctccacaatggatgaccgcatcgcgggtctgctgtccgaggccggactgcccgatgcggccacgcgcgcccgtcagttcccgcacgagttctccggtggtatgcgccagcgtgcactcatcgccatcggtctggcttgccgccctgacctgctgatcgccgacgagccgacctccgctctggacgtgaccgtgcagaagcgcatcctcgaccacctgcacatgctcaccgactcactgggcaccgccgtgctgttcatcacccacgatctgggccttgccgctgagcgtgcccagcacattgtcgtgatgtacaagggtcaggtcgtcgaatccggtccgtccctcgaggtgctgcagcacccgcagcacccgtacaccaagcgactcgtggccgccgccccgtcgctggcctcccagcgcatcatctccgccaaggagcgcggtgagaacgcggacgccctgctcgatcaccacatcgccggcgaaagcacgcttgagaagagcgagcacatcatcaccgtcgaccacctgaccaaggaattcaagctgccccgcaagaaggagatgttcaaggccgtcgatgacgtgtccttctccgtcaagcgcggcaccaccctggccatcgtgggcgaatccggttccggcaagtccaccgtggcgaacatggtgcttcacctgctgaatcccacttccggcaaggtgttctacgaaggccgcgacacctccacgttcaaggccaaggatctgctcggtttccgccgccacgtgcagccggtgttccagaacccctacggttcgctcgacccgatgtactccatcttccgttccatcgaggagccgctgcgcatccacaagattggcgataagaagtcgcgtgccaatcgtgtcaaggaactgctggacatggtcgagatgccggcttccgtgatgggccgttacccgaacgagctttccggcggccagcgtcagcgcatcgccatcgcacgagccatggctctggatccggacgtcatcgtgtgcgatgaggccgtctccgccttggacgtgctggtgcaggatcaggtgctgcgtctgctcaacgacctgcaggccgagaagggtctgagctacctgttcatcacccatgatctggccgtggtccgccagatcgccgacgaggttgtggtgatgcagcacggcaagctcgtggagcacgccaccaccgatgaggtcttcgaccacccgcagaagcagtacacccgagacctgctcgacgccatccccggcggcaagctccagctcggtctggactgataatctgcgtttgagcgcattgtattgggttctttccatccgtggaaagaacccaatattcgtatgcgcaggtttgcatgatggttcgcgtgggacgaaaggcaaaaattggtgttttcccgatgttgtcccacaatttgtgggacaacatcaacatcaatcgatggacatgagtgttgtcccacagcagatttctcacgaagcccggaattacgccattcttagtgtggttgataattactcatgctgtggggcgtgggacgacccgcgaaaatcgtcgattttcggatgttgtcccacagaatacgtcatacctcgtatgcaatcgtgagtggggcgtgatcggaccagcgtttgtcatacgtgggagccttgtcgatgacgaatccgcgtgcggtctccgccagctcgggcgtggcgaactggtagtcgattctccagccgacattgttgtcgaaggcgcgccctcgttggctccaccaggtgtatggcccctgaatgtcgccggccaacgaacgcatcacatccacgaactcgtattcgtccagcc

SEQ ID NO: 1890 - DNA, 23271 bp, Unknown
  MAG_14  MAG No. k141_72114
gaccaagccgtagcacagggcgaacacggtggtcagaatcgaccacagcagacgctgttcgggctggacgcacagcatgaccagcgaggcgacagacagcacggcgaacagaatgttccatacgcccttgcccggcaggttcagcttcttgacccacttgatgccctgtagcttgccggcagcgatgagcgagccggtgaaggtcacagaaccaatgaggataccgagaccagcggtgatgagcaccacgatgtccggggtgccttccttggtcaggatgtcgttcagggccacgagtgcggcagcgccaccacccacggtgttgaacacggaaaccagctgcggcatgtcggtcatcttcaccttcttggcggagacgacaccggccacggcaccgatcaggatgccgacgaccagcaccaccacggcgacaatgttcacgaagcccttggcgaaaagcacgatgaacgccatgagcacggccacgaccatgccgaacgcggagatctggttacccttgcgggcggtcttcggcgaattcatgaaatgcagaccgaccacaaacaggacggcagagaacaggtagacgaaccatgcgacgatgtcgatggcgccaacggttgcggaggtcattacttcgactcccccttcttctcgttcttgctggacttgaacatctcaagcatgcggtcggtgaccacgtagccaccaacgacgttcatggtgcccagcacggcggccaggaagatgaacacgtaggccagtgggctattggcttcggctgccacgatcacaacgccgacgatgacgatgccgtggatggagttcgcgccggacataagcggcgtgtgcagggtggcgggcaccttgccgatgacctcgataccgatgagcagcgcgaggacgaacagggtaatggaaacgacgagagtaggcatggtattccttcttccttacttctcggacttctcggcatcggcagcagctgccggggcggcggcgcggccggcaaccaccagcgcgtcgtcgagttcttcggtgagatcctggccgagcttgccgtcacgcacgaagtgcacgaggatgtcggccacattgcgcgaaagcaggttggatgcggtggtggcgacgccggaggccaggtagggagcgccaatcagcttgacaccgccctcggtgacctgctcgccgacggcggaaccctcgacgttgccgccgaggtcggatgctgcgcagtccacgatcacggcaccacgcttgagacccttgacgccggctgcggtgagcagcaccgggggcttacggcccgggaccttggcggtggtgatgatgatgtcaaagccggcggccttctcatcgacggcagcctgctgctgagcctgctcttcggcgctcaacgcgcgggcataaccgccctcgccctggcccttggagaagtcaagtcccagatcaaggaacttcgcgccgagggactcgacctcgccctgggaggcgggacgcacgtcgtacgcggtgacgaccgcgcctagacgcttcagcgtaccaatggcctgcaggccggcgatgccggcaccgagcaccagcgccttggccgggcgaatcgtgccggcggcggtggtcatcatcggcaggaaggagccgtaagcatcggcggcggtgatggctgccttgtagcccatcacggagttctgagaggtcatctcatccatggactgggcgctggaaagcttacggggtagcttttcgatggcgatgcccaccagaccggccttctcgagcgcggccacgtaatcggcatcggtgaaggagccgagcatgccaatgacccactggccggccttgagcttggctacggtctcggcggacggtcggtccacaaaaccgagcgcgtcggcttcggcgagcacctcgtcgcggctggtcaccttcgcaccggccttttcgtaatcctcatcggtgtattcggcggcaatgccggcaccggcctcaataatcgaggagactccgctcctcttcagccgggtgacgatatccggcgtcaacgcgacgcgggattccgtttcggacgtttcattcaaaacgccgaacaccacggtggcttctgggttttgcgccatgagagccctttcttgttctacttcaaaatggacatggttatccgcatagtaagtgtagtcggaaagcaaagaccatgacttgagattccgccaatcgaaacagaaacgaacccgaaattagtgagaaatacgaatgtgtccatgtgcattgcggatgaattgctcggaagtcatccaacaatcacccggcatcgatcagcaaccaaccgctcagtaattatcgacaatcaccgtttcgtagctcacggttactcaacaatatcgggacctgtgcaatattttgccacgcactcccctaacccgccagaatcctacggttgcgtaaggtgacgagttcggtttgggcgattacaatttgaactttgagaagcgttcgcctcatggctggacgacactgaaaggtttacaggagcaagacttgtcggttatcaattccttcacgcagcacactatcaatctcacccgtaaggcgctcaggttgggatccgacttcgtccacccggtccacgacgacaccccggacgagcccgattacctgtccaatgccgacgtgccggtcgagaccaatatcgctttgcctcacagcgacgattgggacgacggccacctgaccgtcaccgacatcgaccccatcaccggcctgctcaccacctccaccgaaggcaatccgccgctggacgaagttacgtccatctacgacctgtatgcggaccgcgccgaacgtatgggcgatgagccgctgtacacctacaagtccggcaacgattgggtgaccgtcaccgccaacgagttcctggctgacgtgcgtgccgtggccaagggcctgattcattacggcctgaagaagggcgatgccgtggcattcatgtgccgaacttcctacgactgggacctgaccgacgcggcgatcatggcgtgcggcggtgtgctggccaccatctacgacaccgattccgccgagcagattcgcaatatcgtcaacaactccgatgcccgactgctgatcgtgcaggacacggacatgcgtaagaaggcggatggggccgtcgaagagtgcccgtccctggagcacatcatcaccatcgagaccggtggcttggacgaaatcaaggcctacggcaccacggtctcggacgaggagctggacgagcgcatcgattcggtcaagaagaccgacctgtgctccatcgtgtacacctccggttccacggccgcgccgaaaggcgtggagatgacccacgagcactactgccagaccgcgctgaatctgccggcctacatgcccgatctgctgcacgacaagaggaacaccatcctgctgttcctgccgcaggcccattccttcgcccgcgccatcaactacatcgtcgtctcctcgaacgtccgcatctacatcgccaccggcatcaagacgctgatcagcgatctgcaggtggccaagcccactctcatgatcgtggtgccgcgcgtgctggagaaggtgtacaacgccgcgtcccagaaggccggacacggtccaaagggcgtggtgttcgcctccgccgtggtggccgcgcagaactatatgaaggaagtctccgccaatggcaaggcaggtgcactgacccgcactcgccgcgctgccttcgatccgattgtctactcttcgctgcgcgaagtgctcggcggtcgcgtcaagtggattgtagccggcggtgccccgcttgacccggaactgctggctttcttccgtggcgcgggtgtgcctgtatacgagggctatggtctaaccgagaccaccgcaccgtgcgcgttcaacccgctgggtacgccgttccacgctggttccgtgggcatcgcattccccggattctccctgcgcatcgccgaggacggcgaaattcaggtcaagggtcgtgctgtgttcccgcgctatcacaagaacgacgaggccactgagctgtcgttcaccgaagatggctggtatgccaccggcgatctgggccgcatcgacaacgacgggttcctgtacatcaccgggcgcaagaaggacctgatcatcaccgccggcggcaagaacgtctcccccggcccgatcgaggaggtcatccagcgttgcgagatcgtctcccaggcgttggtgctgggcgacaaacgcccgtttatctccgccctggtgacgttggacgagaagtcgttgcgcccgtggctcgccgccaaggggcttgacgagaacatgtccctcgaggacgcggcaaggaacgccgccgtgcgcgccgaagtgcagcagtgggtcgatcgggccaacgagggagtctcccgcgccgaatccgtacgcaagttcatcatcctgcccgaggagttcactcaggagaacggcctcatgaccgcttccatgaaggtgattcgccccaaggtcatcaagcgctactccaccctcctcaacacccagatgtacaccaagaagaagtaaggaggactcgagtacagcaaaagggagattccattggaatctccctttgttataaccggccgaaggccgattcctagaagccgaggcgttctagttgcttggggtcggactgccagcctttggctaccttgacgtggaggtcgagcttggctttttggccgacgatgcggttgaccggggtgcgtagcttcttcttgacgtaggtgaggttcgaggcgcccttgccgatgatgatcggcttctgtgagtcacgctccacgtaaatggacacgttgacctgcgccttgccgtcatagccctgaccggtctcgttgtcttccggatagtcgatggaatcgaccaccacggccagcgaatgcggcaactcgtcgtccagggtctcaaggaacgcaccgcgcacgagttcggcgatggtgtcttccggacgctcctcgctgatctgatcgtccgggtacatctgcgggccctcgggcgtgtgctcaatgagcacgttcttcacttcagccagattgtcgtgcttcagggcgctcaccggcacgatgtccgagaaatcggcgaaatcgttgatttcgatgagcttgttgatgagttgctgacggccaagctcgtcgatcttggtgacgatggcaatcagcgggatgcgccacttgaacgtaccgtcctcacgcttggtggcgaagtcggtacgcagtcgggaaagaatacgcttgtcgccggggccgatttcctggtcggcgggcagcaggaaggccaccacgtccacatcggccaaggattcgtcgaccacgtcgttcagacgctggccaagcaacgtacgcgggcggtggataccgggcgtgtccacgagcacgagctgcgcgtggtcggcggtcaggatgccgcgaatcgccttacgggtggtttccgggcgagaggatgcgatggcgatctgcttgccgatcaacgcgttgatcaacgtggatttgccgacgttcgggcggcccaccacggccacgaatccggagcgatacggcacgtcctgcttggtcacattctccgtttcaccggtcgcgtcgacttcggcaacgccggcaacatcggaagcatcggtgacgtcaatgtcatcgacgtcgttcgtgctgttgttctggtcggtcatatcactccttgctggcggtatcatcgccttcgacgggctcgccgtcagtttcctcatgggtcctgctattttcctcgccgccctcgacgtgcgccggttcgacgacgatggtggacaccttcttgcggcgtccggcggagtccacggcggtcagtcgcagaccgcgcgtcacggccgaagcaccgacaatcggcacgcggcccagaatcttggtcagcaggccgtacacggtatcgacatcgtcctcatcaatgtcgatctcgaagatctcctccagatcggcaatcggcgtacgggcgggcatcttccacttgttgtcgccgattttctccggctcggtacgctgggtgcggtcgtgctcgtcttccagctcgccgacgatctgttcgatggcatcctcgatagtcaccatgccggcgatgccgccatactcatcgaccaccacggccacatgttggcgggaacgctgcatctcatggaacaggtcgtccaccggcttggattcgggaacaagcagcggctgccggacgatggattcgaccgtgcgctccatggccgccgggttgaaggcggtggcgcgcacggcgtccttcaaataggccacgccgatcaggtcatccacatcctcaccgatcaccggcacgcgggagaaaccggagcgggagaacagtttcagcgcggaagacagtgtggagtcgcgctccatgcagatcatatcggtgcgcggcaccatgatctcgcgagtcaacgtatcagacagggtgagcacgttgcgcaacatttcggagacttccggatcgaagtcgttggactccaccagtcggtcgatggcggccttgccctgctcgagctgaatcttctcaagctcctcgtcatcggacagatcggagtccttggagcggcggcccggccccttggaaccggacttgtcgccaccgatgcgtgcgaacggcgtgagcttggtggccaacgacacgatgcgcgagttggaaatcatgatgtcgaccggcttggtcatgccggcggtgcgcgggcggaccagtacggagaccacggctacgataatcgcgaacaggaatccggcgagcagttcaacccacagttccgcaccccacagggatgcgatggaagacaccagtacgccgtcgagcacattgcaggcgatgcggaagaacgcacagctgccggcggtggcgtaacggtcggcgatgagccgttgcacgcgatgaatcttgtcgatcttcttcatcttgaggaactggcttgcttcggagtcggtctgcacctcgaggatgagattgttgaggctggctcgcgttacgcgggccacggcgccttcagcggcggccatggtcagcgaaagccagacgaacagggccgccacaagtacgagaatgacggtgacggcgatcagcgtggtactggaatactccataatgttttttcggtgtccttgaatgtccttgaacggtatagaataatccgaatttggtgtgattgatttggaagtttatttggaatcgaggtcgcggccagcaccgtgcgcggcgtcgtacagggccagcgcgtcgggtgtgccggcgggcagcgtggcctgcacgttggcatcgtggcgcagggcgaagaaggtgagcagcagctgtcgctgcaggccgaacatctggcgctcctgctcgggggtcacgtggtcgtagccgagcaggtgcaggatgccgtggatggtgagcaatagcatctcctgcatggtgctgtgcccggctgcggcagcctgttgggcagcgacccacgggcagatgacgatgtcgccgagcactccttccatcacggttttgccgtcgcctgggcgcagctcgtccatcgggaagctcatcacgtcggtcggaccttcgaggttcatccaacgcatgtgcagttcggcgatgggatcgggatccacgaacatgatggtcaggtcggactgggtgctcacgcgcatctggtcgagtacccaaatacccaaatcggagaagaccttggggtcgatgacccactgggtttcattggtgacgtcaacgctcatcgtctgtctcactttggttggttgaatccgtttgctggcgggcatcgaagtcggtatggttgcggcggcccttgcgttcgatgtcgcggtggtcgccggcgatggcggagtgacggtcgtaggcggccacgatctggccgaccagctggtgacgtaccacgtcctcggttttgagatgcacgaatgcgatgtcgtcgatgccgcccaggatgcgttcgatggtggccagtcccgagcgcggcacggtcaggtccacctgcgagatatcgccggtgatgaccatcgtggtgttgaagcccagacgggtcaggaacatcttcatctgctgttcggtggtgttctgagcctcgtcgaggatcacgaacgcgtcgttcagcgtacgaccgcgcatgtaagcgagcggcgccacttcgatggagccgtcgtccatgtaccgcttgagctggtcggcgccgagcatgtcgccaagcgcgtcgtacagcgggcgcagatacgggtcaaccttgtcgttcagcgtgccgggcagaaagccgaggctttcgccggcctccacggccgggcgcgtaaggatgatgcggcgaatctgcttgtcctggaaggcacgcacagccttggccacggccagatacgtcttgccggtgcctgcgggaccaatgccgaaggtgatggtgtgcgattcgatggcgttcacgtaggccacttgtccggcggttttcgcacggaccggcacgccggcggcaaaggtgatgacgccgggaaccgtgggcttgcggtacgtcgggtcgtgggagccggcagaacgtgcatgggcgcgttcgtttgaggtcgattgcgccagtttgtcacgcaccgggccgtgaccgggatgttcgaggcgcacgtggttcttgagcacgttctggtcgagcatgcgacgcacggtgtcggcgtccataggcgcggtgtaggcggcttggatgatggtgttgaccaaatcctcggcctgtgcggcctgggcttcggtctgcttggagcgggagacgatcgccacgcggttgccgcgcacgataatcgtcaggtccggaaaggcgcactccacctcgcgaatgacctcgtcaaccgggccgagcacggcgacggggtcaagttggggcgggatggtgatggtacgtgtagtcgttgccacgaagcggatattcccctactactcgtcgagcttttcgccggtcatcacgtgcgcgtgcacgtggaagacggtctggccggcgtcgagaccggtgttgaacaccagtcggtaggcgccgtgaaattccttgtcggcgatgttctgcgcgatggagacgatgtgggccagctcggtcgggtcgtcggcggcaagttcggcgacgttggcgtagtgcttcttgggcaccacgagcacgtggaccttggccttggggttgatgtcgttgaatgcgtaggtcgtctcgtcctcgtagaccttgctgctgggaatctgccctgcgatgatcttgcagaacaggcaatcgtcggattcgctcatcatgctccttggtttgatgttgctacgcaccagcttagcgcgtgggcgttactcgtaacgtcccaacacccgagacaacagcgacaacgctacaggaccggccgtcgcggctctcagaatattgtgccccagtacgcagctcaccgctccggccttgacgaaatcagctacctcctgctcactgatgccgccctcaggcccgaccaccacactgacagtccgcggccggccgtcctggagcgtgcgttccaccaactgcgtaaccttctcctccacgccggaccacgtatcggtagcatcctgatgcagcacaatcaccacatcgccatgcacgcaggccctgcggcagatggccacgacctccttgctggacgcgcacgcctccagttgcggcttaaaagcgcgccgcgactgctcggtggcggcatccagtaccgaattccacttcttgtccgtacggccgaccttccacttggcaatggatcggtccgcctgccatggcaccacttggtcgacgccgatctgcgtagccatatcgatggcctgctcatcatggccggttttcgccaatgcctgaatcagcgccaaacgggtgagcggctcgggttcgcgccccacttccacaacttcagcaagtccggcttcaggatcggccatcactgcctggattctcaagccgttgccgtcggaaagttgcaggctgtcccccgccttgagtcgcatagcctgcacagcatggcgcttgatgtgcgcgggcagggttagcttccagccggcgtgaagttcgtcgctgttcaccgggacatcgtcgacctgcgggtcgaaaagaaaaagggcatcagtcatgacttcaaggctacacgcgacacgccgggcacacgcgcgaattgcatccctgtaatttcatgctaaactatttactcgttgtccaaacgacacctgcccgggtggcggaatggtagacgcgctagcttgaggtgctagtgcctattttatacgggcgtacgggttcaagtcccgtctcgggcacagataaaccccttgcattgcaaggggtttttcgttatctgcacacacgaaaggccaccaatgcagttcatcacgctggacaccgttgacgacccgcgcgtcgaagcgtatgtgagcctcaccgaaatgcagttgcgcaatcgcttggaaccagccaagggcgtgttcatcgccgagtcccccaaggttatcgaccgcgcgctggccgctgaccgcgaaccgctgtcactgctggtcgaggaaccttggctggagggcatgaaagacactttcgacttcatcgacgggcgctggggcgcggatattcccgtctacgtggcctcacctgagcagctcaagcgactgaccggctatcgtctgcatcgcggcgccctatgcgcgatgcgacgctggccgctgccctccgtagccgaggtctgcaggagcgcccgccgcgtggcagtaatggaaaacatcgtggaccacaccaatgtgggcgcactgatgcgttcggcggccgcgctcgatgtggatgccgtgctggtcacaccctcctgcggtgatccgctgtaccgacgagccgctcgtgtgtcgatgggcaccgtattccagattccgtggacccgtatcaccgggttcaacgacgacggtaccgaaaacaagcattactggccgttccagggcatcgacaagttgaagtcgctgggcttcaccaccgtggccatggcattggaggatcgttcgatttcgttggacgaactgacacgccgtctgcacgcgcctgacgaagatccgacgcatatcgacaagctcgcgctgatcttcggcaccgagggcgacggcctgtcccaccatacgattgcccgcgccgatttgaccgtgaagattccgatgagccacggcgtggatagtctgaacgtggcggcatccagcgcagtggcgttctacgcgacacgctaaggaatcgcacgcgctccgaaaaggccggatccttaaacaaatctacgaaactgttcatcgcaagttcacggcacgcgggggcgaaagccttgcatgttcgaatttttctgcaattattaactatgtaaaccgaatgcaaggaagcatccggcccagcagtgcggtgtcgaaagacgctcagtaacagagaggacagttacgatggccaagaatcccaagattctgtcgattgtgcttgcaggtggtgaggggacccgcctgatgccgttaacccgcgatcgcgcgaagcccgccgttcccttcggtggtgtgtatcgtctgatcgatttcccgttgagcaatctggtgaactccgggtaccgtcaggtcgtggtgctcacccagtacaagtctcactcgcttgaccgccacatctcccaggtctggcgtttctccccgctgcttggctcgtacgtctcccctgtgcccgcgcagcagcgtctcggcaagcactggtacctcggctccgccgacgccatctaccagaccatcaacatcatcgaggacgtccagccggacatcgtggtgatcgtgggcgccgatcacgtctaccgcatggacttcgagcagatggtacagcagcacatcgagtccggcgccgagttcaccgtggccggtatccgccagcccatcgaggaatcgaaccagttcggtgtaattgaggtcgatcccgatcacccgaacatgatcaggaacttccaggagaagccggccaccaccaccggtctgccggacaatccgaaccagattctggcttccatgggtaactacgttgccaacaccaaggccctgttcgaggctctggctctcgatgagaaggctgccgacaccaagcatgacatgggcggcgacatcgccccgtacttcgcttcccgcaacgaggccggcgtctacgacttcaactcgaacgagattccgggttccacggtcactgatcacgcctactggcgcgacgtcggtacgattaagcagttctacgatgcgcacatggatctgatcgcctatgtgcccgagttcaacctgtacaaccaggattggccgatttacacgatgtccggcaacctgccgccggccaagttcgtgcactccggccgcgaccgtctgggccacgccaccgattcgatcgtctcccccggtgtgatcgtctccggcggtgaagtgcaccactccgtgctctcccccaatgtgcgtatccactcgtgggcacagatcgtcgattccgtgctgttcgacggtgtgatcatcaaccgccgcgcccgcgtgtacaaggcgattctcgacaagaacgtggtcctgaccgaaaactccactgtcggcatcgataccgagcacgatctggcccgtggcttcaccgtcacgccggacggcattacggttgtcccgaagaacaccatcgtcgatgactgattgaccagtccagacttggaaaagccccgcatcatgcggggcttttctcgtatagagctccctcatcagagggagcttactaagcgctatcagtactttggcatgttgtcgaagttgaagccaagggcggcgagctggtcgcggccttcgggcgtgatgcgctccatggtccagcgcgggtcccacgtccagtcgatgcggaactcctcgaccagaccggccagcgtggatgcgcattcgtcctcgataaggtcggtcagcgggcaggccggcgtggtcagcgtcatcgtaataatggcgcggcctagctcatcgatctcaatgccgtagaccagacccaaatcgatcacgtcgatgccaagctccggatcaatcacctgatgcagtgcctcgcgcacgtcttcggcagtggcgcggccgatatcgtcaatcgccttgatcggaatctcgctgccatcggactgttcgtcatcccggcaaccgcatttgccatggtgaccgccacacgcacaggtgtcatcgccggacgcagcagagtgctcgatcgggcgtccgttcgggaagcccttggccaaggccgggttggccatcacgcggcgagcggcctcctcgtcctgcaggacgccgttgacggcatcgaaaacggacggctgtggttcggggaccaaattatcgttggacatatttcctcagttctttgcagcgagggctttggcgatggaatccttcagcccttcccagcctagcagagcgcatttgatgcgcatagggtatttcgacacgccttggaataccacggcgtcgccgagcttttcttccaggttctcgtcgtccagaccggcaccgcgcgattccatcagcttgtggaatgtctgttccagatccatggcctcgtccacggttttgccgtccaccagatcgaccatcaccgacaggctggcctgcgaaatggagcagccgtggccgtcccacaccaatcgcttgatggtgtgcggttcgtcatcggagacttcgacatggatggtcgcctcgtcgccgcaggtcgggttgaactggtgcgattcaccgggcgtgcagtattcgtggctggcttgcacggtgacattggccgccgcgtccgcggactgttcgaccgccgcgttgggcgcaaaggattccttgccatgcggatgtttcgacgcctcgaggatgacctcttggtacatctgttcgaggtcatccccgctcataccgaattcgttcatggtgttctgttttactccactccaaagaacttacggatgcccttggccgcttcgaccaatgcttgggcatcttcgaccgaattgtagacaccggaggaggcacggttggatgcgtataggccgaagtggcggtgcaccggctgggcgcagtggtgtcccacgcgaatcgcgatgccctgggcgtcgatgaactggcccacatcgtgcgggtgcacgccggccacgtcgaacgccacggtaccgatgcggtccacgttttcgcgcggtccgaggatgcgaatgccatcgatgtcgccgagcttcagcagttcggcggcgatggtcttctcatgggcctcgatgttctcgagcccgatgttcatcatccattcggcggcgacgcctgcggccaccacttgggcgaccggctgggtgccggcctcgaagcgggccggaggggccatgtattgggcctcgtggtccatgtaggcgagttcgaccatggagccgccgaagttggccggcggcagggcttcgagcagttcgcgcttaccgtacaggaaaccgacgccggtaggaccgtacatcttgtgcgcgctccaggcagcgaagtccacatcaagcgcatggaaatcgactttgaggtgcggtacggactggcaagcgtccaagatgaagatcgaacctacttcatgcgcacgcttgatgataggggcgatgttggtgatggcacccgtggtgttgcccacgtgggtgacggccacgaccttggtgcgttcggtgatgacttcgtcgaggttgtccgtgcgaacgcgaccgtcctcggtcaggtcgatccacttgaaggtggcaccggtacggtaggccagctcctggaatggcagcagcactgaatgatgttccgcacgcgagacgacgatctcatcgcccggcttcagggcaaaacgcttggcggcttctcccccacggcccagcgacgcattgccgaacgcggtggcgagcaggttcagtccggccgtggcaccaccggtggcgacgatctcttcttcgccttccgctgcattcgcgccgaccagcttggcgaccttggcacgggcctcttcgaaagccatggtactacgggccgccagctcgtgggcaccgcggtgcacgccggcgttgatcgtacgatagaagttcgcctcggcgtcgatcaccgcattcggcttctgcgaggtggccgcagaatccaggtacacgagcgggtgcccgtgaatctcctgattcagaatcgggaactcgccccgaatctccttaaaatcaaccattatgttcccctacttacgtaacaattgtacgaaacgagtgggagtcggacatggcctgttcgcgaccgtaacgacttggcctgagcggcccggagcgtgtcgagaatagggcatgtcaggctcccacggtcacggactcaggccagcgcggactcggagtcggcgccttcgggcaggtactggtcgtagccgttctcttcgagttcgtcggccagctcagggccgccggtcttgacgaagtggccgtcggcgaacacgtgcacgatgtccggcttgatgtacttcaagatacgggtgtagtgcgtgaccatgaggatgccgaactggttggcttccttggcacggttcacgccttcggacacgatgcgcagggcgtccacgtccaagccggagtcggtttcgtcaaggatggcgaacttcggcttcagcagttcgagctgcagcacttcggcgcgcttcttttcaccgccggagaagccttcgttcacggaacgggaggcgaacttcgggtccatcttgaggcgcttcatggctgcggacaggtccttggcccactggcgaataccgggagcctcgccgtcgatttcggtcttggcggtgcgcaagaagttggtcatggacacgcccggtacttcgaccgggtattgcatggcaaggaacaggccggccttggcgcgctcgtccggagtcatcttgaggatgtccttgccgtcgaggagggcctcgccggagtcgaccacgtacttggggtggccggccaacgtgtaggcgagagtggacttgccggaaccgttggggcccatgatggcgtgggtttcgccggagtggacggtcagggtggcacccttcaggatcggcttgatgccttccttggtttcgacgtggacgtgcaggtccttgatttcgagtgttgacattgttgtgctcctaaaaatgctgttcttacttgtcttcgaggacctgtgccatggcgtcgttttcgccacgggccagtcggcggtcaatcacggtcatcagatgttcggagatggcgggaatgccgatctcctcgacgagttcgccgaagaagccgcgcaccacgagcttgcgggcgtcggtttcggggatgccgcgggattcgaggtagaacagttcctcgtcgtcgaagcggcccaccgaagaggcgtgaccggcaccgatgatgttgccgttttcgatttcgaggttcggctcggaatcggcgatggcacccggggtcaggaccaggttgcggttgagctcgtaggagtcggtgccgggggcggtgggctggatgagcgcgttgcccacccaagtggagtgcgcgcccttgccgtcaagcgcgcccttgtagaccacgcgggacttgcagtcggggtggttgtgtaccaccatcgtgcggtgttcgatgtgctcgccggggtccacgaagtagatgccgagcatgttgaggtcgccctgttcgccgccgaagtcctgatccatgcggatgcggacgatgtcgccgcccaaggtcacgacggagtggcgcagggatgcgccttcgccgacgtggatgcggtggttggccacatgcttggcggttttggcccattcctgaacgaacgtggtggagacgtgcgagtccttgccggtggtgatttccacgccttcggccagtcgtgcgtcaccgtcgtgttccacgacgacgtccgcatgagccttgtcggcggcggcgatcaccagatggaaggcgtcgaggtcctcccccgcgccgtgcaccttgacgagcacgggctgggcgatctcaccggacagttccagaatggttgcggtgtggccggattcccattcgactgcggagacgcggtcgttgggcttggacacagtgccggacaggccctcaccgagcttgatctggctgagcttcacgccttcggccaacggcgagccgtcaatcatggagacttcgatctgcgtttcgccggaaggcttgaacacggtgaagaactcgttgatgcgctcgataggcgtgtagcgccattcgtcctgcttgcggctgggctccggatagtcgcctgcgttgaacgaacgcacggcatggtccacggaggacggcatggcggccggaatcgcgtacgggtcgttggggtcggcgaccggaatcttgatttccttgacgggtgttgtgttgtcggtcatcggaatcagcccaccgatccttccatctgaagttccacaagtctgttgagttcaagcgcgtattccatcggcagctcgcggctgatcggttcgacgaagccgcgcacgatcatgcctcgcgcctcttcctccgtgagtcctcggctcatcaggtagaagagctggtcttcggaaatcttggaaacggtggcttcgtgggccatcgagacgtcgtcttcgcgaacgtcgacgtgcgggtaggtatcggagcgggagaagtcgtcgaccagcagggcatcgcacacggtcgagttggacgaaccgtacgcgcccttgacgattttgaccagaccgcggtaggcggagcggccgccgccgcgcgagatggacttggcgacgatggtggagctggtgtgcggggcgaggtgaatcatcttcgcgcccgtgtcctggtactggcccttgccggcgaagccgagggacatggtggatgccttggcgtacggttcggcgaggatgcaggccgggtacttcatggtggccttggaaccgatgttgccgtccacccactccatcgtgccgccctcacgcacgtaggcacgctgggtgacgaggttgtagacgttgttcgaccagttctgcacggtggtgtagcgcacgcgggcatgcttttcgacgatgatctcgacgatggcggcgtgcagcgagtcctcggaccagatcggggcggtgcagccttccacgtagtgcacgtaggagccttcgtccgcgatgatcagtgtgcgttcgaactgacccatggccggggtgttgatgcggaagtatgcctgcaacgggatgtccacgtgcacgcccttcggcacgtatacgaacgagccgccggaccatgccgcggtgttgagggcgccgaacttgttgtcctcagggggcacgacggtgccgaagtacttcttgacgagttcagggtattcgcgcacagcggtgtccgtgtcgacgaagatcacaccctgcttcttcaggtcctcacgaatggagttgtagatcacctcggactcgtactgggcagccacgccggagacgaggcggttcttctccgcctccgggatgccaaggcgatcgtaggtgttgcggatgtcgtccggcagctcctcccacgacttcgcctgcttctcgatcggcttgacgtagtacttgaagtcgtcggcgttgaagccggagagatccacaccccaatcgggcatgggcttttcgaggaacgccttgaatccacgcagacgcatgtcgagcatccactgcggctcgcctttgtcggcgctgatcgcgcgtacgacgttctcatcaatgcctcgttttgcggcttcgccggcggcatcagaatcatgccaaccatagttgtagtcgccgaactggctgatgatctcgtcatccttcttgatcttgtcctcgttgacgcgggtacgatcagccacatactggctcatctccacgtcagcggcggcgtttggtgctgtgttttcggtcaccatcctgccttccttgtatcacacttaatcctatgaaaacctagcagaacccaagtgcaaacactagctgtcctgacgcatattggctgtgggcttgattacatgcgggcgccatcgggccatgcggcatcacggatggcgccaaacggcgaaggcgtggcggcgaagcatcctgagatgccgtgccgtcacgccttcatcgtgcgcggaccgaccgcgcgggatccacggtcagcgggccgcctgatggccgagcgccgccttgaccagaccggcgaacagcgggtgcggcttggtcgggcgagacttgaactccgggtgagcctgggtggccacatagaacgggtgcacgtcctgcggcagttccacgaactcggtgagctcgccgtccgggctctggccggagatgcgcaggccgccttcacgcagacgatccttgtaggccacgttgacttcgtaacggtggcggtggcgctcggtgacatgcgtggtgccgtacagttcggcgaccagcgagccttcctccagctcggccgggtaggagccaagacgcatggtgtggcccatgtcgcccttgccggccacgatgtccttctgctcttccatggtggcgatcaccgggttggcgcaatcgggctcgaactcggaagagttcgcgtcttcaatgcccagcacgtggcgggagtattcgatgaccatggactgcagaccaaggcacaggccaagggcgggcagcttggtttcacgggcgaacttcagggcgccgatcttgccgtcgatgccgcgaatgccaaagccgccggggatcacgatgccgtcgacgttgtcgagagcggcggccgcgccttcagtggtttcgcaacggtcggcagcaacccatttgacgttgaccttggcccagttggcaaagccgccggccttgatggcctcggtgacagacaggtaggcgtccggcagatcgatgtacttgccgacgatggcgatgttgacctcgtgcttggggtggtggacgcgctcaagcaggtctgcccattcatcccaatcgacatcgtggaacggcaggccgagctcacgcaccacgtaagcatcaaggccctcttcgaacaggatcttcggtacatcgtagatgctcggcgcatccacgcagttgaccacaccttcggcatcgacgtcgcacatcagggagatcttgtctttgatggactggttgagcgggcggtcggagcgaagcaccaaggcatccggggagatgccaagctgacgaagcatcatcacggaatgctgggtgggcttggtcttgagctcgtgggcggcggaaatgtacggcaccagggaaacgtgcacgaacatgcagttgtccgggccgagatcgcgacgcacttcgcgggcggcctcaaggaagggctgggactcgatgtcgccgacggtaccaccgatttcggtgatgatcacatccacgtcatcggaagcctgggcgcgcatacgagacttgatttcgttggtgatgtgcgggatgacctgcacgcactggccgaggtattcgccggcgcgctccttgcgcagcacttcctgatagatctgaccggtggtgacgttggccttctggctcaggaagacgtcgaggaaacgctcgtagtggccgatgtcgagatcggtttcggcaccgtcttcggtcacgtagacctcaccatgctggaacgggttcatggtgcccgggtcgacgttgatgtacggatcgagcttttgctgcagaacatggataccgcggctgcgcagcaaacgaccgagcgaagatgcggtcaggcccttgccgagagaggagacaacgccgccagtgacgaaaatatgcttggtgacgtgttcttgagaattaccatgtgttcttctaaccatggaatttcactctatcatccgtgtatgacccggcgtgttcatgacgtggccggtgtagtcgtgcgtaggcagcccatctcgttctgccttggccagcatatggtcgaatacacggcgtacttcgggtccataaggcgtaccaggacgaggattctggtccgattcgtcggaacaggaatcccgggctcaacgtcgactgatacccgggattggctggagggcttggttctattcgctcagcaagtgcgccacagcatcgagcgcgagcttgtagccgtagaaacccatgccggtgatggtgccggtggccacagggctgattacggaacgcttgcggaactcgtcgcgggcggacgggttggaaatatggacttccataagtggcaggttctcatcaatgaccatgtgcgcggcgtcggcgagagcatacgaatagtgcgtgaaggcggcgggattcatgaccaccggggttttctcgtcggcggcttggtgcatccagcgcaccatttcggcttcgtcgtcggtctgacgcacctcgacttcgaggccgaggtccttgccccattcggcgcagagcttgcgcagggtgtcgaggtcttgacgaccgtagacgtcgggctggcggacgccgagacgtccgaggttagggccattgacaacaatgactttggtcattgggactccttttgtttgtgcttctctccctccgccccttcggggcacctccctcatcagagggaggtagaaggtagatccgactccggggcacctccgttagaggggagccaagtactttttctgaggggatggcgaacggcacggcctacggccgttcaattactgctggatacgacggaatgcttcttctacggcttcggcgggcgggttgtcgaggtgtacgacgtgaccaatctcgtcgaggaccacgaaacgcagttcgttgccacgggctttcttgtcgcgatgcatcaatgcgagcacgtcgtcgaacgagctgccattccacgacgtcggcagacccagcgaagcgagcaacgaacggtgatagtcaaccagatcctgatcgatgtaaccgatcagatgggccagctcggcggcatacaccataccgacggccaccgcattgccatgcctccagcggaagtgctcgagcttttcgatggcatggcccatcgtgtgcccgtagttgaggaattcacgaagacccttctccttcaaatcggaggagacgtggtagaccttgacctttaccgtgcgctcaatgagctcggcaaccacgtcttcgagcggcgagccgaggaatgtagagccgtcgaaagcgcgcagttcagctgcgtggtcttcgaggatatgcaggatttcggggtcgcggatgaaaccggatttggcgacttcaccgagaccctcaatgaagatgtcattgggcagcgtagccagcgtcttggtgtcggccagcacaccggcaggcgtgtagaacgagccgacgaggttcttgccctgcggggtgttgatgccggttttgccaccggtggaggcatcgaccatggccagcagcgaggtcgggcagtttacatagcgcacgccgcgcatccacgtggcagccacaaaaccggccaaatcggttgcggcaccgccgccaagccccaccacggcatcggatcgggtgaaaccttcgttgccaaggcgttcccaaatgccgttggccacggtaatggtcttgccgggttcggcatccggaatcacgatgtcggaaacctcatagccgccctgacgcaacagggcgcgggcacgatcggagtgtcgctgcaccggctgggtatggataagcgcgattttggcgggcttgggtcccagcacgtcgaccagatgattcatggcaccttcgccaatgaccacatcatacggctcaattgccgatccggtaacatgcactgctcgctcagataccatatcaatcactttcttcgctgcgccctgaggcgtaagcccccgggtatggacatgaacgttggcgacctcgcggaataccgggtcacgctgcttgaacagtttcttccaacgggagttggcattgccattgagcatgggccggcctcccccgcggttcgcgcgttccatggcctccgccggatcggcgtcaaggtagaccacacgaccgccatggtcgatgtatgaggcgagggcatgctgggtggatggcgtcatgggagcgccaccgcccagcgaaaagataccgtcgaaatcctcaagcatatcggcgatgagatcggcctcgacctcgcggaatgccggctcaccgtattcatcgaagtaggcgggaatcttcatgcccacttcacgttcgatctccacatcggcatcggcgaacggcagacgcaacatatgcgccacttccttaccgacacgtgttttgccggctcccatcatgccgatgatgacggcgcgggggcatgcggtcataatcta

SEQ ID NO: 1891 - DNA, 4874 bp, Unknown
  MAG_14  MAG No. k141_72396
atacttattgttgtagacaggggacttctcatcatcgggtgaagcgtaacctttttcttcttctaccgaagcgtcagcattcgaggcttcttgggaggtcttacgacgataccgcaagatgaaggcgtcattcggtttgccgaagcgtttcagacactcctgaacgaagaatagcgtcgagaagatgttccagcagtagagatacatctgtacatccgttccgcgccaataacgcacgtattcgattgagttcttgcagccgcttctgaaacgttcctcatcggggaagatgccggtgattagcggcttatccagaccgtaccgacagatggggaaggactcgcgcttgtcgtacggcaattcgagaagcttatcttcgaatacctgacaggtcagacgtggcagtgtctgacatgagatccggcgttctcccttgttacgatttcgttcgattggttcgccgtccgcaggcttgaacttgacgtcttcgggggtatacgcacttcccatgttggcgaagaaggaagggtcggtataggaatcggtatcgggctcattcgactgaatcgagtcggccgtgatgatcatctcatatgttccatcgggttgtgtcgtcattgagcaccttgccttatagcgtctcgtgttgtcaactatcctacactgtgcggattcatggcgtgtttgtcttcataggaatcggcctgcggccgatgcggtgtttttgcggcctttggccgcggtctctccctcagtcggcttcgccgacagctccctcgtcagagggaacccgcgctgcgcgcgttttgtcggctcgctattacctgcatgatgcctacggcatcgtctcgtcagagggaacgtcctgtggccattgccggtctggtctgtaccgcatcgggaacgctccgtaccgtgtcggacggcgcgcgaggtgggggcgtgcggcgacgttgcgatgggaatcggtcagcgcgggcggcctcatgctggtgagaaaggccgtgtgcgttccggcccgaacaaaggacgatgggatgggccgagaccgatgaaccgatacggaagggactacgacatggacaatacggcgcgcagggatgcgggattgccataccactacgacgacccggccatcatggacggacagctcgcatggcagaacaaactatgggaatacaaccagaccaaacccaccgaacgggagcggcgcgccgaactgctcaaagacatgtgcgccgaagtcggcgacggcgtgcacatcgaaacgccattgcatgcgagcaacggatgccgtcgcgtacacctcggcaaagtcatctacatcaacgcgttcatgagcatggtcgacgacgcggagatatggatcggcgactacacgatgttcggaccgtccgtcaccatcgccaccgccggctacccgatcttgcccatcctgcgcgaacaccacactcttgttcctatagcccagaaatcccgcgtctctttcgttgtgacgcgggatttctgccggttgggctatcggttggattgactggtatgtttcagcgaacggctttgaccagtgcctcggtgaggtacttgccggcggccatcaccagcggcgcatagcggcgtccgggggcggcacccatgcggccggtcgggccggaaatcgagatggcggcgatgacctggccggaggcgttgcggatcggagcggaaatcgagcacacgccctcttcgcgttcgttcacggactcggaccagccgcgcttgcgtacggcggccagcttggtggcggtgaacttggcgtggcgcaatccctggtgcagacggtcggaatcctcccaagccagaagaatctgggcggcggaaccggcttccatcgacagcatggcacccaccggaatggaatcacgtaggccggaggtgcgttccacagcggcgatgcacacgcgctgatcgccttggcggcggtaaatctgcgcagactcgccagtgcgatcgagcagggtctgcaggatcgggccggcggcggtcagcagacgatcctcgcctgctgcggcggcaagttcggcgaaacgggagccgagtacgaatcggccatgctggtcgcgcagtacgaaacggtggcgttccagtgcaatagccaaacgatgtgcggtcggtcgagcgagaccggtggcggccacaagctggcccagcgtagacgggccggattccagtgcgtcaagaatctttacggttttatcaaggacgccaacgccggaatggatttccccatcgtccttggcggtggtgtcttcaaccggctcggactcggtcaagctgttgttcaatggttcttcccgggaatcagtcataataagggcgattatgccatctcacatagtgaaatggcaaattggggaagtgtctcacagggtggccatgaagttgaaagggcgttcgtggatgccgaagagacatgtctggagcggaaccgagtcatgactaggtcatgttcgagtcgggtccgagtcatattgaggccatcatttgaccgtatctcaatatccggcatgctcatggccgggcccatcgcaagcacataggctaataccacgaacaaggcgcgaacacaatacctcgcgcggaattttttggaggaatcactatgggaacgacactggccgagaaggtctgggccgatcatctggtgcgcaagggcagcgacggagctcctgatttgctgtacatcgatctgatgctcatgcatgaggtcaccagcccgcaggcgtttgagggcctgcgcttggccggccgcaagccgcgtcacgtggatcagctcattgccaccgaggatcacaacacgccgaccgttgatatcgatcgcccgaacccggatgagacgagcgcgttgcagttgacgactttggagaagaactgcaaggagttcggcgtgcgcctgcacccgctgggcgacgccgatcagggcatcgtccacgcgttcgccccgattctgggcctgacccagccgggcatgaccatcgtgtgcggtgattcgcatacgtcgacgcacggcgcgttcggcgcgctggcgttcggcatcggcacttccgaagtcgaacacgtgatggccacacagacgctgtccctcaagccgttcaagaccatggccgtcaacgtcaacggcaagctgcccgcggacgcgacggccaaggacatcattctggcgatcatcgccaagatcggcaccggcggcggccagggttacgtgatcgaataccgtggtgaggcgattcgcaacctcaccatggacgaacgtatgaccgtgtgcaacatgtccatcgaggccggtgcgcgtgccggcatgatcgcgccggacgagaccacgttcgagtacctgaagggccgtccgcacgcgccggaaggcgagctgtgggatcaggccgtggcgtactggaagacgctgaagaccgatgacgatgccgtattcgacaaggtggtggatattgacgccaccaagctcggtccatatgtgacgtggggcaccaaccccggccaaggtctgccgatcaccgcctccgtgccggagccgggcaagatcgccgacgccaccaagcgcgccgccgccgaacgtgcgattacatacatgggtttgaagccaggcatgccgatcaaggacatcgccgtggacaccgtgttcattggttcgtgcaccaacggtcgtatcgacgatttgcgccaggccgccgcgattatgaagggccaccgcaaggccgagaacatccaccgcgtgctggtggtgccggcctcctcccgcgtgcgtttgcaggcggagaaggaaggcctcgataaggtgttcaaggactttggtgccgaatggcgtaacgccggctgctcgatgtgcctgggcatgaacccggacaagctggtgccgaacgagcgctcgatttccacttcgaaccgtaacttcgagggccgccaaggcaagggctcgcgcacgcatctggcgtcgccggccgtagccgccgccaccgccatccgcggcacaatctcgtctcccgccgatctctgagtcaatacacgtgagccccctctgacgaggggctgtcagtcgaagactgactgggggagagatccccgaaaggaaaattgttatggaaaaactcaccacactgaccggcgtgggcgtgccgctgcgccgctccaacgtcgataccgaccagatcattcccgctgtgttcttgaagcgcgtgaccaagtccggcttcgatgacgccctgtcctacgcatggcgccgagacccgaacttcgtgctcaacaagccggaatacgccggtaagggccagattctggtcgccggccccgaattcggcatcggctcctcccgcgagcacgccgtgtgggcgctgcacgattacggtttccgcgtggtcatcgcgccgagcttcgccgacatcttctacggcaacaccgccaagaacggcgtgctggccgcgattatgccgcaggagtccgtcgaactcctgtggaagctactggaggaagagcctggtcgtgagatgactgtctcgctggagacccgcactgtcacttgcggcgacgtgaccctgccgttcgaggtcaacgattacgtgcgttggcgtctgatgaacggctacgacgatatcgatctgacgctgcagcacgaggacgacatcgccgcctacgaaaagatgcgcgccgaaaagttccccttcaagcccaagaccatccccgccaaacactgggccgaagaaagaatcgagtccgcccgcgagcctgaggacgcagactggacagggccgttggccgatcgcggcattatttcgccgcgatcggcctgctgaaagcccggtgggctttcagcaggccctgtgccgagctgc

SEQ ID NO: 1892 - DNA, 2566 bp, Unknown
  MAG_14  MAG No. k141_72460
acggttcgtcggctcagatcggtcttcggttcggtgacggtctcatggcctgccacccattgcaccgaccttttcaccgtgaccgtgccgcgacgtaaatccaagtcggcccattccaagccgaccgactcgcagcggcgcagtcccgcgcatacggacaccaatagccatgcttcgagcggatgcccgtagaagcctttcaacagtctgcgcacttccgacgcggacagcacttgcggctcgtagtgccgtaggcgtggcaggcgtatctcgcgtctggtcacgtcattgtcggtcaaaccgcgtttgaacgcgagcctcagcatcgcccgcagcaccgcgtaggctttgcgtgccgctcccggcctgtcgaaggagtccaaccatgattcgatgtccgccacgctgatcgagtccatgtcccttccgctccattgcgggaggatatggcagttcagggcgctttcgtagcctactttggtgcattcgcggagtttcgcgcatgagggtttccaaacggtggttgcgaatgtgtcgaaaagcattggttccttcccgattcttgttggataatcccacacattgtcgtgttgccgttgggtgggcgtgtgtgtgggttttctcattgttccatatccctgttttttaggaggttatgttgactcagattaatttcgatttcggccatccaagcgccgatggcgtcgcggttttggccggcgaactggtgcatgtggtgccgaccggccggttcaaggtcggcaagcgtatcgtcgtgcgtgattctttcgacgtgcgactgtcggaaaccggcactgccaccgttgatgttacgccgactgacaacacgttcgcctacgaggtgacggtgggcgaatcgccggatgtctggcgtttcgtccgatgcgtgcaggtaccgaattcgagcacgcccgtggcgttcgccgatctggtcgatgtggacgcgagtactctggccccggcacccaattccggtacggcgctgacgtatctgcttgcttcttccctgtccgaggcgcaggccatgtcggcggcgaatccaggtcagatggtgttttatccggagggcatggccaagactgtcgcctctcagatcctggaggatttgaccgatgcgcgtgccgtggtggaggctcagagcgccgtgtccgctcaggccgcgaatgccgccagggccgcgtccgacgccgctcaggccgcaaacgcgcaggtgacggcggtggccgacagcatcaccgaatcgaaggcggtcgtggaatcacatgcgaatgatgctttgacggcgatcgacgaggcggtgaagagcgtgaaggacaaggcgtccgacgtgtctggcgaggataggacggataccatgccgaccgattccaccgattccgcctcctctcaggaggcctgacaaatgtctgtactgctcaacggcacgagggtcggcctcccgtatatgactaataatggcgtgcctgtgccgatgaacgcgctgtacaacggcgtgcaggtatggccgccagccgccgaaacactcgtggacgtgtggctcaaaccggtcgatttcacagctcaggcactctatgccgaccacccggaggtcaaggtggccgcccagaaggtcttcgccgacggtcacatcgaagacgcgaatctgacgctttccacggcggacaccaccgtggcgaacatcaatgccggcacggtgagcttcgtttccgacaccacgaatttcctcaccgtgctcaaacaggatgcgttcaacgcctgtcacgtgtcgattgccgaaggcggcaaggcgttgggtgccaagcagattctcgtgcagcctgaccagccttcgacggctccggtcggcagcctgtggtgccgcaccgaaaaactccataacgggttgaaatactatacgggcgctgtcggcaatgatgcgaacgtgatgtgcttcctcatcgaccgcatccgcgaggtatggcgcaaggaatgggacggttggaagcttttgacgggaaaggaattgggatgagacggacgaatctgtgtgcaaaaccagctgagacacttgatgcatcggccggcgatccggacaattggaaggacttcaaaaacgggaccggaatgtctttgcagccgggacgatacgtcgcctcatgcaatattacgaagcgcggaagcaaacaagcggtgatcccattctgggatgagactcatcacgtgaagttgggtaccgtctggaatggcgtcatcggcgtcaacgtgatgcagttcgacgttcagaccgcttccgacaaatgtaatttttccgcctgcggctgcaaggccacggacttcatcgtcgaacgcgccgacacgcacgctctcgcttcgggggggggcttccgagcttcttcaccgcaggcaccgcgccgtactgagcttgagggtggaggcggacatcaactccgggtatctgtacctcggcgggttcctcggccggcttggcgcggggcgcggaacgttccagacggtctattttcgtaataaggagcatgagcgtgcagaggattaatcttttccccaa

SEQ ID NO: 1893 - DNA, 16238 bp, Unknown
  MAG_14  MAG No. k141_72757
cgctgatagccctgagtggccttacgctcagcctcttccttggccttggccaatgcttcttcttccagagagggcaggccggcctttgcgcggcgagcattctcattacgatgatcgcgcttctccttgtccgccgcagccggagagccaggggtcgggaatgcgtacacctgccacaatgtgcggcagaggttgcacacgttgttggtcagccagtagaccagcacggcgaacggcatggtggcaccagagaagatgtacatcaccgggaagagccacagcatagccttctgcatggtctcggcctgtttgttcatcgatgcggcgggcatgttgcgcttcatgttgaagtactgcataaaccacaggcagaagcacatcaggaacacgaaggtaccgatgaccaccttgcctgcagtagatgcgcgggtgaagttatcggtcacactgacaatgccgaacacatcggtttgggtgaattgcttggcggttgctacgtcgaacgcgcccaacgcaccgcgtttaccgttggcaatgtatggaatggccgacagcgtatagaacatggacatgaacaccgggccctgaatgagcataggcaagcaggagccagccggattggcgtcattgtcttgatacagtttcatggtttcacggctcatggcctccttggaagcctgatccgtcttgcctttgtacttgttctggatgcgcttcatcttcggcgccaacgcctgcatcttgcgcatcgacttcatctgcttgcagaacagcgggaagatacacgcctgcaccaccagcaccaggatgataatggcaagcacccatgagacaccaatcgggctcatgcccagcatcgcgaagaagtcatgcacgatcttcatgatccaggtctgcaaccactcaacgggagtcaggattttatatagaaatccccaaaacccgctatcaagcagaaattcatttgagttcatcgttgggcctctctttgggttgtggccaatggtgtcagtcggggctcttcatgagccttcgaccacgaaaatctgtaaaaaatggaataccgttgtggaacatcgtcgattcccccacgactccacggccggcaacgcagtaatctcagcatggcgagcactccccctttgaacgcgccataccgttccaatgcctcaatggcataattcgagcacgttggataatacttacaacaaggcggtgtgtttgccgagatgtgctgttgataccagcgcaccccaccaatcatcaccgccttgaaagaagctgtcatgcctcagccaccttatgcgccactgtggcaaaagccttcgcgatctgctgatctagcgaagcgaacgatgcggtcgcggcactgggcttggcgcgcaaaacgatatcgcaatgcgcgggcagcagatcctcatgggctctggccaatacacgaaacctacgcttcaccgtattacgggtgaccgcatgtcctaccgatttggagacagctaatcccaaacggcgatgcaccgtccggtcgtcatcatcatgatggtcgtcgggcaccaaatagtgcacgacgatatccttgccacctgctttgcgccggcgtttcagcacggtgacgaaatcacgatggctttgaagccgctccacctcgactatgcctgtggcactgatcggaatgatcaggcggagagggacttgcggcccttggcacggcgacggttgatcaccgcacggccagaacgggtgcgcatgcgcaggcggaagccgtgcttcatgtggcgacgacggttgttcggctggaacgtcctcttcataatccattgctcctaggtctattcggcaacgcttcgcgctgccctcacgtgagtcaagctataccaaagtactctcacccctaccctcaagtcaaaacggacggagtattttcacatttcgacacgttgcgagacacgcctcaaatctcttataatcggcggaataccaaccattcacggccaaaagttatccacaaattacatgtctgttattcacaatccagttatttcaacacgcgacacggtggataacttgtctaaaccagagtaaatattatctgttgtacagatttcgccacaccgatagaaggggccaccatggttaacgcttccggcgaccccgtaatcgaggccgcccacatctggtcagacacgctgacggtgctcaaacacagcgcttcgctcagcccacgagaaaaaggctggttggaaggcgttgttcctgaaggcgtcttcggttcgaccatcgtgctgtgtgtggacaacaacgatacgcttcaagccattcagggtgatttgaacgattccctgcttcaggcattgcgtacggtaaccggcgaaaatatgtttcccgcgttcaaggtcgtgccgaaaaccgagcccgaaccgctttcggcggcaaagccggcgcagccatatccttcggaaatttctccgaccgtcgccgagttcggtaaagaatcctatggtgcaaagccggtagccgcaccgcgggaaccgatgcccgccaccgagtcgcagttcccggtcggtcagcagaagatgaatcgcgatcccgagactcatctcaataagaacttcacgtttgattccttcgtgcccggcgattccaaccgttttgcccgtacggtcgcactggccgtggccgaaggttccggtcaggatttcaacccgttgtgtatctatggcggatcgggcctgggcaaaacccacttgctgaacgccatcggcaactatgcactggtcaaggatcccgggctaaaggttcgatacgtcacgtctgaggaattcacgaacgaattcatcgacgcgctgcaaaacccgaaccaaagccagggtcagattgctgaattcaaccgtcgataccgacaggttgatgtgttgcttattgacgatatccagttcctcggcggcaaggaagccaccttggatcagttcttccatacgttcaatgcactgcatcaggcaaataagcgtattgtcattgcttccgatgtggcacccaagaatttgaagggtttcgaggctcggctcatctcgcgcttcgaatccggcctgaccgtagacgtcaagccgccggatctggagacccgaatcgcaattcttcgtatgatcgcctcgatgaacggttcgaaaatccccagcgatgtgttggacctcatcgccgaacgcttcaccgagaacattcgcgaacttgagggcgcgcttacccgtgttacggccgtggcctcgctgagtaatcagccggtgacccgcgccttggccgagcagacgttgcaggacttcttcaccaccgatgtggaaatcaagcccacggacatcatcagtcaggtggcgaagtacttccacctgacgtttgaggatcttgtcggtaaatcacgaaccaaaaacgtggctgttcctcgtcagatcgccatgtatctggctcgcgaaatgaccagtatgagcctgatggatattggccaggtctttggcgggcgcgatcacaccacagtaatgcatgcctgcactcgaatcagtgaccgaatgcagcaaaaacaggagatctataactacgttatggagctcacggttcgcctcaagcaaagcaacaccaactgacacaacgcttctgagagacgaaaaacggcacttttcggaaagtcagtccgaaaagtgccgtttttggttgctcaggcggattccggtggatacgtcgaggcaacggattcgagacatcagattcctcatggctcccctttgtgaggagagctgtcgtcgcagacgactgaggggagtatcgaaggggaacacgcaaaaaacccatgaaacgagagaatcgattctgaggaccgattttgcgggtttgggcgagcgagacgaaaaaagtgccgaaaacggtctccagaatcgattctcctcgacgaaaaacagccttcaacacgccgtgcgaaagtacgaaaaccaaaaaagttatccacacagttgtgcacagatgtgggtaaactcggcggataactcgtggattacccactgttttgttgtggaaaactcgtgcataaccgcgacctcgatgtggaaaactcaaattcgacgaactggctgtggaaaactcgcccacttatccacaagccatgcagaatttgtccacaattttcagggacttatgaaccgttgcatttgtagggctcacccctacttatccacactatccaccggccttattacgacgattacttactcagttacgtgaaaagcatcatcgccacagtaacagccagtcacccatcgtacgtaagttcgccacctaacggctagaatatttctcagccaatccgacgaagggaacaatcacacatgaaagtcgaaatcgatactgcagccctggccgacgccgtagcctggacctcccgagtcatcgacgcacgtccctccaacccgattctcgctggtgtcaagctggaagccattgacggaacgctgcaattctccgccttcaactacgagatttccgctcgtcaccacatcgaagccggcgttgacgaagccggttccgtactggttcagggcaagctgctggccgatatcaccaaatcgctgcgttcggagaaaacgtacctggtcaccgacggctccacgctgaccatcacgtccggcaagtcgaagttcaccttgcagctcatgcccgacaccgagtacccggatctgcctgtggtaccggccatgctcggccaagtcgatgccccgactttcgttcaggcagtgaaccaggcatgcgttgccgtctcccgcgaagaaaaccgcccggtactgaccggcgttcgcatgcaattccaaggcgacaaggtcgtcatgacctccaccgatcgcttccgtttggcccgcgccaccttcacttggactccgcagaacccggacgtcgacaccaccacgctggttcgcggctccctgctcaaggatgtggcccgtgctcttgacgagcaccagaacatccgccttgatttcgatgccgatagcccgacgctgctcggcttcgaaaacgccggccgcgtctccacctcccagctcatcgacggtgaattcccggcggtcgaccgcctgttcgccgacgaatacccgattcaggccgtagtcaacaagcaggatctgctcgacgccatcagccgtgtggctttggtcgccgaacgcaatgctccgattcgcatgaccttcaccggtcaggaagtggcgctgtccgccggatcggtcgacgaggcccaggccaacgaaacactggacatcgacatggatggcgacgacatcaccgtggcattcaacccgtcctacctgaaggagggtctgtccgccgtgaccgaaccattcgtgcgcatcaagatgacgaccccggtcaagccggtcgagttcaacggccagcaggaagctgattccgacgagtccatggactaccgatacctgctcgtgccgatgcgcttcaacaactgagatccctgaatttccaacgattcgctaatgcacatctcccgtctcgcactcgaccactaccgctcatggagtcaagtagtggtcgatttcgtaccaggcgtgaatatcctgttcggcaagaatggcttgggcaaaaccaatctggtggaagccgtcgaagtgctgtccaccggatcgagtcatcgcacgtccagcacgttgccgctgatcgaacgcgggcagaccacggccaccatccgcgcgaacgtcgctgatgatgccggtcaaaccactacgtatgaagcgtcgattcatgcgcgtggtgccaaccgagcccgcatcaactcggggtcgtcgctgtatatgcgcgatatcattggcaagattcccagcgtttccttcactcccgaagatcagcgattggtgtccggcgatccgggagcacgccgcgtcatgatgaatcaggctgcggctctgctcgagcccggatacatgcagacgttgcaacagttcacgcgcatcgccaaacagcgtgccacattgttgaagcaattgaatgccaatgccaacaatggacagccgatggatgcggttctgagcggtttggaaatctggaccggccagttcatcgaagccggtgtggcgttgacccgtatgcgcgctcatgtgatcggtctgcttgccgagccatttgccgcgatttacgccgacttggccggtgccggcgagcaggtgacgctcacatatgcgccttcattcgacgaagtgctgatgttcgacgatccacatccgcagatcagcgagcattttcaacgcatctaccccggtgaaatggctcgcggcgtgaaccttatcggtccgcagcgcgatgacatgaaccttgagttggccggtattcccgcccgcgagttcgcttcgaacggcgagatgtggacgatggcgttggccttgaaaatggcattgtttgaaatcgtgcgtgaccggttgggattgcagccgattgtgattctcgatgatgtgttcgcccagcttgacgacagccggcgcacgcagattcttgatttcgccagaaaacaggatcaggtgctgattaccgtggccgctgaaggcgatgtgcccgactatgaatcggcccatcgtatcgacgtggccacactggccgaacccgcttccgtaatactgccaactctgggcaatttgtccgattcgcgggaaaacgagagtttgggtaagtatgacggaaaacccgcggtggacagcgcgtccgtagaacggaaagtgtcatgaacccgccgatcgcccgccaactcaacctggacgagaccaaactgccggccgaaatattcgagcggctctcccgtcgcggggcgaccttgaaagactacagacgccgccgtgaagaggccatcgaaaacttcggcaaaccggggcgcgatccggctgaactgggcagcgtgatgaccaccatcgccggcaatggcgtctgggcggcgaatatgaaacttgcgcaattgcgcaaccattgggaccaagtggtggggcaggccatcgccagccattcggcagtcgccgatttcacggacggcgtactgaccatccgtgccgaatccacggtctgggccacgcagctgacctaccttatcccccaacttaccgataccatccgtcgcaatctcaaaggattgaccatcgccgagattcgcgtgaccggaccggccgccggatacacgcgcaaatgggctcggcggcggtagccaagataccaaacaaattcgcagaagcctcgctatggcgctcgtcgggttagacgagtaaaatcacatgcagtatggtcaaatggccagaagagccctttacgggcctcgtaagccatatcgcctccgtgaatgaccttcatgacggaggttgaccctgtagtcacggaaggaagcctgttggcagacgaaaccagcaaagaggagcagctgaaggcggctgcggaacgcatcaacaatgcggaattgaccgaaggcgaacttgacgaatccatggcccccgagcattatgaggcctccgatctgagggtgctcgaaggactcgaggccgtgcgtatccgccccggtatgtacatcggttccaccggcccgcgcggtttgcaccacctggtctatgagatcgtcgataactcggtcgacgaggcgctggccggatacgccagccatatcgaggtcaccattctgccggacaacggcatccgcgtggtggacgatggtcgaggcatcccggtcgatgaggtgcccggcgagggcgtctccggtgtggagaccgtgatgaccaagctgcacgccggcggcaagttcggcggcggcggttatgcagtgtccggcggtctgcacggcgtgggtatctccgtggtcaacgcactctccacccgcgtggacatcgaagtgcgccgtcagggcttccactggacccagacgtacatcgaccagcaccccaccgcgcccttgaagcagggcgagccgatgaccgaaggcgagtccaccggtacgtccgtgactttctgggccgacccgaagatcttcgagaccaccatctacgacttcgagacgctgcgttcccgtttccagcagatggccttcctgaacaagggcctcaagatcagcctgaccgacgagcgtgagaatgaccaggccggcgacgaggtggccggcgacgccgcggacgagcccggcgcaaagcaccagaccgtcacctaccagtacctcaacggcatcaaggactatgtcgactacctggtcaaggtgcgcaaggccacgccggtggaagaggacgtcatcagcttcgaggccgaagacctgaagctcggcatctccgccgaactcgccatgcagtggaccaccgcctactccgaggccgtgcacaccttcgcgaacacgatttccaccaccgagggcggcactcacgaggagggcttccgcgccgcgctgacctcgctggtcaaccgttacgcgcgtgacaagggcatcctcaaggacaaggacgagaacctctccggcgacgacgtgcgtgaaggcctgaccgccgtgatctccgtcaagctcaccaacccgcagttcgaaggccagaccaagaccaagctcggcaactccgaggccaagaccttcgtgcagcgcgtgatgaccgacaagctcggcgactggttcgacgcccacccgaacgaggccaagaacatcatccagaaggccatcgaggcctcccgcgcccgtctggccgccaagaaagcccgcgagaacacccgccgcaagtccatcttcgagtccgccggcatgcccgacaagctcaaggactgccagtcctccaacccggaagagtgcgagctgttcatcgtggagggcgattccgcaggcggttccgccatccagggccgcaacccgatcacgcaggccatcctgccgctgcgaggcaagatcctcaacaccgaacgtgccagcttggaccgcatgatgaagtccgacaccatcgaatcgctgatcaccgcggtcggcggcggctatggcgaggacttcgacatctccaaggtccgctaccacaaggtcatcatcatggccgatgccgatgtggacggtgcgcatatcgccaccctgaacctgacgctgttcttccgctacatgcgcccgatgatcaccgccggctacgtgtacgtggccatgccgccgctgtaccgcctgaagtggaccaagggcccgcacgacttcgtgtacaccgacgccgagcgcgaccgcgtgctcgccgaaggcaaggccaacggacgccagctgcccaagggcgaaggcatccagcgctacaagggtttgggcgagatgagctaccaggagctgtgggagaccaccatggaccccgagcaccgcattctgaagcaggtgcacatcgaggacgccgccgcggctgacgagaccttctcgatgctgatgggcgatgaggtcgaaccccgccgcctcttcatccagcgcaacgccaagaacgtgcgttggatcgatgcgtaacggaatcctccaacctccctcgtcagagggaggtacacaacggacttagacaactaaaggaacaacagtggcagatgaaaacaacaccggcgacgagcagttcacgccggacggctcgatggagccgttgagcccgcaggaggcggacaccaccgactacggcctgatggacaccggcgaacgcatccagcgcaaggacctgcagcaggagatgcgcgagtcctatctggcgtatgccctctccgtgatcgtcgagcgtgccctgccggacgtgcgcgacggcatgaagcccgtgcatcgccgtgtgatctacgcgatgtacgacggcggctaccgccccgatcgcggctacaacaagtgctcccgcgtggtcggcgacgtgatgggtaagtaccacccgcacggcgatttcgccatctacgacaccttggtgcgtatggcccagtcctggtcgatgcgcaacatgctcgtcgacggccagggcaacttcggctcccccggcgatgacccggccgccgccatgcgttacaccgaatgccgcatggccccgctggccatggaaatggtgcgcgacatcgacaaggacaccgtcgacttcgtgcccaactacgacggcaagacccaggagccgaccgtgctgccggcccgcttcccgaacctgctcgtcaacggttccgccggcatcgccgtcggcatggccaccaacatcccgccgcataacatgcgcgaggtggcggacggcgtccactgggcgctcgaccacccggacgccagccgcgaggaactgctggaaaacctgatccgcatcatcaagggaccggacttccccaccggcgccaccatcctcggccacaagggcatcgaacaggcctaccgcaccggccgtggcctgatcaccatgcgtgccgtggtcaacactgaggagatcaacggccgtatgtgcctggtggtcaccgaactgccctaccaggtcaacccggaccgcctcgtcgtctccattcgtgaggccgtgcgcgacggcaagatccagggcattgccgacatgcgcgacgagacctccggccgcaccggccagcgcctcgtgctggtcttgaagcgcgacgccgtgccgaaggtggtcctgaacaacctgtacaagcactcccagctgcagcagaccttcggcgccaacatgctggcgctggtcgacggcgtgccgcgcacgctgagcctggacgccttcatccgccactgggtgaaccaccagctcgacgtaatcgcccgccgcaccgcgtacctgaagcgcgaggccgaagagcgcgaccacatcctgcagggctatctcaaggccctcgacatgctggacgaggtcatcgccctcatccgcgcctccgaagacaccgacaccgcccgtacgggccttatggggctgctggacatcgaccaggtgcaggcggacgccattctggccatgcagctgcgcacgctgacccgcatgaaccgcgacaagatcgtggccgagcatgaggaattgcagcgcaagatcgccgactacatcgacatcctcgccaagccggaacgccagcgcaagatcatcggcgatgagctcgacgagatcgtggccaagtacggcgacgaccgccgcaccaagatcctgccgttctccggcgagatgaacgtcgaggacctgatcgccgaagagaacgtggtggtcaccgtgacccactccggcttcatcaagcgcaccaaggccgacgaataccgcgcccagcaccgcggcggcaagggtatcaagggcaccaagctgcgcgaggacgacgtggtggatcacttcttcctgacctccacgcacaattggctgctgttcttcacgaacaagggccgcgtctaccgcatcaaggcctacgagctgcccgagggttcgcgcgactccaagggccagcacgtggccaacctgctgcagttcgcgcccgacgagaccatccagaccgtgctgtccatcccgaactacgaggtggccaagtacctggtgctcgccacccgttccggcaaggtcaagaagaccccgctggccgagtacgattccccgcgccagggcggcctgatcgccgtgcgcctcatggccgacgagaatggcgagaacgccgacgagctcatcggtgccgcgctgtgcaacgccgaggatgacatcatcctggtctccaagctcggcatgagcctcaagttccaggccgacgacgagcagctgcgtccgatgggccgccagaccgccggcgtgcagggcatgaagttccgtaacgacgacagcctgctggccatggatgtggtccctggcgactccgacaaggacctgttcgtggtgaccaacgagggcttcgccaagcgcaccgccatcagcgaataccgtctgcagggccgtaacggcttgggcatcaaggccgtgcaactggtcgagggccgtggtgccctggtcggcgcgctcgtggtgtccgaagacgatcaggtcatggccatcatgaagtccggcaaggtgattcgttccaacgtggacgaggtcaagcgcaccgggcgcaacacccagggtgttaccttcgccaagcctgacaagggcgacacgattctctccatcgcccgtaacgaggagaaggacgagcccgaggacagtggcgatgccgcggcgaacggcaccgccgagaccgcacaatccggcgagaatgtgaacaacgcggacgaggcgtgagcagcgtcctgaaaagctggtagcctcgcatacagcagaggctaccgccaagcctgttaaggagaaacgatgagcgagaatctcgaagacaacgagccccggatcataccgccggcagtcggcaatacgcagaacgatcatgtcgagccgctgatcggtactgagcacgctccccgcgtggcacgctccgtgtccagcgatccggaagaatccacgttgccttcttcaggtgccgccactcccgtgcgtccggcacctcgccgtagcgcccccagggctcgccgcatgagcttgtcgctgacccgcgtggatgcttggtccgtggccaaggtgacgttcatgctgtccatcgccgtggcgattattcaggtcgttgcctccgcgatcgtatgggtgctgcttgatgtggtcggtgtattcagccagattacgcagattgtgtcttccaccggtcttgatgcaggcggtttcgatctcaagaacgtgttgtcccttaccaccgtggtctccggcgtcaccatcttctcgattgttgaagtggtgatcttcaccctgctggccaccattgcggcactgatctacaacgtggtcagctcgctggtcggcggcgtgcacgtcacgctcggcgacgactgatatagctatactggcagaactcccctcagtgaaccgcaccccggttgttggactgaagtaattcagattcgatgatcggaggtgcggtttcttatgtgtggggttcgtaggcgtcgttgctgggccgagacttgggactccggcgacgctgggggtggcaggcgtcggtgttgggacaggttttgtatctctgacgacgctgtggagggcttaccgtcgtcagcggtacagatcttggagttctgccgatgctgagggtgtgttctgtgtcgtttgcgtccaattcttggccctctgccgacgctgggcacagcaagcgtcgttgctgggccaagttttggactgccgccgacgcagagaatgcacacagcggtgttggtctgccagcgtgtggcagcttggcgccgttgaggaaggtctatgtggtgtggttccgccaaaggactggcaggttggcgctactgaggggactttatgggctcttccggttttggcgtgtaggggccgtgcggtttcattcactttttcaatcacacaccgaatcaaaccgcacggcccctacgcaccaaaatgcgaagagccggtttcgctaactagtgcctatatgcctgcaatcaggctgatttgtgctgtcaggctggctggcgtcagcggttgatctgccgatgttgctgctcgtcagtctggactgttgggctttcgttttgacagcggaaggaagatcctcctcgcggtagggcaacaattatcagtatcataattaaggtaatcgtgattacattaaccatgatactcttattattgggcggtaggcggatcggagggctgcaatgtttgtcgcacgagagcacgagttacaagtgctggaaaagctgtttaccagcgattcgttcgaaatggtggtgctgtacggtagacggcgtgtagggaaaacggcgttgattgacgaatttgtcaaagataaacgcgtgctgtacttcacggccatacagcaaagcgccaagatgaatcttgaagatttctcaagagcggcattgtcgttctttggtatgccggattccaccccgtcgtttggcgggtggtctgatgcgttatcgtttgttgctgaacgtgctgcacagactgacgaacgtatggtgttcgtattcgatgagttcccttatgcagctgccgccgagccagcattaccctccatgttgcagatagcaattgaccatggattcctcgccacaaaagtgacgatgattctatccggtagtaacgagggattcatggaaaacgacgtattggggcgtaaaagcccgctatacgggcgtcgtacagcacagattcgactcctgccattcgactatgcggatgcggcaaaatttctaacgaacacatctccgcaagaactggtccaatactatgcgactttcggcggtacgccatattatctggcccgtatacaggaagccgatggctttgaatccaatgtgctgcgcttgatgttcgacaacttgggcgtactgcgtgaggaacctatgatgctgttgcgtcaggagcttcgtgaaccggcatcgtattattcgatattgcaatctattgcgggtggtaattcctcgccaaagcttatcgctgaacatgcgggtgtcggatctgattcgattggagcatatctgaaaacgctggtcgatttgcgcttaattgagcgaaaagtgccgtttggtgaagatccgagtaaatcgcgcaagggaatgtatgtggtgagcgatcccttctttgcatattggttccgctttgtggggcgcaacatgagcattttggatggtaatatcagcgaggaggttacgagcagactcgcttttggaccagcgtttgatacctatgttggtcaacaatttgagacgatttgcctgcaatggcttattcgaaacaacgctatgggcaacctcccctttgttgccactcagttcggcaaatggtggggcaatgatccgattgctcacgagcaaaccgatatcgatgtgattgctgcggattcgctcgataaaacgattctgttcggtgaatgcaaatggcgtaattcattcaacgaaacggaggctattgaaaagctccatcagcgtgctggcttagtccgcggctatcaggcaggtaatgcgtggcttatgctgttcaccaagaatccggtgagtgagtccacgcgaacccgctacatggatgatgaacgaatggtgttcgtttccgcggaagagttatacactgcgtgatgcattactgggtgattgtgacgcggtatctagagtcctgccgacagtcacgtggcaattacgccgaatcacgcaccaccaaatcggtgttcaggtgcatcacgcgcggtgaagagactccgttgatggctttgatgaccgcgtcggccatggtccagcgcgctgatccatgtgctgatcgacggtggtgagttccggggttatggaggtggaagctaagttgttatcgggcttacgtatttggggatagcacttgttgctcgttgtacatatagcaatgcccttgcctcctcacgggaagcaagggcattacgctactgcttagtactgctcagaggcaagcgtcacagcacgccctgggcaaccatggcgttggcgaccttgacgaagccggcggcgttggcgccgagcatcaggtcaccctcgtgaccgtattccttggcggcggccagggagttggcgacgatctcttccatgatggacttgagcttggcgtcgacctcttcgaaggtccaagacagacggtagctgttctggctcatctccaggccggagacggccacgccaccggcgttggcagccttggccgggccgtacagcacgccgttcttctggtagacctcgatggcctccggggtggacggcatgttcgcaccctcgacgaccacggtcacgccgttgtccacgagcttctgtgcggattcgccatcaacctcgttctgggtggcgcacggcagagcgatgtcgcccttgacggtccacacgcccttgctgccctcgtggtactcggagcccggaacgcgctcggcatattccttgatgcggccgcgctcgacttccttgatctgcttgacgacctcgacgttgatgccgttcgggtcgtagatgtagccgttggagtcggagacggtgacgaccttggcgcccagctgctcagccttctgagcggcgtaggtggccacgttgccggagccggagatcacgacggtcttgccctcgaaggagtcgttgcgcagcacgcgcagggcttcctgggtgtagtagcacacgccgtaaccggtggcctcggtgcgggccagggagccgccgaattccagacccttaccggtcaggacgccggagtactcgtcgcgga

SEQ ID NO: 1894 - DNA, 5996 bp, Unknown
  MAG_14  MAG No. k141_73284
ccggtgtagaacagaatacgctcggtagtggtggtcttgccggcatcgatgtgggccatgatgccgatattgcggacgtcgtggaggtccgaaatctcttcagccatctttttccttagttttactcagggcgagtgattaccagcggtaatgagcgaaggccttgttagcctctgccatcttatgagtatcctcgcggcgcttgacagaagcaccgaggccgttggaggcatccaggatctcgttggcgagacgctcggccatggtcttctcacgacgggcgcgggagaagtcggtcagccagcgcagcgacagggtgttggcgcggttcggcttgacctcgaccggcacctggtaggtggcgccaccgacacggcgggagcgaacctcgagggacggacggatgttgtccagggcgcgcttgagcacagccaccggttcctggtcggacttctccttgaccatatcgagcgcggagtagacgatgtcttcggcgatcgacttcttgccgtcaagcagaatcttgttgatgagctgcgccaccacggtggaaccgtagatcggatcgggcagcacgacgtgcttcttggaaggtcccttacgtgacatatctcttacttcgccttctttgctccatacagggaacgaccctgcttacggtccttgacaccctgggtatcgagcgcgccgcgcacgatgtggtaacgcacacccgggagatccttcacacggccgccgcgcacgagcacgatggagtgctcctgcaggttgtggccctcgcccggaatgtaggcggtgacttcgatgcccgaggacaggcgcacacgagcgaccttacgcagagccgagttcggcttcttcggggtggtggtgtagacacgggtgcacacgccgcgacgcagcgggctgcccttcagggccaaagtcttggacttcttcggctttgcctgacgtcccttacggacgagctgttcaatagtaggcaacttgaattctccgattcagtggtttctcttgcttttgtgtgaccgccgcactgcgcccacacttttcagcacactcgcttggcatccgcctgttggcgacacccgacgaatcggaaaagatagcccagtccaccggcccgatggccttcgcccctcccgtcggcgcattgctgcgtgcgatcagcggtttgaaggatatcccagcatgctcgcctgttacataaggcgtgctgctggcacacacgaatatctatactacgattccgccggacaacgacgcgccgggcctcgactcactagcttgggacaatccgcgccctgtacttttcctctccttctggcgcaacaatcccgggaatgcgtcgcacaacacacgcacacacgccctcccaacgcaatattcccgggaatgcgtcgcaaaaaagcgaacgccacacagcaggtgcccccgcggagactatgtcacacgggggcaccgccaaggaggttacattatgtttcttttcaccacatgccgcttctgtgttatctgtttccagcacatcctcgtgctcttccatatccgatgggaacctctagcgacccggcctctttgccgtatcaccttgccgctttctgcattactaattatagcaaaaccgccctcgcgaaacgcccgatacatcaatcgggagtaagcgggagcggctatgttatgcgaggtaggaaaggtgagtgaccgactgactggagtcgtgccttacccgacctttctcaccatctcaggatttcaggcagcgaccttgtcggccttgtcggcgtcgaacgggtgggccacggaaacggtgctcttggcggagcccttctcgccgttgtcagaatcccaatgaatctcgtgccggtcgtcatggttgcgccaccagctggacaggatggagccggagatgttgtgccacacggagaagaacgtggacggcacggcggcgagcgggttggacgcgaaggaagtcagggccagcgtggcgcccagggcggagtcctgcatgccgacctcgaacgtgatggccttctgctgcgcgtagcggaagcccttcgggtagatcctgtacatcagcttcgagaagccgaagcccagcgagtagccgcacagattatgcaggatgaccaccgggatggccatcagggagctggccacgaacagcttcggaccgttggcggcgacgaccacaccgatgatcagcaggatggccacctgagaaacgataggcagggcgaccgtgaccttctcgatcttcttgccgaagatcatgtggcagatcacaccgagggcaatcgggaagagcaccaccttgacggcgttaaggaacagggattcgaccggcacgctcacatactgggaggccagcagctgcatcagcagcggaatcatgaacggggcgcacagggtggagaggatgccgatggagacatcgagggccacgtcaccacgggacaggtagctcatcacgttggaggaggtgccggacgggcagcagccgacgagaatcacgcccacggccagcgggccggacaggtggaagatcgcgcacagggccacggcgacgagcggcatgatgacgaagtgggccaccgtgccgacgatgaccatcatcggctgggtgaggatgcgcttgaaatcgtccagcgtcagggtcagccccatgccgaacagcacgatgcccagcatgtagccggtgtacgccttgccccacaggctggcggccggcacgaagtagttgaagacggcccagacgatgacgatgaccgtaaaccacttggtcagccaatctgcaaaggctttaaccttttccatggtgtttctcttcccttgttcggtgtaggtaacatcgcatgaaactaggcgggtcgcggttgatatgaaacataatgctcacattgtgaacgctcacgtaatcatctctgcaatccccagccgcaccatcacgccgttgcgtgccctgacttttcatcaatcgccacacaagacccactcgtccacatcccaccatttgagacagcccacagcctggccccaagaatgaaaccaaccgcttgattccatcgcgacacaccgatgagcacacatccgcaaagttgtgtatagtattcacctgttgtgcgaattcagcttgctgaatacgacactatggtggccatagctcagttggtagagcatctgattgtggttcagaaggtcgcgcgttcgagccgcgttggccaccccagtaaaacccttccgttcgcggaagggttttgtttttctccatgaattccccgctcctgccgggaaccgccacgttgtacactcgggcatatccaattcatctaacacaaggacaaaaggtccgtcatgctgtcttttgagaacgattactcccgcgccgcccatcccgcagtgcttgaagccgtggctgaagccaacaaccatctgtattcgggctacgggtccgacgaactgagcgatcaggccaaggccaagatccgcgaggcctgcggccagccggacgcggatgtgtggttcctcgtcggcggcacgcagaccaaccaggtcgtcatcgacaccatcaccccggcgtatgcaggcgtggtcgcggtcgcctccggccatccgaacgtgcacgaggccggcgccatcgagttctccggccacaaggtgcttacgattccccaacacaacggcaaaatggatccaaccgaactggacgagttctgcaagaccttctatgcggacggcaactacgaacacatggtgttccctggatccgtgtacgtctcgcaaagcaccgaatatggcaccatctactccaaagccgaactgcaggctatcgccgatgtggcgcataagtacgatatgccgctgttcgtggatggcgcgcgactcggctacgcgctgaccgccaccggttccgacatgacgctcacggatctggcgaccatcgccgacgtgttctacatcggcggtaccaaggtgggtgcgctgttcggcgaggccgtggtgtttaccaagcacaacacgccgaagcacttcctgacccgcatcaagcagcacggcgccttgctggccaagggcttcgtgctgggcgcgcagtttgacgccttattcaccgacaatctgtacttcaagatcgcccgcaacgccaatgaggcggccgatcgtattcgcgaggccctgcgcgccaagggctacatgctcactttcgaagcgcccaccaaccagattttcgtgacgatggatcagccgaccatcgaccgtctggagcgcgaggtcaagctcggcttcaccgagaaggccgacgacacgcataccgtgatgcgcatctgcaccagctgggccaccacgcatgaagaagtcgatcagcttattgagttgttgtaaaacccttcgctaatccctccctccgtcatcgcttcgcgatgccacctccctcatcagagggaggttttttcgtagctcccgccgatgagggagctggccgccgcaggcggactgagggaaaacctctccgcaaacgagaaggctcctactcccctatcgccttgcgttccatatccacgaacttgtggaccgaggcttccacggaataatgcgccttggtgtattcggcgtatttctcgccccattcggcgcgctcggcctgatgtgcgatccaccaatcgatgcgtcgggccagcagggccgcgtcccgcacggggaacaacgactcgtcgatcagcgcgaactggccggccgccgacaattcggacgcggcgatcaccggcaccaatccgcacgccatcgcctcgatcacgctcaccgattcgatgtcggcaatcgaacaatgcacgaacaaatcgcccgaacgcaacaaatcgggcatatcggcgtgcttgtggaatccgatatcggccttgcgcgccagcaaacgtccggcgcggaacttgagatactgcttgagcggcccagtaccggcgatcaccagctgaatatcgccggcgtgccgggacatcgacaccgccttgatcagcgtaatctgatctttctcgctggccagtcggccggaagcgatgacgcggaacggcacgggagccgaggcatccggatcggccggcttcttcggcgaatacaccggtgaataaccattggaaatcacgtgcaacttggctttatacccgtgcgcgcgcaacaggctcgcggtcatttcggtgggcacatggatgtggtcaatgtgcttgtacagccagtgcttgaacagccagtacaggaagctggaaataccgggaatgcgacgtagcgggccggccgaatacagcacgttctccggctgcaggtggaatccggcagtcacgggaatgcccatttggtgggcgactttagcggcacgacggccgaatttgaacggcatatagatatgcaccacatccacgccttggaaggcggtgcggaacaacgtgtcgctgggttcggcgaattgcatgagctgcttggcggccacccacgagacgagtggcaccttattcacacgcgccggatattcgggcgcccctataccgacaagcctcacatgatggccttgccgctccaattccgcagcccattgcaaggccgaattggaggtgccgttgccctgattgcccaccgtatcgaccacaagagcgatagtcagcggacgatcaatgctctcttcaatcccgttttcgcgcattgcctcatcctaaaccaccgcgaggcaatggcgtcggccgcgctgcttggataggccggaaatggtatgggctgccgcattttgcctaatattgaatcacgcgcttcgcagcgcacgatcgacgcgggccacgacctggaacaactcggcggtgtgcttgagcagactgatgcgcacccagccttcgcccacctgaccgaagcagacccccggcatcagcgccacgccggccgtgttgagcagccaatccacgaatgcggcggaatcgccatgccaccgcgccagccggccaccatatacattttggaca

SEQ ID NO: 1895 - DNA, 14259 bp, Unknown
  MAG_14  MAG No. k141_73993
accgcaaaattcaacttccgcggcaagaacgcggccatcggcatcattatggcctgcatgctcatgccgtccgccctgctgaccatcccgatgtactcgatcttccacacgttgcacctgaccaacactatgctctcgatcatcatcccgtgctgcgtttcgccgttcggcttcttcctgggccgcacgtacgcacagagttcggtgccggacgaactgcttgaagccgcccgcatcgacggcgcgagcgaggcgaggatcttcttcaccatcgtgctgaggctcctggccccggccatggtgacgattttcctgttcctgttcgtggccacgtggaacaacttcctgctgccgttgatgatggtgtcttccgacaccttgaagcccgtgaccctcggtctgtacggcatggtctcgctggccacgttcaccgatcgcggcgccctgatgatgggtgcgttgctcggcgtgctgcccgtgatcgtgctgttcctcggcctccagcgctactggcagtccggcctcgccgccggtgccgtcaagggctaaccaatccgctgcccggcatgtcgtgtcactccttccggtgccgggcaacgtccctcccatattcagtgacacgattccaatcgtccggcgtcaccgtaagcgtcaaggatctacgcagtcagggtcccagggcccgcgatgacgccggtcattttgtatgcgacgaattcgtcgctttgtagttttttgatgaccaaccccacaaaggagcactcatgaccagcaccggccgcttcacgctgcccagtgaagagaattttgccgaaaagaccaaggaactcgccgaattgtggggtgcggacgccatccgcaactccgacggcacgcatctggacgaggcagtgctcgctcttggcaagaaaatctacagcgcctacttcccgacccgcgcccacaacgagtggatcaccctgcacatggacgagaccccgcaggtctacctgctgaccgcccgtatcctggccgagtccaacgcggtggatgtgccgctgatggacggtttcttcgaggaacagctcaagcctaaccgtgacgccgaccctcataagtactgggaagtcgtggaccgcaccacgggcgaggtcgtggacccgtccggctggacgctcgacccgggcgaggacaccgtgcacgtgaccgctgccgtgccgatgcacgaatacacggtgagtttcctggcctacatcatctgggacccggtcgagatgtacaaccacctgaccaatgattggggagacaaggaacacgagattccgttcgacatctaccatccggccacccgcaagttcgtgttcgatacgttcgagcagtggctgaaggacagcccgcaggtggatgtggtgcgtttcaccacgttcttctaccagttcacgctcctgttcgatgccaagcgtcgcgaaaaggtggtcgactggttcggttgcgcctgcaccgtgagcccgcgcgcattggacgatttcgagaaggagtacggttaccgtctgcgtccggaggatttcgtggatggcggtgcctacaactccgcgtggcgcgtgccccgcaaggcgcaacgcgactggattgacttcctctccggattcgtgcgcgagaacgtcaagcggcttgccgacatgtcgcacgcggcaggcaaggaagccatgatgttccttggcgaccagtggatcggtaccgaaccgtataaggacgggttcgaaaagctgggtttggatgcggtcgtcggctccatcggagacggcaccaccacccgcatgatcgcggacattccgggcgtcaaatacacggaaggacgcttcctgccgtacttcttccccgacacgttctacgagggcaacgacccgagcatcgaaggcctcgacaactggcgtaaggcccgccgcgcgatcctgcgttcgccgatcggccgtatgggctacggtggctacctctccttggccgccaagttcccgaagttcgtggacacggtgacccatatcgccgacgaattccgcgacatccacgaccgcaccggtggggtggccgccgaaggcgagctcaacgtggcgattctgaattcctggggcaagatgcgttcctggatggcgttcaccgtggcacacgccctgcccaacaagcagacctactcctactacggcattctggaatccctgtccggcatgcgcgtgaacgtgcggttcatcagcttcgacgacgtactcgcgcatggcatcgatagtgatatcgacgtaatcatcaacggcggcccggtcgacaccgcattcaccggcggcgacgtgtggaccaacccgaagctcgtggaaaccgtgcgcgcctgggtgcgtggtggcggcgcgttcgtgggcgtgggcgagccgagctcggcaccgcgcttccaagcgggccggttcttccagctggccgacgtgattggcgtggacgaggagcgctatcagaccctctccgtggacaagtacttcccaccggtggtgccggaccacttcatcaccgccgatgtgccggtcgacccggcggcccgcgaggcttgggaacaggccggctaccgcatcccgctgagcggttgcggcggtggccagtccatcaagccgttgggcggcatcgacttcggcgaacccgtgctcaacacgtatccggtcaatgaaaacgtgaccctgctgcgcgcggacggcgggcaggtgcagctcgcgaccaatgattatggcgaaggccgcggtgtgtacatctccggtctgccctattcggcggccaacgcccgactgctggaacgcgtgctgttctacgcctcccacaacgaagacaagtatgcggcttggagctcgtccaacccggagtgcgaggtggcgcacttccccgagcaagggttgtactgcgtaatcaacaacaccgatcagccgcagcggaccacggtgactctggccgatggcaccaccgaggacttcgacctgcccgacagcggcatcgcatggcgtgaagcctgattcccgcgttttggagaacggacccatcatgaccgaaagcaatgaagttttattcggcatcgcctcgcattttgcgctggaaggtgccgtgaccggcatcgaaccttacggagacggccatatcaacaccacctatctggtgaccacggacggcccccgctacatcctccaacagatgaacaccagcatcttccccgatacggtgaatctgatgcgcaatgtcgaactggtcacctccactctcaaggctcagggcaaagagacgctggacattgtgcccaccacctccggcgccacctgggccgagatcgatggcggcgcatggcgcgtctacaagttcatcgaacacaccgtgtcgtacaacctcgtgccgaacccggacgtgttccgcgaggccggcagcgcattcggcgacttccagaacttcctgtccgaattcgacgccagccagctgaccgaaaccatcgcccgcttccacgacaccccgcatcgtttcgaggacttcaaggccgccctcgccgcggacaagctcggccgcgccgccgcatgccagccggaaatcgacttctatctgagccacgccgaccagtatgccgtcgtgatggatgggctcagggacggttcgattccgttgcgcgtgacccacaacgacaccaagctcaacaacatcctcatggacgccaccaccggcaaggcgcgtgcgatcatcgatctcgacaccatcatgcccggctccatgctgttcgacttcggcgattccatacgctttggtgcgtccactgctctggaagacgaaaaggacctcagcaaggtgcatttcagcaccgagctgttccgtgcctacacggaaggattcgtgggcgaactacgtggcagcatcaccgcgcgcgaggccgaactgctgccgttcagcggcaacctgctcaccatggaatgcggcatgcgctttctcgccgactacttggaaggcgatatctactttgccaccaagtaccccgagcacaatctggtgcgcacccgcacccagatcaaactcgtgcaggagatggagcagaaggccagtgaaacccacgccatcgtagccgacatcatggaggctgccaagtgagccgtcagtcgaaccatacccgaaccagcatgatgggggccgagcaatgagcgatcagctgaccgaggtatacgccagcatcgacgcccttgtcgattacgccttgaatcatctcgacctcgatccacgcaacgcagactggacccgcaaccaaatcttcgccctcttccacctggattcctaccccggacccaaaaccacaacgtcggcggcgtcagtgtcagacgcagtccaagacattgtcggcagccgaagccaggccccctctgacgaaaagacccccgaccccctactcgccgccttccgcgccgccgccacaaccgccggcctcttcgatccggaggaaggcccggcctacgccgacaccatcatgggcatcctctccgccaaccccgccgatctcgacgaccggttcctgctcatcgagcacagggacggcggcatggccgccatgcaatggttctacgactactgtgtggccaacaattatgtcaagcgtgcccagctcgaccggaacccgcgcttcgactcgcacgggctgacggtgaccatcaacctcgccaaacccgaattcaagaacatgaagaaggcggcggccggcaacgccgtgtccggcggctacccgaagtgcacgatctgccatgagaacgagggcttcgccggacgtgacaagcgcacgctgcgcaccctgccggtcacgctcggcggtgagtcatggttctggcagttttcgccctacggctacttcgaccagcacggcatctgcgtgaacaccgaccacacgccgatgcatgtggaccgcgacaccttcggccatctgctcgacttcgtggaccgcttccccggatacttcctcggatgcaacgccgcgctgcctcgcatcggcggctcggtgctcgcccacgaccactaccagggcggcggcgaactgctgccgatgcacaaggccgccacttgggccgccttcacgctcgccgactatccggacgccgtggtcgaaatcctcgactggcccggtaccgccgtgcgtgtggtgtcgaaaaaccgccagagcatcatcgacgtatccgacatcatccgcgaggcatgggtcggttatgacgacgcggcgaacggcatcgccagccatgacgcggacggcaaccgccaatccgccctctcgcccagcgcgatcatcaccgaacgtggctatgagatgagtctcatcttccgcaacaatgcgatcagcgacgagtacccggaaggtattttccatgcacaccccgaatactggccggtcaagcaggagccgattggactgatcgaagcccaaggcctgttcatcctgcccggacggctcgtcgaccagctcggcatcgtcgaggaggcgctcgccgaaggccgcgatttgcccgatgaagtcagcgaattcagtctcgaatggggcgaactcgctgaaacattggccggaaaccgcgaccgcgaggccatccaccaagccgtacgtgacgagctcggcagcgtctgctaccgcatcctcggcaacacggccgtcttcaagcagaaagccaccacgcaaacattcctcgaaagtcttggttttgccgctaggtgaaacaggtcaagtgaagtaagctcaatactgaaggaaaaccgaaggcaagtccttccaaaggaggagatatgactactgttctggttacgggcggtgctggattcatcgccacccacaccgacatcgaactgctcgacaagggctacgacgttatttccgtagataactacggcaactcgtctcccgtggcgcttgagcgcgtcgagcagatcaccggcaagccggtcaagcgttacgacggtgacgtgcgcgatgaggcgcttatggaacgcgtcttcaccgaaaacaacatcgattgggtcattcacttcgccggtctcaaggccgtgggcgagtccgtggccaagccgatcgaatactacgacaacaacctgtactccacgcttgtgctgctcaaggtgatgaagaagcacaacgtcaagaagatcatcttctcctcctccgccaccgtgtacggcacgccgaaggaactgccgattaccgaggagacgccgaccggcggcaccaccaacccgtacggcacctccaagctgttccaggagcagattctgcgcgacgtacatgtggccgatccgtcctggaccatcgtgctgctgcgctacttcaacccggtcggcgcacacgagtccggcctgctgggcgaagatccgaagggtattccggcgaacctcaccccgtacgtggccaaggtcgcggtcggcgagctcaaggaagtccaggtctacggcgacgactacgacacgcccgacggcactggtgtgcgtgactacatccacgtggtcgacctggccaagggtcacgtggccgtcattgaccacatcgacaaggaaggcgtgttcgtctacaacctgggtaccggccacggctactccgtgcttgaggtcatcaaggcttacgagaaggccgccggtcatccgattccgtacacgatcaagccgcgtcgccccggtgacatcgccgcctgctacgccgacgcttccaaggcggagaaggagcttggctggaaggccgagctgaccatcgacgacatggccgcctcctccctcaactggcagaccaagaaccccaacggtttccgcgacgccgagtgatatgagcagatgagctccctctgatgggggagctcatctgtcgtttatcacacaatgcgcctatcggcggcccagcgggtgagctcggtgcgattcgaaagctgaagctttcgcagcaccgagctcacgtgcgtttcgaccgtcttgatcgaaatgaacagttcggccgccacctctttatacgtgtatccgcgtgcgatcagccgcatgacctcctgctcgcgggcggacagccggtccagctcctcatcatgagcccgtgccgcaccatcagcgccgccatcagaccccgccgccggcacaccctggaaggccgaaagcacaaaaccggccagttttggtgagaacacggcataaccctcatgcacctgcttgatggatgaaatcaaatcagcgccggtaatcgtcttggtcacatagccctgggcgccggcgcgaatcaccgcccccacatcctgcggcgcatccgaaaccgacaacgccagaaacacagtggtaggggagtagggccgcgatttggcgaggatctcggcaccgccgccaccttcaccgccgggcacgtgcacatccagcaacaccacctgcggcttggtctgtgcgatcatcgccaccgaaccgggcacgtccgccgcttggccgacgatatcgaaggaatcacgcaacgtggcgattacgcccgcacggaacatctcatggtcatcgaccacggccacacgaatcttggctgtctcattctcgctcatcgatgttctccctgcgccgctttcagcgcgattggcatatgcattctgacctcggtgccccagccggccctggacactatctccactgtaccgccgcgccgtttgatgcggccgataatcgattcgcggatgcccagccggtcgggcggaatggcgtccatatcgaagccttcgccatggtcgcgcacgaacacttcaaccatcgtgtcgctggcctcgcaatacaaagacaccggctcgccgccatgcgtgaccgcattgaccaacgcctgacgggtggcgtccagcagcgcatcggtctgggcgctcggccgcgcgtcgcccacggtgaccacctcaatcggtttgccgtgctcgtcctccacctcggcggcgatctgcttcaatccggctcccaccgaacgatccgatgtggaacgttcctgatacagccattcgcgcagctcgcgctcttggctacgcgccagggcgaatacggtggtcggttcctcggagtgcagctgaatcagcgccaacgtttgcagcacgccatcatgcagatgggcggtcatgtccgcgcgctcctcttcgcgttccttcaatgcctgctcgtgggtgagtcgttgcagcatcgcgttcgcccacggcatcaccgccaccacgataccgacgatcatcatgaatccgctggcaacaatgcgtcgaggagaggtgccccacccaggaatgctgacattatgcacatacaatgcccatcccatgaaaatcagtgcgatgccgcccaacatagacaacagctgcgtgcctcgcggactaagattcatccatgccagtgcgatgccgcccaaccctaccagcagcggaagcacaatctgggcatccgcaccggtgctggtgagcagcagtccggtggccatcaacgcgaaaccggccaatgccacgacggccggtttcggagcacgttggatggcctcggacaatgattccggtgcggcagccgattcgtcgtcatgagcggcaagtggctgattgcctcgcgcaagcggcgcctgatcaacgggcactgtgcgagccgcagccgccaccgggtctccggcgggcatgaacacccacaggaatacataagcgatgatgcctgcgccgtagaggacggtcagagcgatgaacgcaatccgaatccatgccacgccgatgcccaagtgcagggcgatgcccttgcacacgccggtgagccagcggccctgccgggggcgcatcagcggcatgcgcgcgggcagcaatggttcgggagatgacgtcatactcctattgtgccgcgctcagggcgttgcggccggggttttacccggtgttcagggaacaatcagggtgttccccgagcgttgtggcagtggtcgggcggtgtaatggaatcatgagcaatccaaacgcgaatccgtatcagccacagccgcagcctggtccgcaaaaaaacaagacatcgcgacgcttcttcacttgggtgcgatccagtggactggttcgcggcgacgaccggtggatcggtggcgtatgcagcggcatcgctttacggcttggctggagccccacactagtacgtgcgttggtgattgtatgtacattgttcttcggcttcggcgcagctctgtacgcactcggctggtttctgatgccggatgtacgcgatgggcacatcttggccgaggacctcattgccggccaatgggactggaattgtcttggatgcttcctgttcctagccgtggcaatcgtgattccaggtgcggggtgggtttgtattgcgctcgccgccttagcgctatggttgttggccaaaagcggcattcgccagcaggaagggtacggattcggggcatctgcgccgcgaccggtttcacagcctgtgtcgtatccagctccacagcctgcctcatatccagccgcgcaaccggtccctctatctcctttgtattcagctccgcaacctgtttcacaatctgtttcacgaaccgcgcctagtgtttcacaacctgtttcacagcctgtctatcagtcgatgcccagcgtgatgccgggcacagtgcccagcgcgatgcccggcacagtacccaacgggccgtttgcccccgaccgtatgaacgcgacggcttatgcccccaccgagtccaagcgccgcaagccggcgggcccaatcgtggtcttgagcatactgggccttaccttcctctcctttgccggtctgatgggactgatttgggtaaacgacatgggcattatcggcattatgcgtctgagcaccatctggattgccgcagtatgcatagtgatggggctggtggtcatcattctcggattcagagggcggcgtaccggtggtctgattcctctcggactggttgccggtggatgcgcgctctgcatgaccatcgtttcaggcacgtatggcgtgcactaccgtgatattggtgccagcggcatcaatactgttgtttcactgagccaatctgtcagtgcgagaaacagcgacggaatgaacgatgtgcaaaaggatggcatcttcgttgccgatgccagcgatgccacgttcgaaacattgcagcaaggtgtggcgttcaacggtgaaaactacaacaccgatcaggcaatcattgattggtccgattgggacaagacacatggaccgcacacagtgaagatgctggatggcaaaacctccatcagtaattgcccggtcggtaccatcaccatagccgcaacacaggcgcaagtgcatatcgttctgccggattcctgcacttacgccttcggcaccgccgactcctacttcacttcgagtgacgtcggcggcaaatacgagatggtatacaacaactacatgggtctaagctttgttttcttcggagctgaaagcgccaccaatcccatgaatgggcctgattacgaatggttggataagggatccgccatgccggacaacggcccagaattaaaaatcaatattccctatgcagtggaagcacgtgtcaacgtggtgtacgcctccgattggaaaggctccacgttccagccgcttgccgatatatacgacggcaacagcacaagcaagaacacaaccgggcaatcggaatgatcaagccgttacaaccaggagatggaatcatgactgatgaaaccaaggaattcgcctccatcgaggatgcgacaccgaccacggccataccttccgaaaccgacgagaccaccgagaccacaaccatggtgaccgtcgatgaccgaaccgataccacggtgctgccatccgcagcggatgatgacaaaacggctgtgctacccgtccccgacgatcatgcggatgcgccggtctcggatgtggatacgcaggcaacagctgcctctccatcgcccatcgaaccatccacagatcggattgccctggaagcagttgccgatgccgtggagggggatggtgggccgattccatctgccgatgatgtaccgatgtacgcagcatcttcagcgcaaccttcctatgagcagtctcagaccgccggcaaaccacgccaaactgaggggatcgccaagaacgtccagaatgctaaggatgtcaagagtgccaagaacatccagaaacagagcaccagcgcgcctactgtggtattcggactattaggcgtgattatcggcgtgatcgcgctggttttcgggtgcatatctccggatcggatgatttcgctgttctcgccgaatccgcaattgctgacggctattatctgcgccgtagtgggacttattctggtaatagtggccgttgtatgggccatagtcggtgccgtcaagaagagaaaatagcgttacaaccattgcattacggtcccagtagaagcacattatgacgggagccgaccgataagagccgaccgttctatgctgatggggggaggcatagtaactatgaaacggatttcggcgcggcgggtagcgagcgtcatcgccaccgcgatggcgatgacgctggtattcgccgcacttggctgggcgatgatgccgcaatggaacacacggccctacaccaagcacatcgctatcgcttctgccgacaccaccatcacccctgcccatgcgaacattccccacgaggggcgatatcgtacgcgtgaaacccgactatccatcaagaccggcgacggcgtcacgctacccgccgtactacgtgaaccggtcgacgctcccgggccacgcccggcttgtctgttcattcacgggtccggtaccagcggtgccgaggatttcggcgatatcgccaacgccatggcctctgccggcatcgtgaccttggtgccggccaagcgcaacgacaactacaccgtgctgcatcgcgactacccgcgttttgctcgcgaatacgggcgttcgctcgacgtgctgcgtggcataagcggcgtggaccccgccaaaaccggcatctacgccgaatccgaaggcacctggatcgccacgattctaacctcgaaacggcaagacattgcctttgccatacttacatccgcaccggtgttcaatggacgtgagcaaatggccatggctgtcagcgcctatacgcatgaggccggcgcgcccaagcccgtggtcaaagacatggccaaattgatgtcgctggactacgcgccattcgatctggcctatgccgactttgatgccgaccggtatctgaaatccctcaccatgccggtgctggtgaactacggcacctacgatacggccatgcccatcgaacagggggcgcagcggatcatcgccacggccaacaagtccggcaacgagaacgtcaccgtacgctatttcgccggcaaccatcagatgcgggctggtgagggcttattcaccccgaacctgccattggccgaaggctatacgcaagcgctggaaaattgggtgaacggtgtgactgccggaaccaaagccgatggatgggcaacgccccaagtcgccggtgcgacacctcaccagcgcttcgccgcgccgcaacgtaccagatccggtatcgtcggctcgctcggcgtgctggccggtctgatggtggcagggcccgtgctgatcgtgatggcggcgatattaggtattggcttgactgtgttttcttggctacagacgttgctggccgggcgacgtagtgtggcgactgtgcgggccatgcatgcgacgccgagtgggctgggagccgcccaacagcgtacgttgcacggcattgccggcttatctgccggtatcggcacagcggtaatggtgattaccgtgctgttgtatggctatatgagcgccgtaggcgtatcggctgtattggttatgcctcaaccgcagttgttttcccttgggtggagggcattgcaggtgctgaccgtgctgttggtcgtgctgttcgcgtgggaactggaacgtatgtggcggtatcgcgccagcattatcggcgtgcgtcgtgtcatttgcgtgatggtgacactggctgcacttgtcacattgacgatattgtctttctgggggttgttcagtctgtgatattcacggtcgttaccggctccttcccgaatatgtgccactgagtcgccgtgagcgtcacaaattcgggaaggtggatggggcgtgacggcgtggaggcactgtcgtcagcgctgagcggcttcagcctcatccaaagtgtcgaaaccgccgagctggactgtgtgcaacaaggtttcctcagtgatattgcgttgcgggctggctgcggcgcgctcgctaatcatcacctcgtagagctggaaggtccgttcggaatacgtaccaagctcgccgcgcagataggtttcgaatgaggtggcagatggtgtgtcttcggtggtggtgagtacgcgcatcgcctcgccgagcttggggtagcgctcgcggaaatccttggcccaggcgacctgctgggcgatgacctgttcctgacgggccacgcgctcttcagagggacgcggaatatacggctctatgttcttcgtgaaatcttccggcgcggtggaggccatcatgcggccgtatttttcggtcacgaggttgcggcccacgtggtcggccgcgtcaagatcagcggcatagctggtgagtaatggccgctcccatgtgaggaactgggccagccgcatctggtggaacaccggccagttgccttggcatgccgcgcgtccaccctcattgttggtgcgctggaactgatcccattcatggcgcacaatagcctcgcgcagttcatcatcagtcagttcgttggtcatcgacgttcctttcactaatatctccctctgatgagggagctctaaagcgccggatcatcagagggagcttgaatctacaaacttttaagcaccggatcatcggagacgatgtggtcctcgacatacgggcgctgccattcgaggaaggtctcgccggacgtggtcaggtgttcgcgtttgagttccctgacgatatccgccgcaatctgctccacaacatcgttgattttctcgattgctggagccgcgcccttgccgccttcgccgaatccggcccctccatagcaggctgccgaactcaatcgcatcacggtttccaactgttcgcccacgttcggcaacagcgcgaacatcgagccagacagcttgcgcaatgctgcgaactgccacttgtaatacggcatatagcccaccaccatcggcacgttaac

SEQ ID NO: 1896 - DNA, 2541 bp, Unknown
  MAG_14  MAG No. k141_74121
caatgtggacaaggtctcactcgtcaaaaagaccgaaactccggtgaagccatccacggagaacctggacaaggccgtggccgaagccgggaaaatcaatcgcgatgagtacaccaacgagtcgctcgccaaactcgatcaggcgcttgccgccgctgacgtgctgcttgccggcagcacctacaccgagcaggacgtgaacgatgtgatcaagcttgttgccgatgccattgccggcctcgcccaaaaggaggtctccagcctgaccgtcacgccaagcaaaaccacctatcaggtgggcgatgccatcgatgccgaccatgatctcaaggtcgtgggcaactattccgcaggcatgggcaacgtgacgctttccgccgaccagttcacgctcgattacgatttctccgctcccgctgatgcggcgaaggttaccgtaacgctcaagtcgaatccgaatgtcaccgaaacctatacggttgcggttaccgctcgggccgaaggtggttccggcaacggctcggacggtgcgggtaatggcggggctactatcaatcccgatacgggcgagggcgataagaccaacggtgcgaatggcgacaagatcactggtgtgctgagcaataccggtagcgcggtgactgccgtgggtcttgcggttgtcgttctcggcgtggccggcggggtctcgcttgctttgcgtcgtaagcgctcctgatagagactgatgcggcattatgatgcggttgccggcagccggcaaccggctgccagatgccatctgtcggctgtcgtttatcggttgtcggctgtcagatgcgtctgtctcggcgcagcgatgcgattctgtcccggttcgtgcatcaatcgtttgatgtgggtaccaggacagaaatcactgtcctggtttgcgaaaacgggtgtttttcgcgtaccgggacaattcccgttgccccggtttgcacgtcaatcgttctacgtgagaaccgggacagtatgttgatttcgggattggctgtattccgccgattctgtttgtcggggtatgtggactttggggattgtcttgtcctggttctcgaaaatggcccgaaattgcgtaccgggacaacgatttctgccccggtgcaaacgtcaatcgattgacgcctgtaccggggcaaattcgcgcccgggaacaatagggcgagggccggtcgcaggagtagagcgtgatgttgtcatggttgcgcccggctctcccacacggaaggccgggcgcaatcatgccgtttggttgcagcacccgcacatcgcctgcataaccgtgtacagtggcgtgtagttgcagtacatgaaggagcatcacaagccatgaccaacggacacatcaatcccgccaacgtgccggacatcgccttgaaagacggccattccattccgcaggtcggccttggcgtgctacgtatcgatgacgagggcgtggcccctgtcgtcgaatctgcgctggaagccggataccgccacatcgatggcgccgccggatacaacaacgaggccggcgtgggtcgtgcgctcgccgcttccggatacaacaccggcgccaagcgcgagaccctgtgggtcaccaccaagctgcgcgactctgagcagggctacgactccgcgctcaaggcattcgacaactccctgaaactcctccagctcgattacgtggatatgtacatgatccattggcccacgccgttcgactggcgcagcaccgacacctggaaggcgttcgtcaagctgcgcgacgaaggcatggcacgcacgctcggcgtatgcaacttcatgcccgccgatctgaagcgtctgcacggggagaccggcgcatggccggccgtcaatcagattgagctgcaccccacgtggcagcagcgcgaagtggtggcgttctgcaagaagcacggcatcgccgtggaggcctactcgccgatggcgcgtggcgccgacctcaacgccggcgacggcaccatcgagaagatcgccgccgcccatgaggtcagcccggcccaggtgattctgcgctggcacatcgaaaacggcacgatcatcatccccaagtccgcgcatgccgaccgtcagagggagaatctcgacctgttcagcttcgccctgaccgccgatgaacacgctgccatcgacgccctcgacggccccacccgcgccggccacgaccccctcaccttcacctatgcgtgattgatggcacgtcgtaacgcccacttccgccgtcgtttcaacgcctctgggccgctggagcgtgtgcttattctcattgtcattgcggcggtcattggcattacggtcggcctgctgctgccgcgagtcaatcctgatgcagccaagctcaccggcggatacaccgccaccggttccgccgctgacacgttgaacaaacttgccgtggatgacaaccagagcgcacacggctacgaccgcgattccttcggtttccgcaccaccgacgtcgacggcaatggctgcgacgtacgcgacgacgtgctcgcccgcgatctc

SEQ ID NO: 1897 - DNA, 4793 bp, Unknown
  MAG_14  MAG No. k141_74612
gctgaccacccgacagctgggaggggtaatagtccatgcgatcgcccagaccgacgcgctgaagctcggccacggccaggtcacgggcggctttcttggactggtgctgcacgtggatcggggcttccatcacgttctccagcgcggtcatgtgtgggaacaggttgaagcgctggaacaccatgccgaggcgagagcgctgtgcggcgatctccttatcgtccaaggtctgtagcatgtcctggccgtttttggtcacgtgcttgtagccgatgagttcgccgtacacctcgatggaaccgccggtcagggtttccagctggttgatcagacgcaggaacgtggacttgccggaaccggagggccccagaatcacggtcacagtaccgggcataacggttagatcgatgcccttgagcacatgcagtgggccaaaggccttgtgcacctgcacggccttgacagcgggaatcacggaaccgtcagccgccttgtgcacggccggggcaacactggtgatgtcattcgtagtcataatcgcgctcccgccttatgcattcaatccgacaaatgtggtctggttgagcttgtccacgtcatccttcggctcaccgtcggtcttacccggcaatggcacctgcttgcccttggtgcccaccggtcgggcatcgaagcccttgccgaagtgcgcttcgaggcgggactggcacaccataaggatggaggtaatcagcagataccagaagcaggctacgatcagcagtggaatcggcttgtagatacggttggcgatggcgttggtggcaaactgcagttcgagggtgaacggcacggcggtgaccagcgaggtggtcttcagcatgccgatggtctcgttgccggtgggcgggatgatgatgcgcatggcctgcggcagcacgatgcggcgcatgatgagcgtgcggttcatgcccagcgccttggccgcctcggtctggccggggtccacggcttcaaggccggcacgcacgatttcggacaggtaggcggcctcgttcagggccagaccaatccatgcggcgttgaatgcggtgaccaccacgttggagtcgatgctccagaactccaccgaggtgaacggaatgccgaggctgatcttaggaatcagcacggcgaacagaccccagaaaatgagctgcgtgtacacaggcgtgccgcggaagaaccagatgaagaaccagctgacgccgcgcagcaccggattgatggatttgcgcatgatggcgagaatcaccgacaggatgatcgccacgaccatggagatcacggtaagctccaaggtatagcgaatgccttcaagcacgttctcgttgaacaggtacttccagacggtgggccaatccagtcgcggattggtaatcaagccttgaatgagcatcgcggcgagcagtaccacgatcactgcggccacaatcgggccggggcgcttgaccggcaacgccttgatgcggttggggatgttcagcccctcaccgtcgacttctttcttcgccataatctggttccttggatgtgttaggcagcctgaactgcaagttgcaactagcgttgaaccttagtgcacgaatggggcgactgtgttacaaacagtgcgccccattcgaattttcgcgacagcttgtcgactattcgacggccgggttgatttcggccttgtccagtgcaccggattcgacgccccagtgctggagaatcttagtgtaggtgccgtcgtccatgagcttttgcatggccttctgcacggcttcggcggtctgggaatcgcccttcttgatggcgatggcgttcggcacttcatcgaagtccttgccgagctgttccagctgaccatcggtctgggcgatggcgtagccgacaaccggggaatcggcgaagaagacgtcggccttgccggtcaccacagcggtggtggcgtcggtctgctgcttggaggactggatggtgatgtctttcttgccgtccgccttgcactgcttggcggtcttgttgatggcctcttcctcgacggtgccggtctcgacggcgacgttcagaccgcacaggtcatccgggttcacgttcttggggttgcctttggccaccgcgtagcccataccggcggtgaagtaggagacgaagtccacggactgcatacgttccttggtgatggtgaacgcggcgatgcccagatcgtacttggagccgatggccggaatgatcgtatcgaagttggaggagacgatttcggtctcgagaccgaagatgttgcccatggcgcgggcgagatccatgtcgtagccgatctgggtcttgccgtcggcgtcgaggaattcggccggggcgtaggaggggttggtgccgatggtgagcttgccgtccttggtcacggattcaggcagcagtgcggcgatggtgtcatccttctccacggagctgacatcgtagctggtgatggtggcggcatcggagcccttggcggaatccgtaccggcatcggccttgtcggaggtgccgcaagcggcggtggcgaacagcatggccgagctcagtgcaatggccataatggacttcagtttggtggactgcataatcgtttcttcttctctcttacgccgcttcaacggcaacgatcaacggttaagcatatttatacactacagtgcatacatatacaaaaagactcccgccgcagggcaacgggagtcttcatagtaaccgaaactactcgacggacgggttgatctcggccttgtcgacggcgccggaagagacgccccacgtgtcgaggatcttcttgtacgtgccatcatccatcagcttctggatggccttctgtacggcctcggcggtcttggaatcgcccttcttgacggccacggcctcaggggtcacaccaacgtcctcgccgagggcctcgagcgtatcaccggtctgcttgatggcgtagccggcaaccggcgtatcggcgtagaagatatcagccttaccggaagccacggcggtagtcacatcggtctgcagcttggaggactggatgtcgatggcatccttaccgtccgccttgcactgctcgttatccttgttgacttcctcttcctgggtggtaccggtctgcacagccaccttcacgccgcacaggttcgaggagtcgaccttgttcgggttgcccttctgcaccacgaacgtggaaccggccttgaagtaggtcacgaagtccacagcctccatgcgttccttggtcacggtgaaggaggagatgccgatgtcgtacttggagccgacggacgggataatcgaatcgaacgtggaggagacggtgttttccttcagtccgaacactgcggccagcgccttggacaggtcgacatcaaagccgaccggggtcttgccgtcctcggccaggaactcggccggggcataggaagtatcggcgccgacggtcagcgtgccgtcgccggccacggaatcgggcagcagtgcggcaatctcgtcgtccttctggatgctgctggtgtcgaagccttgaatcgaagtgctggacgagtccttggatgaatcgccgctcttggatgcggtgtcggtgccgtcagtcgtgccacaggccgccacggcgatcagcatggccgcgctcagggcggcggccgcagcggattgtattcccttgcttagagacattggatttcctctctccggatagtcagctgggcgggtatgtttcccagatggttccagagcgtaggagtgcaatgctacggaagcgttaatcgtgggcgaaatgacccacaacgcggacatcctacccttggctcccctccggaggggagccaagggacgggactagtggcgcatgttggcgtagcgcatggcgcgtagggcttcgcgcttgtcctgctcttcgcgcagggcctggcgcttgtcgaattccttcttgcctcgggccagcgcgatctccgccttgacgcgaccgtccttgaagtacaggctcagcggcacaatcgtgtatcccttggcctcgatgccgcgggcgagcttggtgatctgcagtcggtgcagcagcagcttgcgcttgcgcttgggcgcatggttgttccatgtgccgttcaggtattcggggatgttcgcgccctccagccacatctcgccacggcggtcgatggagatgaacgcctcggacagcgatgcgcggccttcgcgcaacgacttgacctcggtgccggtcagggccagccctgcctcgtacttgtcttcgatggcatagtcatgccgggccttcttgttctggacgatgagtttctcaccggtttccttgggcatgtctcctcctttcgtgggcaataactcgtgagtagcaactcgtgggtagcaactcgtgggtagcaacgcaacatccgacgatatcacggaccggcctcgaatacgaaaagggttcctcttcaagaggaacccttcaaccgcatatatcggccgaaccaaccggtcagtggacgaaccagtactgacccaaattggtcaaggtgcggtcgtgcatgttccacggaccaccccagttcatttcggagatctggaatgtgccgtcgccatacacggcttcgactacggcaacatggccataggtaccgtcggcaccatcctgaccaggcaggaaggagagcgccgcaccgacctgagggttgtggtccacgcgcaagccgtacgagggggcgttgcgccaccagtcgccgccattgccgagataggacggcgtgccaatgcccatctgcttacggcgttcatac

SEQ ID NO: 1898 - DNA, 3213 bp, Unknown
  MAG_14  MAG No. k141_75167
cgaagtagtccaaatcagcgggcttgcgggacgtgatgagcttgaagccgttggcgtcgtccacgtgcagctgctcgtcgacgtaatggccgcccgcgttctcgatatcggcggcgatataacggcagggcgcggcggccttgagatcgcgcagcgggcgcgtcagctcggattctcatattccagaaacgggtgcggcgcatgtaacgggcggtaggtagtctgaaggactgtaatgcaaagccgaacaggggagtgaagcatgtcgttggcggtacgagtcatcccgtgcctggacgttgacgccggtcgcgtggtgaagggtgtgcatttcgaaaacctcaaggatgcgggcgacccggtggagctggcggccgaatactatcgtcagggcgccgacgagatcaccttcctggatgtgaccgcatccagctcccaccgcaacacgatgattgacgtggtctcccgcaccgccgaacaggtgttcattccgatgaccgtgggcggcggcgtacgcacgcccgaggacgtcgactcgctgctgcgctgcggtgcagacaaggtcggtgtcaacacggcggccatcaatgacccgtcgcttatcagccgcgtggccgaccgtttcggcaaccaggtgctggtgctctccgtggacgcccgccgcgaaaagggcgagcaacacacgcaatccggcttcgaggtcaccacgatgggcggccgcaaatccaccggcattgatgccatctggtgggtcaagcgcgccgagcagcttggcgccggcgagattctgcttaactcgatggacgccgacggtaccaaggaaggctttgatctcgagatgattcgcgccgtgcgcaaggaagtcaagattccgatcatcgcctccggcggtgccggcaaggtcgaggacttcccgcccgccatcgaagcaggtgccgacgcggtgctggccgcatccgtattccattacggcatcctgaccatcgccgatgtcaaggcggaactcaagaagcacggctacaccgttcgctaaacgaatacaccttgctcccgctggacgaacaatccagtggattgttcgtagcagtgcgctatgcacatgtcgcacataatccgggagctgtcagcgaagctgactgagggtggtccacataaggaagataggtatgacagacactacatacgacaattccactgaactcgatccccgtattgccgcacgcctgaagcgtgacgccaagggcctggtcgctgccgtcatccagcagtacgacacacacgaggtgctgatggtcggctacatgaacgacgaggcattacgccgcacgctgaccaccggccgcgtgaccttctggtcccggtcccgtcaggaatactggcgcaagggtgatacctccggccatgtgcaatacgtcaagggcgtgtccctggattgcgacggagacgcactgctcgtcgaagtagaccaagtcggtgccgcctgccacaccggcaagcgcagctgcttcctcgaaggcggccccctgtccgtggtcgaaggccatcgcccggccgagcagtagaacgggcttccctgactgggggaagccgaacgaccgcgtactacgaaacaagacatcgagttgtaagtaaaggagcgaatatgagcgaatgcagcgtcaaacacctgaagtggggcgccacctggcccagtcgcggccagttccacgaacaggccgacgcccgctaccctgtgattacgatcgtgcgccgtctgctcgccgactcgctcaccccggtcggtttctacgagcgtctcgccggcggccgatccggcaccttcatcctcgaatcggcggaatacggcggcacgtggagccgttacagcttcatcggcgtcaactcgatggcccagctgcgctccaacaacggtcaggccgactggctgggcaaggtcccggttggtgtgccagtcaccggtgacgtggtcgaagtcgctcacgccacgttgaagactctgaaggccccgcatgtggaaggcctgccgaacctgaccagcggtctggtcggcacggtcggctgggatgccatccgccactgggaaccgaccctgcgcgccgaagctccggacgagaccggccagcctgagaccgtgctcgccctggccaccgatatcgccgtggtcgaccacgtatccggttcggtgtggctcatcgccaacgcggtgaacgtggatgataaatccacccgcgccgacgtcgcctacaacgaggccgtcgctcgactcgaccagatgcagcacgatgccgccaccccggctccgggcgagtcccgcgtcaacatcttggacgaaacggtcgcccagcctgagctgcgcttccgcaccgagaaaagccactacgagcaggccgtcgaacgcgccaagcagcacatcgtcgacggcgacgtgttccaggtggtcatctcccagcgtctcgacatcgattcgcctgccgacccgttcgacgtgtaccgtgtgttgcgcacgctgaacccgagcccgtacatgtatttcatggcgttgaccgatgctcggggccgcgacttcaacgtgatcggctccagcccggaaaccctcatcaaggtggacaacggccacgcgatgaccttcccgattgccggatcccgccctcgcggcgccacccctgaggaagacgaaaaattcgccaaggaattgcttgccgatccgaaggaacgcagcgagcacatcatgctcgtcgacctgtcccgcaacgacctgagcaaggtgtgcgtgccgcagtccgtggaagtcgtgcagctcatggacatcaagcgtttcagccacatcatgcacatctgctcgacggtcaccggcaaggtcgacccctcgctgaccgcattcgatgtgttcaagtccgcgttcccggccggcacgctttccggcgcgccaaagccgcgcgcagtcgaaatcatcgacgagttggaaccggccgaccgcggcatctacggcggcaccgtcggctacttcgatctctctggcaacatggacatggccatcgccatccgcaccgcgttcctgcgcgaccatgaggcgagcgtgcaggccggtgccggcattgtgctcgactccgtgcccgctaccgaatggcaggagacgcgcaacaaggccgaggccagcgtcgaatccatccagatcgccgcccagctgcgcgaactgtaacgttcaacgcatag

SEQ ID NO: 1899 - DNA, 3834 bp, Unknown
  MAG_14  MAG No. k141_76273
ctcgtgcgcgctggcgggctgaatcaatgctgcggcgcgctgggcgggggaatcatcctcacgcagtgcgggcgcggtagccaccggctcgttgacgatgtcggcaatcggctcaagattacggctggcggcaccgccgaccaacggcgtttggtgcggcaggtcgaacgcatcggcatccaacgccaacgtggcatccgcaataacggccgtgacattatcggtgctgcccgcccgcagtgccatctgcaccagacgctgcgcgcattcgccctgatcggacagcgtggtcatcgtctcttcgatggtggaatcttccagcacaccgcacaggccgtccgagcacagcagccaacggtcggcggggtgggctcggcgaatcgaaatatccgggcgcgggtcaatgtcaaagtcgccaagcacgcgcatcacgacgttgcgctgcgggtggttcttggcttcggacggggtgatacgaccggtgttgatgaggtgctgcacgtagctgtggtcgcacgtgatgcggctcaggcgtccgtcgcgcagcaggtaggcgcgcgaatcgccgatatgggcgatgacccagtagccggccaccaatgccactgcggtaacggtggtgcccatgccggcaagcttgcgttcgcgcttggccttgccgacgatggcgtcatgcgcggccataacggaggtttccatcatgcgggagatcgtctcgacgttgccgccggtgtcgtcctgctcgatgtgggccagtgaccggatggcgatggaggatgccgtatcgccgccggcgtgaccgcccatgccgtcgcacatggcgatgagatgctcgccggcgaaggaggaatcctgattgttcgcgcgcacagtgcccacatcggacaccgtggtggaatacaggaacagcggttgtgaagcggcggattttggcatgcggctacctcagttcgaaggtggtggcgccgatgcgcacaggaatacgagcgggcaggatggtggggcggttgatgcgctgctggttgaccacggtgccattggtggagttcaggtcttcaatggcccactgcccggagcgcgtgtcacggtagacacgggcatggtgggaagacacgaattcgtcatcgagcaccacggtgttcgaggcggcgcggccaagcgtgatgtcggcttcggccagcggcacggagctgccggcaagcggaccatcgatgatgaccaacagggtaggctgcgccgaggcgacggacgacgcggaagcgctgggccggcgatgcgggcgcggcgcagctgcctgtggcgtttcggccttggccttatgcacttcacgctcacggcggcggcgtgcgcgcgaaggtcgcggactgaacgtctcgatgtccttgcgcagcgaacgcacggccagccagatgaatatccacagcaggatcaggaatccatacttgagcagggcgaatgtcagttcggtcataagtggacgactttcgggcgtgtgctcgactactcctgggcttgggcggaggcccagtacaggatgcgggtgcggccgatggtgatggtgttgccatcgagcagcgtggcggcgggcacttggtggccctccacgtacgtgccgttggtcgaacccaggtcgcgggcgatcacgccgttatccgtgatgtcgatttccaggtgcttgcgggagatgcccggatcgtcgatgacgatatcgcagccggaaccgcggccgattaccgtcttgtctttggtgagcaggtactggttgccgttcacctcgagcaccgggctgtcctcggtctgcgcatcggtggtgaccggcacggcattgccctgcacggattcggaggtgaggttgaagttgcccttggacaggtcaaggtcttcctcgaagatcacgatcaccgggcccacgaaggcgtaatgctggctcttcgcgtactcggtgaggttatcggccagttcgttggccagggtctcgctaccccatgcctcgatacggtcgaagtcaggagtactgagcttgaaacggtattcattcggggccaccgtgcggtcacggcccacgggcatggcctcggcgtcaatctcgcgctccaaggcgctggaaagatcgacaggctgcaggtctttggagccaaacttggcgaatactccgttgactgcaccctccacgcttttttcaaaacggtcgagaacgctcatagtcctccctttctaatcctcacccatcctacgcggtgatgggaatatgaggcaaaaaaccggtctttcacatgacgatgggtgcaaaatatccaaaaatatccaaaaattcagggcggaaatgggtgcggcgcaccacctgcgccgtttttccgcatgccgtgtgggcgcgggccccgggcgtgccgcggacgtcacggcccacggcgcgcccggggccggtcaggccagggcgtcgcgcaggaagtcgcgctggagggtgagcaggttttcggctacggtctcgtcgttggtcatatgggtgatgcccgtcaacggcaggaaggtgtgcgggcgacccgccgccatcagggcttgcgagaggcgcaggctgtgggcgatggtgacgttgtcgtcggcgaaaccgtggatcagcataagcgggcgctcgagtttcggtgcgtcctgcacgatgccgttgcggtagtagacatccgggtcgaggcccagatagcgctcggtgtaatgcgtgtcgtacagcgtccagtcggtgggcggggcgccggcgcacgcggccttgaacacgttcggcgcgtccagcacggccagtgcggacaggaagccgccgtacgaccagccgatcatacacaccttgtcgaggtccggtgcgggaacgccgggcctgcgcccatcggcgttgagcctggagacggcctcgggaagggcgttgacggcttcgatctgatcggccagcgtcacgcccttcatgttctcgaagattgcgcgatcccaggccgggccgcggcctgtggtgccacggccgtccgccgtgaccaccaggaagccctggtcggcccaccactggccctcccagtagaaggactgggaggcgacgacctgctggaagccgggcccgccgtacggcttcatcagcaccggcagtttgtcggcatgggcgtacgggctggacgggctcggcgcgatgatcgccgtgtacaaccggtgctcgcccagccgcgtgaacgtgacgttcggcgtgaacccgggttccgcggcggtgctggtgatgtcggcggcggtgatgtcggtggtgttggcggcatcgctggtgttggcggcgatgacggcatcggtgacgccgccgacggcgcgtcgcgtgacgatgtgccgcatccgggcgcgggcggaacgcatatcgcgcccagacaccaccatgccgcgtgcgccgcgtgaggccgtccactgaccgggctcggtcgtgatcggcgcgaccgagccgtcatatcccatgctcaccacatcgaagctgcgggcgtcatggccgccgaacagagactcggcatccgaagcggcacccgagccggcccaggcgcgcggcacctcggtcgcgatttcgggcgcacgctgcaccacggccagcacatcctcgtcggtcacggcgagcaccgtgcgcacgttccagccagccggcgtgaacggtcggccgtccaccgtcagacggttggtatccgtggccatatcgttgagcgagcacaccagacgatcatccggcgtgtaggcgggcgtgccgtgaaccaagtcgatccactgctcgttcgcgtgctcctcaagcacacgcgtggcgcccagcgcggccccatccgccgcgaccgc

SEQ ID NO: 1900 - DNA, 5166 bp, Unknown
  MAG_14  MAG No. k141_76384
cgccgatttgccgtcggcaatggtccaaaaacgggccctataacgacgccaccgcggctcagcatcggcacatcgccatgtcgtggcccactgccgacgctggcctcatgccacggcactcagcgtcggtagagagacaaccattggcacagcgacgacaccacgaacctgcgacacggaaaaaacaacataccgtcgacctactgccgtcttgtgcaaaatgtcttaagccgctcggccaagtcgccgactgagcctcttccatagggaccccaatccgttacccagtgtagatgcggtgcaacgccgaactcaactacgttgcgcgcatgcacctttatgcatagcaggcatggctgggcgtttggcgggagcggttttcggctcccctctctgaggggagcccctttccgcctgacaagagaaaaccccgactgttcgtgggaacagtcggggttgttgaagttcgctaggcgactaatcagccgaggatggcgagaatgtcgcgcgcgccgacgatgaggtagtcctcaccctcgtagtggacttcggtgccgccgtacttggagtacagcaccttgtcgccgaccttgacatccatcgggatgcgctcgcccttgtcgtcacgacggcccgggccaacggccaggacttcaccctgctgcggcttctccttggcgttgtccggaatatacagaccggaagcggtctgggtctgggcctcggcctgcttgacgatgatcttgtcttccaacggtgtgagcttaatcgacactgtgggtcacctcgtatctacttgtagttcgataatgccgcgccagaacgcctcaagaggctgacgatcacttgcgttgtccctttgcgctaggacacatcgtagcgcgattattagcactctgccaactcgagtgctaacgctgtgagagaaaatcggcgaatcgcaacgctcagttgccgcggcgggcaagaatggagtccaggcctgcgcccaacgaatcggtggtcgccgctggcgcttcgacgtcggcacgctcctcggattcgtggaatgcggctcgctgggcggcgtttgcagcctcgtcatcggcgtccgtagcggcgttcgtatcggcatcatcgcgctgctccgactcagtgtctacagcgtttccggcactgacagccttgcccgcatcggcggccttggcatcgtccgcggccttgacggctcgggcctcgtcaatcaacttttccgccactgcgggttcgacaggttccgccttggacacctgacgggtcgacttgatctccaagctttccggagcgttgtcggcgttatgttccccgcccaaagtgaaggagatgagatcctgcgaggtggccatatcgaagacatccagtgctcgggcagggcgtacgctggccagttccgacgtagcgtcggcagcggcatcgtcgcgctcatcacgctcgtcacgcaccgtaagcgatggttcaactcgaggggcgacggacttatccgacttagtcgacttatccgtgcgagcggaggcatcgggcgcggcggaagattcactggtttcggcagcggacttacggtcagcggactcatcgaccatagcagacggttcggcggcaggcttatcggcggcggactgtgcagtatcagacttctcagactgtttggcgtgctccgccgcggcctgatatgcggcggcggactgacgcaacgacttggccttggcctgctcaatctcggcatcgcgtaacgcgcggcgaatctgccgctgttccatgacctcggtggcagcatcctcaacatgctcggaaagctccttggcaggcgcagttacggccgcaaccggttcggccttgttcacacgcttgctgtccttggactcggcagacggtttcttggaccagcccgtaccgctatgagtccgctcgtagcggaccaccttgcgctcccattgccgggcctggcgtgaggcattggctcccagcaccagcaccagcagtaacagcacgaacggaataagagcaagcagcgggctgaaatgcagggggaacgatacggcaaacaccaacacggttatggcaagcaggcatacggcgagaatctgccggcggcggatggccgcgcggcgcagttcccgcacatgggcgatgtgctcaggtgtcagcctcgctgacggtgttgatgctggcattgctgcccctttcgccttatgcggcttgatgtctccgaatcgtctgccgttctctgcatcaacgatatgcagggaaggcgaataacgatcctgccggtgctcgtccacacgtttcatgccgttggccgtacgtacgggcagccatacaacgataataatcgccacaatcaccagcacgacgacagtgctcagtgactcataacccatagagtcaaggataggagacgtaccgacgaactggggctttccgtccgggcgtgtcggagcggaattcttccggtcgacgcttatctggaaccggtggcggcgagtctggcagagaacccttgccccatatcttcagccaacagcgcaaatgttacgtggtcgcgccactggccattgacatacatataccgctcgcgcagtccctcatgatgggctccgaccttacgcactacagccaaagagcgcgcgttatccggaagaatggcgatttccagccgatgcaacgcgggcccgaatgggtctccgagtgcccaatcggcaagcatggccagtgccatcggcgcaaatccgtggccggcgtaccgttggtcaacccaatatccgaccacaccggtgcgcatggcaccatacgcgatggctcccaacgaaatctggccgacgatacgcatctggtattcgatggcgaaaatcacgccgacgccatgctgctcattacggcgctgtcgctgcacccattgattgaaggtgatggagccgccatgcatcgggtcgccggattcccaaggcgccagccagtcgttgttgcgccagcgcacttcgttccagccgtcctcatcgtccatggtcagggggcgcaggattatcgggaaaccgggatgggtgaggcgcggcggacggatctggtggtccagcttgaacgcctctttaatcgactggaaaactgacacggcctttattgtagccatatgaagggcttgcgccgctaccgtggccactttcgttttacggtggaaacactagattgtgcggtatgagcgaagcggacaatggcatgaatatcggcagcgaccacagcggcacggagaaaacagaaaagatggataaagcgacgctgcgccaccatatactgtctcggcgcaagcgcattccagcggaagaacgtggagcggccggtgaattgctggtgcgacggttcccggcacacatgattcaggatggttccacagtggcggcatatgtgtcgatgggttcggaaatcgaaacccggccactgttgcgatggctgttggctcatggctgccacgtgttggtgccacgattgggatctgggttggaaattggctggagtgtgctggattcattggaatccttgcgctcgatggatgcagtgggtggcgcgaacaatgccggtagctgcagctctcccagcaccgtccatcacagacccgatgagccaactggcgcagttctaccgcccgaagcgttggagaaggccgatctggtcatcgccccggctttggcagtggacccgcaaggcaatcgtctgggacgtggagccggctggtatgaccgggccttggctcgacgcaagcccgcgtgccccctgattgcggtgtgctggccgtgggaggtgttggacaccgatttgccggccgaaccacatgatgtgccggccgacggagtgctgacgccggggggataccggcggcttggcgaatcgggccggctgagttgaccggccggccaagatactcggcgcaagtcagactgaccaaccagccacgcacactggccgatggaaccagagtggcaaaagcaggctggctagtaagaccgtaacgccaatgtgtcagggcggcgactaggatatgaacggttgcacggcatggtgttgcacgccatgcgcgagaaatatgactttgttggaggaatccgttgcctacctatcattaccgttgcaagaactgcggctatgacttcaccgaacagcagtcgttcaatgacgacccgattaccgtgtgccccaagtgctcgcaggagcaggtgcgcaaggtgtattccgccgtgccgattgagttcaagggtcacggattctaccgcaccgacaaatccggcaagtaaggtcggctccccgtttttcctctgtaaacgacggtgtcgacggcggtatgccgcggatattggcactacgggcactgtctgttgcacgggtttgaagcgttgtggataacttggcaagctagaaccacataggtcgattcagcttgcgcttacgaaaaacttcaggtcaccatggttgcatggtgaccttttcgtttattaagccgcctgcgcgcggctcattgcggcgacggcgcatggcggatgccttgcgccgactcactgctgcgttgtgcgtgggactcgcagtgttgtttgggcttgaagccgtattggccgtggtggagaccgagccgatgatggtggccgctcgctcgattcgacggggtgacattattctggccgccgacgttcagttggctgatatgccggtatctgcgataggcccatcttgggcgtgcaatattgaggatgtggtgggcaaggtggcgcaaatcgatatcgaagcagccgatcccatttccacgcatatggccagagatgcgcccgtagcaccgaccggcactacggtgattgaagtccgcttggccagtagcgtcgacgatgtattggccggcgatcaggtgagactggtttccgccgtcggttgcgaaggtgccgattgcacgctggccgagaacgccacggtgatgaatgtcgacaaaccggatacgactggcgcattgggaagcaacgaccgactggtgtcgttcgcaatgccgccggaggccgcggccaaggttatggagctgcaacaggccggagcgattatggccgttgtgcggtaggaagcggaatcggccttcagccgatgttgtgttttccgcagccgtacggctgcggaaaacac

SEQ ID NO: 1901 - DNA, 11691 bp, Unknown
  MAG_14  MAG No. k141_77694
gccgcgctcggcctgctgacagcccggagggctttctgcaggccctgtgccgagctgcgacagcagcgaggccagcattgagcctcgccgaaaggcgagtccataattgcaggcccagggccgttggctctgtgtctgattgagattattgggtcgctcgcatcgcatcaaacaaaggtctcactggtgcccgcgccccacatccattgcgcggcgggcaggagttgcggcaatattcccttcagtgccaacaacgccatacggtcgttatccaccgcagccaccaacaccggcgtggcggcgctttcctcaacactcatgaactccgtcctagcgttcgaaatactgtgcctgaattcgtatacatttgtggacataatcacgattcatccagtaatgacggttaagttgagcatcatgaccatgaatgacatgaatccgtcgaacgattccgatacggctccggcgcaatcgctgtcagcgcaaccgttgccacctcgaccggcaccgcagtctgcggcacagtcacagacgccgatgccacagacgccacagtatgttcagcctgggccgagcatgcagccgcaatatgcgggtcagccggaggcatgggcacaaccgctacctccacaagatgtttcacggggtgttccacggattgtttcacaaggtgtttcacaacctgtgccgcaagccgcaatacctgctgtgcagcctgcacaatacgccgcgcagctcgtatacccgacatatcccgtccaacctacgtatcctgcccagccgatgtatcccacgcagccgacgtatccggcgcaatccgcctattccccatacccggcgcaacagtcggctccacagcccctcgctcatccgtactacgctcaaccagtgggctacgcgccacaaccctattccgctgcgccgcaaccattcgtgcaaacggctccggcaatgccagtcacaatgcccaacgcaatgcctgccacgatgcccgcagcaatgcccgtggtcatgccgatcgatcctcgccgtgtatggcgcacgtggcgtcgcaaggtggtcaatcgtgtaatgggactgactctcgcctatgaaggcatgatgctcttgggcgcaatggtcgccaccattatcgtcggcgtaataaccgcgagcgatttgtccggcgtgcagtgggatggcatcatcagcctgatatcggtgttcgtcgcgttcggatttctgctgctcatgcgccaccgtgacatcttcacctgcgaattctggcttggtggccagcatcgcgactcgtacggggagcccaatcagcttggccacatcagccaatatggcggcgggcgcatgcagcctctctgggcgttgatgttcatcgtgctgggcatgggtgtgcaaggcatcgttatgttggtgcaggtcgctttttccatgctgggcaccgatcttgcctctcccacgtcagacagcatcgccgaatccagcgtcaccgtaagcatgtggctgtacgttgggctggtcgctccgatttgcgaggaagtactgttccgcggcgtactgatgaaggagctcaagccgttgggcaagaacttcgccatcgtcacctcggcaatggtgttcggcctgttccatgacgacgtagtgcaaggcacattcgcgttcctctttggcctgattctgggattcgtggccatggaatactcgttggtttggtcgattgcactgcacatcttcaacaatgcgattctttccggcgccatcgatacccttgccggcaactatcttgatgacaacgcatatttgatattctcattgtcgctatctgtgatcggcgtgatcggatcgattatcatattcgtgatatacggcaaagagatgcgccaatatcaccgtacgaatcgtagtattccagacacgtactttggctgggcagctccgacgttcatcatctttgtggtagccaatgccgctttcgccattatttcgtttgtcggcgcgatgatgggttgagtgtgcgtgtgcgcatgcaggttggcttatcgttgaagcatgagtgattttgagccgttttacgatgtcagccgcagttacgaagacaactatgagcaagggccgttcggcacgttcgccgaggcgctgaaggatggcaacggtgccgatgccgccggaaccaccagcgagggtgccttggccacctttttgggccagccggtcaacctgcctttcggcattcccgcaggtccgctgctcaacagccgtttcaccacggccgctttccacatgggtttcgatctggcgacctacaaaaccgtgcgttcgcgcgcctggggctgcaacccgttcccgaacgtgctcgccgtacaccccaagtcggcggacggttcactgacgccgggcagcgccgaactggacgaaggcgtgctggccgacaccaactatgaacagccgatttccatctccaacagcttcggtgtgccctcgcagagccctgacgtctggcagccggacatgcgcgccgccatcgaggccgccggtcccggtcaagtgctggtcccgagcttccaaggctcgcgtgtggagggcatgagcgaggaggaatacatcgccgaccatgccactaccgcccgcctggtcaaggagaccggtgccaagctcatggtgatgaacaccagctgccccaacgagggccacaaccgcctgctatgccacaatccgctgctcgtgggccgcatcaccgaggccgtgaagcaggagatcggcgacatcccgctgatggtcaagctcgcctacatccccagcgacgacgctctggagcttatggtgcgttccaccgtgggccacggcaccgtgcagggcttcagcaccatcaatacgatttccgccaaactggtcgatgccaatggcaatcaggccctgcccggcgcgggccgcgatcgctcaggcgtgtgcggcaatgcgattcgtggcgccggcctcgacatggtcgcccgtctggccgcgattcgtgaaaagctcgggctcgatttcgcgatcaacggcgtcggcggcgtggtctcgcccgccgactaccaggcgtaccgtgacgccggcgcggactcggtgatgtccgccaccggcgcgatgtgggacgccgaactggcccacaagatcaaggctagccggtaaatcggctccaaaaacaagcaacagcctgtacgggccgtgattcccagacgattcccagacagtgcccatgttgcattgaaactgttgctgttatatgtaatcacggccgaacaagctgcataacttaacctctttcttcttctctcctttctctccccggcgcccatcacgccggggtttcttttttgcggtgggtacagccgtcttactcggccgccgccttcatggccacggcgccgacgtagtagaccggcttgtcgaagttcggctggaacaggaagtccacgttggcgagctggtcgatggtgaagccggcctgaatcgccatggaaatcacgtttgccgcgccggagatatcggccttggaacagaactggccgcccttgaccttgcgggtttccgggtcccaggtcagaatcgacgtgactggggtggtggtgagcatgaagtccgggcgataatcctcggtgagcgaggtctcgcggaccgtgagcccgcggcgttcggcaccggcgcgggtcaggccggaggcggcgagcgagagatcgtacagctgcacggcggacgtggcctgcgtgcccatgtacttcacggtcggcgtctcgatgttgcggcccaccagcaggccctggcgcaccgcgttggtggccagcggaatgtaatcgtgctggccggtggggttgtagaacacggtggcggagtcgccggcggcgtacacgcccggcgcggacgcctgcatgtagtcgtcgaccacgatcgcgccgttcggcagcatgtccaccttgcccttgagcaggtcggtgttcggcaggaagccgacggccagaatcgccatttcggccgtgtactcgcccttttcggtgaccacagtgacggtgtcgtcgtcattgtcgcggaactcgaccaccttctggccgagcgcgagcgtgacgccgtgctcctcgaacgcggccgccacctgatcggtgatggtcttatcgaaattattggccagcgggcgatcaaggccgtcgaccagcgtggtcttgacgccggtgacgctgaactgctcggcgatttccgcgccgatatagcccgacccgatcaccactgccgacttggcggttttcgccttttccttgatggcgatggcgtgatcccagttcttgcacagcagcacatgcgggctgtcgatgccggggatcggcgggatgaccgggcgtgagccggtggtcacgaccagtttgtcgaaagcgagggtctgttcggcggggtctccggcctcgtccagcgcgcggtaggtgagggttctggcgtcgaggtccacggacgtcacgtcggtgcgcatatgcatggtcgcaccggcttcggccagagcggcaggggaggagtagaacattttcttcgggtcggatacgtggtcgcccacccacagggcgatgccgcaggagaggaaggacagcgtaccgttgcgctcgaaaacatggacggtccaatcggggtgctcggcgagaatcgaggtggtggcgaacgtgccggcgtgcgtgcagccgatgacggcgactgtggtcatgaatgctcctttgcttgtggccatggcgtctgatgccattgccctgaatcgtagcgtagaagtatggagaacaccgtggcggcaaatgtgaggaagatcacgttatcggtttgattcgacggggggtatgggatccgttgtgcacggtgatcaaagttcggctggggtgcatttcacggagtcggcacatggcttatggcaaactggacggtagcattttttgaatcttgattgattgaggagagtggcgtggctgagaatccggatgacgtgttgcatgtcgagggcggcaagcctttgaatggcacgatcaaggtgcgtggcgcgaagaacttcgtgagcaaggcgatggtcgccgcgttgctggcaccgggcaagtcggtgctgaagaacgtgccggagattcgtgacgtgcatgtggtgtccgatttgctacgtctgcacggcgtggacgtggatgtggacggtgcgaacggcattgtgaccatcgacgcctcgcgtgtgcagctggccgatgtggccgacgtggatacactgtccggttcgtcgcgcatcccgatcctgttctccggcccgctcgtgcaccgtttgggtgaagcgttcattcccgcgttgggcggctgcgcgattggcggacgtccgattgacttccatctggagacgctgcgcaagctgggcgccacggtggacaaggaacacaaggacggcatccacatcaccgcgcccaacggcctgcacggcgcgaagatccacctgccctacccgtcggtgggcgccaccgagcagactttactggcggccgtgctggccgagggcaagaccgaactgtcgggcgcggccactgagccggagatcatggatctggtgtgcgtgctgcagaagatgggcgcaatcatttctgtggacgttgatcgcaccttccgcatcgagggtgtcaaggaactgcaggggtacacgcacacgtcgctgacggatcgcatcgaggcggcgtcctgggcgtccgccgcgctcgccacgcacggtgacattttcgtcaagggtgccacccagccggagatgatcacgttcctcaacgtgttccgcaaggtgggcggcaaattcgaggtgacggacaagggcattcgtttctggcatccgggcggggacttgaagcccgtggcgatcgagacggacgtgcatcccgggttcatgaccgactggcagcagccgctcgtggtggccctgacccaggccaacggcctgtcgatcgtgcacgagaccgtgtacgagaaccgtttcggcttcaccaagccgctggtcgagatgggtgccaccatccagttgtaccgcgagtgcctgggctcgctgccgtgccgtttccggcagcgcaactacaagcattccgccgtgatcttcggaccgaccccgctgaccggacgcgacatcgacgtgccggacctgcgtggtgggttcagccatctgatcgcggccttggccgcgtcaggcccctcggacgtgcacggcatcagcctgatcgaccgaggctacgccgacttccgcggcaaactcgaagcgttgggtgccgacttcgattaattcggccggtcctcggctcccctctctgaggggagccgcaattttgttctacaacagcccgtccgcctcaagtgcggcggccatgcggtcgaagcattcctccagtagcgggtagggcatggcgaagttcatgcgtacgcatccatgcccgacctcgccgcattcgcggccgtccgtcaacgccacgttggccttcttgaagaaatagtcggccgggtcatcgatgcccagtgacgagaaatccagccacgcgatatacgtgccctgcggctccacatagcgcaccttggcgaatctcgtgcgcatctgctcgttgaccagcgcgatattgcgctcgatatatgccatcacgccctcgaaccatgccgcgccgccgtcataggccgcagtggtggctatggcaccgatggtggccgtctggtgctcggaccattccgcgttcctcatccatagctccagatcgtccggattggtgagaatcacctgcgcgcacttggtgccgggaatattgaacgacttcgaggctgaagtggaggtgaaagcctgcatggccgtctgccggttgattgaggcgaatggcacatgcgtgtggccttggtagacgaacggcgcgtgaatctcatcggagaatatacgcacgtcgtacttggcggccaggtcggacaatcgcagcatttcttcgcgcgtcaataccttgccgatcgggttgtgcgggttgcacagcacgaaggcatggcagccgttcgcgaacgcctgctcaatggcgtcgaaatcgaacagccattcatcattgcgcccgctgctctcgccggcgcccgcgcacagcatcggaatctcaaggacctccacgccatacagacgcggcacacttaggaacggcatataggccggagtcggtaccacgatggagttgccggcgcgcacgatctcgcgcaggaacacttcgaacgcctccagcacgtccggcaccggacggatgcacgtcggatccacatcccagccgtatcgacgctgccatgcggcgcacgagcgggcgacctccttcttccacgggtcgggaatgtagccgagcgcgccacgttcggtggcctcttcgatggcttcggccacgcacggcgccagaccgtaatccatctcggcgatgaatgcgccgatgcagccggggtagcgggtccatttgtccgaaccgacctgctccagatcctcgatggtcgtcacgtcgatgtgattggcatcaaagcaagaggcgccggcggttgcgttgctcacagtcgttgactggggaatgttgttcatgctcataacatgccattgttcccggtgcagaagggccgctcaacggtctggctccccgaaatcgtgatggcgctcgcaagcttgcttatcgctgtgcgactacttggcactcaaatatttgagtgccgtgcgctcgagctcctcgagcaatgaaccgagcgcgggacgatggtcgccggcacgagtcacgatgccgacctcgcgcgccgcaaaatcgtcggcgatgggacaggccaccagatcgccttgcagattgatatgtgtatcgagcgccggcaccagcgagacgcccatgccaacctcgaccaggttctgcgtggcccagtaatcatccgtgcagtggcggatatccggcttgaatccggcacgggtggccagtttcaccaaatttgcgcggcaggtggggcagccggcgatccaatgctcgtctttggcggcggacagcggcacgggttcgccggtctcctcgaatcgtttggcgatgtcgctggagcggcggaccaacaatcgcatcggatcgtaacccagcgactggaaggtcagatcgtcgccgatgtgcaggaagttcgggatgctgctgtaccggaacacggcggcggcatcggccttgccttgggaaatcagaccgatcgcctccggcggctccatctgaatcaggctcagctcgatgtccgtgaacatactgagcttgaccacggtacgggccgcgatagtagagcagattgacggtggggccaccaaatgcaggtgagcaaaccgatgatgccgataatcctcgacctcacgggccgcccgctccagccgatcggcgatggcctcgccgtggcgggcgagcatcgaaccggtggcggtgagttccacaccatgcgaggtgcgttgcaccagagtcgaaccgcactgtgcctccagctttttgatctgctggctgatggccggctgcgaccaacccgtggccttggccgtggcggagaacgaaccatactgttcgatctgccacaacgtgaccaatgattgggggttgagcccggccatatgcacctctttcgcgcgtcgttccattatggccgccgacaatgaccggacgcggcatggtgtcgccatcgccggtatccttagaagaatgagccctgaagccttaagtgaactgatttccagcattgcccacaacctcgtcgccgccggccaggccggcgcgttgaccgacgagctgattccgcccgtcgacaagctcgccgtgatgcgcccgaaggaccgcgcgcatggcgactgggcctccaacatcgccatgcagctggccaagaaggccggcatgaagccgcgcgatctggccgagccgttcgccgccgcgctcgccgaagccgacggcatcgccaaggtcgaggtggcaggccccggcttcatcaacatcacgctcgactccgcctcggccgccgccgtggtggacaccgtactcgccgccggtgccgtgaccgacaccgacaagcatctcaacaaggtcaacgaatacggccgcaacgcccatctgggcggccagaccctgaatctcgagttcgtctccgccaaccccaccggtccgattcacatcggcggcactcgttgggctgccgtcggcgacgccatggcccgcgtgctcgaggccaacggcgccaaggtggtgcgcgaatactacttcaacgaccacggcgagcagatcaaccgcttcgccaagtcgctggttgccgcctgggccgaggccaataacttgggcgacgccggctaccagaccgaaaccccgtgcgacggctacaagggtgcctacatcaacgagatcgccgcccgtgttcaggccgaagccgagtccgacggcgtggacctgaccgcactggcccaccaggatcaaggcctgaacgacgacggcgaaccgctcggcgaagccgataccgaagtgcgcgaggaattccgcaagcgcgctgtaccgatgatgttcgacgagattcagaagtccatgaaggacttccgcgtgaacttcgacgtctggttccatgaaaacagcctgtacgccgacggcaaggtcgacgccgccatcgaagagctcaagtcccgcggcgacatcttcgacaaggacggcgccacttggtttgaatccaccaagcacggcgacgacaaggaccgtgtgatcatcaagtccaatggtgagttcgcctacttcgccgccgacatcgcctactactgggacaagcgccatcgcgccgaaaacccggctgacgtggccatctacatgcttggtgccgaccaccacggctacatcggccgcatgatggccatgtgcgcggccttcggcgacgagcccggcaagaacatgcagattctcatcggccagctggtcaacgtgatgaaggacggcaagcccgtgcgcatgtccaagcgcgccggcaacgtcgtgaccatcgacgacctggtctccgtggtcggcgtggatgccgcccgctactcgctggcccgctccgattacaaccagaacttcgacatcgacttggccctgctcgcctcgcacaccaacgacaacccggtgtactacgtgcagtacgcgcacgcccgctccaagaacgtggaccgcaacgcagccgttgccggcatcagctacgagggtgccgacttggccctgctcgacaccgaggccgacggcgaagtgctcgccgccctcgcccagttcccgagcgtgctcgccaccgcggccgacgaccgccagccgcacaaggtggcccgttacctcgaagaactggccgccacctatcacaagtggtacaacgtggagcgcgtggtgccgatggccctgactgatccggaaacccgtggcgacgacgaagctcgcaaggccttggagatcgccaagaacccggagccggcccgtgctgccgcccgcctgaagctcaatgacgccgtccagcaggtcatcgccaacggcctcgacctcctcggcgtcaccgcccccgaaaagatgtgattatgcccatttctccaatttggccggccgctacggctgtgaatgccgacggtgccattacattccacggtcgtaccgccgaatcgctgcttgacgagttcggctcgccgctctatctcatcgacactgatgaagtagtcgcacgtgccaggcacttcgtgcgcgctgccgccgaagcattcgacacctccactacgcacgtgagctttgccggcaaggcgttcctgtccaaagaagtcgtgcgattggtcaccgaggccggcatgtttgtggacacttgcacgatgggcgagatgaaaatcgccctcgccgctggcgttcccggacgtcgtctggtactgcacggcaacaacaagtccgatgaggaaatcgcgctggccatcgaacagggcttcgccaaaatcgtgatcgacgagcccgacgagccggagcgcgtcgccgccatcgcccgcaggctcggcaaacgcgcccgtgtgatgctgcgcgtcaccgtcggtgtccacgccggcggccacgagtacatctccactgctcacgaggaccagaagttcggcgtgccgctgctggccgccggggccgacgccgctgtgctcgacgtgctgaacgccctcaaagacgtgacgcctgccgctaccaacgcgcgtatttctgcgacgcattccccggaaaatggcgcggaaaagaccgagaaatcagagcgcgagctgcactacgacgtcaagtacccgtacgacctgagccacgaggaagtctccgacacagacaaggcgctggccgccgcgatggaagccattgcggacggtccgtccatcgccgtgctcaagaccatcctcgccgaccaggacgtactcgaactggtcggagcccactcgcacatcggctccaacatccacgatgcggacgccttcattcacgcggccaagcgcatgatgctgctgcgcaagaccctgtgggccaccgacgcctacatcctgcccgaaatcgacctcggcggcggctactccgtggcctacaccgatggcgaagattcaatggacattgacgtggaactcactcgcttggcggatgcggtcaacagcaccaaccgtgcgctcggcatgcccgccccggccatcagcttcgagcc

SEQ ID NO: 1902 - DNA, 5266 bp, Unknown
  MAG_14  MAG No. k141_77739
cataacgaccgcactgccatgggtttgtacgacgcgcttcgcgagcgaggcttgcgtgtgcccgacgatttgtcgattgtcggattcgataaccaggaggtcatttccgcacacctgcatcctgcactcacgacggtcggactgccgcaatatgaccttggtgtattaggcgtacgctcgttgctgacgctgaataagacgcccgacgccgactacgacagcagcgaaaccgatcgcatcgaagatagcaaaacgcaccgcttcgagccattgctggtgggctgtccttcagtgatgcgcgattctatccgcgcctatcgcgggtagtcggcagcgcgagacacgcgccattcctagaggtgtgcgtcatggcttgacaggtatagtttgaatgtttatcatattgcttaatcgcttaaatgcttaagcgattaaatcaaatcaggacaatacaataaagcatgtttctaatgcgcggagctgcgcagtagaaacagccaggataccgttcgccgcgaaactgcacacaagtccggtagcccgaccacagagcaattggcgagcggtcgtcaaccgaccatataggagtgataatcatgccaaagctgtactaccaattccctggcacgtggttcggcgattgcatgccgttcggcaagggcaacgagttctttctgtatcaccagcgagacaatcgcaatccggaaccattcggcgaaccgttcggctgggatctggccacaacctctgatttcgtgcattacaaggattgcggtgtagccgtgccgcgcggcagggacgacgagcaggatcagttcatattcgcgggatcggtgtttgaaggggaagggcaataccatatcttctacaccgggtacaaccgcgattacccccagcgggacaagccggcgcaggtgctgatgcacgcagtcagcgatgatttgtaccactggacgaaaacccagaacgccatcaccttcactccgcaagaaggctacgatccagacgattggcgcgacccgtgggtcattcgcgacgacgaacatgaccagtatctgctaatccttggagcccgtaagatcggcccgaaaacgcagcagaccggccgcacggtgaagttcacgtctaaagacctcaagaactggacgttcgaaggtgacttctgggctccgaacctatacacgatgcatgagatgcctgatctgttcaagatgggcgagtggtggtatcacatcgttacggaatacagcgatcggcacaagatggtgtatcgcatggccaagagtctagaaggcccgtggatcgcacccgatgatgacgcgtttgacggcagcgcctattatgccggacggaccttcgaactaggtggacggcgaatcctcttcggctgggttgccaccaaggaagactgcgatgacgtaaagaacttcgaatgggctggcaccttcgtccctcacgaggtctaccagcgtaccgacggcacacttggcgtgcgcattcccgacacggtctgggatgcgttcaacgaacgcgagcaaatcgtgacgaatgcggtaatcgacggtactgacgctcgccgtaacgccgtgctggccgagggctgcggagacctgtattcgtttgaagcggacgtcatgttcagcgagggaacgcgatccttcggtctccgcgtctaccgcgatgaggcaagcgagcgtggctatcagttcatcttcccgattggtgagcatcgctacgtattcgaaggcagcccgaacttcccgtggttcaactgtatgaatatcgggctagagcggccaatcgaactggttgccgggcgtgaatatcacattcagctcatcgtggacgacaccatcgccactctgtacgtcaatggcgtcgcactcaacgcgcgtatgtaccagcacccaggcgacgcattaagcatgttcgtcaccgacggcacgctcaccgtcacgaatgcgaccatcagtcgtggactcaaggaggtgtgagccacagtcaccaccgtatgtttgcgaaccgatacgttcgcctgtgtttcatccgtacaccttatgaacgccgcggggcgaaacgggcggcgggcctccaacctacgcgcggccagcgggcacgacttgtgcaatgacgatgtccgctcccccgccctgtattgcaacaacaacgaagttatggcattccataggagggaaaccatgaagaagattatcaaagcaacggccgcaatggcagcggcaggtctgtctctggggttgatcgccgggtgcggttccggcgactccaatgcagataagggtcatgtctacttcctgagcatgaaagtagagcaggctgatcagattcgtgagcttgcagataatttcaccgcagagaccggcatcgaagtagatgtcgccacagcatcgtctggcacatacgaacagacgctgaagagcgagctcgccaaatccggagcgccaaccgtgttcgatgtggacaacaacgacttcctcaattggaccgattactacgcagacatgtccgatacgaacatgtacaaggacctcacccagcaggactacgccatgaagaatggcgatgaaattggcgctgtgccttacgtgatggagcggtacggcatcatctacaacaaggccttgctgcagaagtattttgatgccaactggtcaagcgtgaaggacgttgagacgatcaacaacttcgatacgctgaggaccgtggctgacgagattcaggcgcataaagatgacctcggtatcaagggcgcgtttacgtcagcgggcttcgatacgagttcgatcaatcggttcggcgatcagctcgcccacgtgccggtgtattacgagtatcgcgatcaaggcgtgacgcaacttccggccacaatctccgacacatacattccgaatttcaagaagatcttcgacctgtatatcactgattcgaccacgccggccagccagctttcgagcgccaccatggatgacgccaattcggaattcgcgcttggcgaggccgtgttcctgcagaacggcacgtggggttactcgcagatcaaggatcagaacgtacctgacgaggacatgggcgtgctgccgatttatattggcactgaaggcgaggagaaggccggcctgacagtcagcttcctgtacgttgcgatgaacaaggacgcttccgaaaaggatcagcaggcgacccgtcagttcttggactacatcctgcaaaacgatgatgcacgcaagttggtcaccgacgagatgggattcgagacaccgttcaagtcatatgcagaaaacggatacaagaccacgaatccaattcatcgcgccaacgacgcctacgcagtcaagggcaattacgatatcgtgatctatcctttgccgagcacacaatgggtgatgagtctcggcaatgcgatgctcgagtacgcacagggcaccggcgactgggatacggtcgcgtctgccttcgtggatggttgggcgtcggaatacaagaccacgcactgattcgaagcgaccggcattgaagtggtaatcgggatttagcgtcctgattatcactcgggaatacgccgcttagcatgctggtgtgctcgtgagcacgttgcttacgagcacaccagcatattccgtattggggtatgggttaccgccgctgcgcaccgtgacttgcaagtcctctcagtgacggaaattctagaggaaaatggctacgtcgagaatttacgtcactgagagcccgccagcgcacgaaattctcgcgcaatgggattattccgagaatttgcgtcgctaagaacccagagcatccgattattgcggttctttgcgctcagcagccaccagcgcaataggcagctagcgttctgcgtcagcagttcgttgacaaattcgctacccctcagccccgcttcgcgggccagctctcctgacaaggagagccggaaacgatatcaacgaactactggcgcaggacgcgccggtatccgaacagaacgtcagagcccgcgcagcagcggctcggcgatggcctggaccacggattcgggcatgtgggaatcgtcgaactcgtggccgggatagctgctcttggtgctttccagcgtatgcagcgcattgagcgcacgagcgccgtcagccttgatgagccggtaggcacgttccttggccagatagtcgatctgtgcgttgtacagcacagtgaacgcatcctcaatcgccggatcgtcggcgtaccgcagtccgttcgtcgcgtgaatcgacacggcctgcgtgaccggcgcatccgcaaccgtgacggacaggctcagcgcctcggtgtcgtacgacacatccggcacgacctcagcgccaccaaccgtcacaatcaactcgtcaacggcgaccggtgccacaccggtgaacgtcaccgtccacgtgcgctgctgcggcaccgccgccacattgccggccaccggggcaatctcgaacgcgttcaccgcaccatcggcctcccagcggaagtccatatgcgtcaccgcgagcgcggaatccgacggctgcgcctggttggtgccatcgtcctccttgaggtcgaacgtgccgttcgcgcccgggaacacggcaacttccagatagcgcggattatccacggagttgaggctgccgttgagctcctcgtccagcggctgcaacggcacgatgccgccggccttcgcgaagaccggaatgccatcgagcccacgccacgcctcgaacttgcggccttcggcagagcccgcctcgtaccgccgtccggtgaagaagtcgaaccatgtaccctgcggcagccacacgtcggttttcgccagctgcgcgttgcggtcggacggcgtcacgatcggcgcgacgatcagctcggtgccgaagcggaactcatgctccaccccgtacgcggtgacattttccggcgactgccagtacatcggctcgaccagcggacggccctcggcggcggcacgccagttcatcgtatacagatacggcagcagttcgtggcgcagacgcagcgcgtcatccatcgagcattccgtctcgggacggaagttccacggttccttgccgttaaacggcgaatcggtcgaatgcagacggttgatcgggctgaacgcgccaagctgataccagcgggcctccagctcctcgtcgcggtagccgaacatgtggccgccgatatcatgactccaccagccgtagccgatgttcgacgcagtagccgtgaagtacggctggaacttcagcga

SEQ ID NO: 1903 - DNA, 3515 bp, Unknown
  MAG_14  MAG No. k141_77934
cgtcaaggatctttatcgatcctcgttggtagcggggcatggatttgaaccatggacctctgggttatgagcccagcgagctaccgagctgctccaccccgcgtcggcttgtctctcagacagctctatctacaataggtgcagattccagaaagtcaacatcggcgtgtcgtgtcattttcccacggttttaaaacgtgaatcggctcacgcagcgaggggtttggggcggagccggagtcggggtgataacgcgccataaatggccgttataggaatgccctgaaccgttatcccgaatattgacataataggaacatgcctatcaagatccccagtggcctgccggccagagatatcctcgattcggagcgcatcttcgctctggagaagcccgaggcggagcgtcagcgcgtccgcccgctcaaactggtggtcctgaacttgatgcctaagaaaatcgagactgaaacgcagctgctgcgtctgatttccaagtcgccgctgcaggtcgaaatcgacttcatgaagacctccacgcatgaggccacgcacgtttccgccgatcatctcgtcaagttctacgaaaacctcgatgcgttcaaggacaactattacgacggttttgtggtcaccggcgcgcctgtagaacatatgccgttcgaagatgtggactactgggacgagttcaagacgattctcgactgggcctccacccatgtgttctccaccatgtacctgtgctggggtgcgatgggcgcactgtactaccgctacggcatccacaaggtggattaccccgagaagattttcggcgtattcccgcagtacctgcaggacgaatactgcttcctgaccaatggcttcgacgagattgatctgcagccgcactcccgcctcgccggcgtgaacgaaaacgaggtacgtgccaaccatgaccttcagatcttgacttgggggccgcagtccggcccgggcctaatcgccacacgtgacttctccgaagtgttcgcgctcggccattgggagtacggcaagtacacgctcgccgaggaatacgagcgcgatatggccaagggcatgaccaacgtgcccttcccgaagaactacttcccgcatgacgatccgaagctggaaccgttgttcgtctggcgtgcccacgccaatctgctgtggcgcaactggctcaactgggtgtaccagaccacgccgtacgacctgaccgaggtgccgcagctcagggctgagaagaagctgggtaccgaccgttcgattcggcatgagccgggcgggccacgtgaggatgacttcaagccgtttgttcatgacggatacggggttattcagggctgagcgttcgcaccgtggacggcaatccgtccacgatacggacaacctgatgaacataatgccacacatccgccatatgcgaccaatagcgcgcgaagccggcgaaacgcccgggaaagccttgcgccagtaggcctcggaaaagactcgccggtgtaatattgactttgtctagacgcaggcaaataatcactcttcagtcattcggagccgaatgcccagcgcagactccgtgtccacgcccggcaggctccacaccgaggagacgaaaaagacgaaagtaacgagcacgtcacatttgcctgcccggtgggtttaaactgacacctgacattgaaaaagcaggaggcgtgatatggtcggttcgctcggcgcaggattgctgttggctgacgaggcaggcgctcatctgccctcggttggtgacttccttcccccggagattctgttccagggaactccgtttgctatcaaccgcattattttgattcgtatcgtggcaaccatcgtgctgttggtggtgctcggcgtgaccgcaaagcgcgccaagctcatccccggccgttggcagggcgtggtggaatacggtcttgacttcgtgcgtgacaaggtcgtctatgacgtgatgggcgaggttcgcggcaagcgctacgtgccgatgatcaccaccatcttcttcacgattttcatcttcaacctgtgtggcatcatcccgggtatgaacatggcggccaccgccactgtggtcatgccgctggtgttcgccatctggaccatggtccagtattggatcgccgccgcacgttcgcaaggtcttggccattatctgcgtcacgagctgttcacccccggtgtgccgtggccggtctacatcctgttgaccccgattaacatccttgagttgctggtcatccgtccggcctccctgaccatccgtctgttcgccaacatgatttccggccacctgatggtcgccacctgcctggcattcgcacagtactggatcgtcgatgcagccaacaagctgcaaggcatcccagtcggcgcgatgtggttcgtcagcggtcttgccatgacgtgcttcgaggcgttcgtcgccttcctgcaggcttacgtcttcgccattctttccaccgtgtacatcaacctaagcttcccggaggagtgaggttcaaccccctctttcggaacccggcctcgcctaggtaggcaggaccgaacgaaataagatttataacgtcgccaagtacgttagaaaggaaacacaatggatatcatcaccctcgcagcggtcgccggcaacctgtccgtcatcggttacggtctcggtgcggttggccctggcatcggtctgggcatcctcttcggcaaggccatggaatccaccgctcgtcagcctgagatgtccggcaagattcagaccatcatgttcatcggcctggctctgatcgaggtgctggcactgatcggcttcgttaccgccctgatgttccactgatcgaacgttttctcagtcgaatacagaaggcaaaacgaatccaccagtgaaaggaggacttcataatgacgctcgcagaaggcggaattgatctgttcattcccgaggtctatgacatcgtatggtcgctgatcatcctcgtcatcgtcgctgtgttcttctacaagttcttcatgccgaagttcaatgcgatcttcgacgagcgcgccgccaagattcagggcaacatcgccaaggcggagcaggctaagaaggacgccgacgaggccaaggccaagtatgaggcccagctgagcaccgcccgtgtggacgccgccaagattcgcgacgacgcccgcgcagaagcgtcccacatcatcgccgacgctcgttcccgcgccgagtccgatgcggcccagatcaccgcatccgcacagcgctcgatcgaatctcagcaccagcaggccatcgtctcgctcaagggcgaggtcggcgcacttgccaccgccttggccggcaagatcctcggtgccaagctggaagacagcgacgtgcagtcctcgatgatcgattcgatgatcgacgacctgggcgccaagaagtgaccgtgaccatccgtaaccagaaagggaggtgaccatgcgaggagaggcatcacgtattgcagaccgcgagtcgcgtgattcgc

SEQ ID NO: 1904 - DNA, 6906 bp, Unknown
  MAG_14  MAG No. k141_78772
tccttgctgccatcggcggtggccacggtgaagtgcacggaagcgccgtgggattcgccgatccagttgcgctgcatgagcttgaccttctcaggccagttgatgccgtcaaggtcggcgatgaggcggtggccgtacttggtgatgcgcatggaccactggcgtagctcacgctggaagaccgggaagttgccacgctcggacttgccttcggcggtgacctcctcgttggccagcacggtgcccagacccgggcaccagttgaccggggacttggagatgtaggccaggcggaagtcgttcaagatatcctgctgctcggcgtcagtgaggtcggaccactgcttgccatcggactcgtggcccggaatggccttttcgccggattcgaacttggccacgagctcggcgatcgggcgtgcggagcccttggagccggacgggttggtggcgtcctcgtcgtaccaggaatcgtagatgcgcgagaagatccattgggtccaacgcacgtagccggggtcgatggtggcgaacgtgcggcggttgtcgaagctcaggcccatgcggtgcagctggcggctcatgttggcgatgttcgcctcggtggtcacgcgaggatgctggccggtctggactgcgtactgttccgcgggcaggccgaaggcgtcatagcccatggcgtgcaggacgttctcgcccttcatgcggtggtagcggctcgtcacgtcggaggccaggtagcccagcgggtggccgacgtgcaggcccttgccggaggggtacgggaacatgtccatggcgaagtaggcggcgcggccttcggcgttgcggcccttgccgtccttcaaatcgccgttgacgttggccgcccagaaggtgccttgctcatcccagatcttctgccacttgttttcgatgtcctgcgccagtgcggcgttgtagcggaagttgggctcttcggtttgcgtgctcttctcgttgtcactcataaatcagcaaggtagcctcgcaactggacacgtcgtcaatcgttattcagcatccgagacgatggctttggggtcaccgttcagcgaaaccatgagctttgtttggcttgtgaacgtatccttggcggccgtccagctgccatcctcaaccatgtcttccaatgcttccgcgattttctgcgccaattggctggtgccttgactcacggcgatgccataactgacctcgcccttgtccgcaatcacgtccatatactggggcccgttggccgcttgaagaccggaaagcaccgccatatcggaggctatggcatccgccgaccctacttgcacggccgtgacgcactgcgcataactgctacgctcctgaatccgagcctgcgggtggttgccgcggaagatgccgactgtctcgtcacctttcactgcgcacaccgtgccgtcgcctacgtcgcccaccgaacctgcgtcattggtgaatcggccacgctcatccgacctgaccagcaaaccgacgctggtcgtgaggtatggtccggcaaaatcaacgatcgcgctggacccatcggtgataggccaagaggcgacgaccatgtcgacctgtccattgtccagcatggagcgccggttttcggggcgaacctgcttgaagacgatctgcttgttcgcatagccgagtttggcggccacgtatttggcgatggtgatgtcgaagccctggtatgtgccgtcatgccatgctcccaccgatggttcgtcggctgcgaccccaatggcgatggtgggtccctccggcgctccggagacggtggtgacttgaatttggccgcaaccggccagaccagataatgacaatatcacgccaaaggccgcggcgaatcctgccatcagtcgggagcgaaatccgcgccgcatcgggcggcgggcgcggagcatgctacggctgacgaacgatgaccagtggtgcataaccgtcaaacgccttacttgaacatgcgcgaacgtgtgaggaaccaggcaaccacaccggaaagcaccatggagatcacgatgatgagcaggaagccccaaggcttgtcggtgaacggcatgcccatcatgccgccgtcgaagttcatgccgtacatcgagaagatcagcgtcgggatggacagggtgatggagatgatggtgaagatgcgcatcacgttgttcaggttgttggacacgatcgaggcgaaggcgtcggtcatgttcgcaagaacgccgctgtagatgttggccatctcgatggcctgcttgttttcggtgatgacgtcgtcgagcagatcctcatcgtccggatactgcttgatgcgctgcagggtggtgagtttctccatcacgatctcgttcgatttcagcgatgtggtgaagtacaccaaggtcttgctcagttccatgagcatcacgatctcgcggttctgcatggagtggcgcagcttcagttcaagcttgtcgctttcgcggtcgatgatgcgcaggtaacgcaggtacatcgtggcgttgcggtacaggatctgcaggatgaagcgcgaacgcatgaaggtgttgaagcctcggatcgtgccttccatgaatgggtggagcacgggcgtgtcctgcatgcagacggtgatgatgaggttttcggtgacgatgatcgacagcgggatggtctcgtaccagtcgcgtccgccacgctcctccacggtggggatgtcgacgatgatcatcgtgtaatcgtcttcgacgtccacacgtgaacgttcctcgtcatccaaaggggcgcgcaggtcggccaagtcgatgccggtctgtgatgcgacggtggcgagctccacatcagtgggttcgctcaaacataaccaggagccgttttccggtttctcgatctgctccacctggccattgattgagctgaagattctcagcatgtcgcctcacccgccttccgcgctttcctactgttctatcgctgtacggttccaaaccgagattagtctagacccaccgttcgaatttgcgagcggggtttcgcatagcgaccgtcaccagacgattggctgccaactcggcatgtgcggtcctcgcagatcggtcggcccgttctcccagtcggcgctgtcggcgatggcgggagccttgttgtattcctccaactcccacaggggctgttcggtgggggtgccgttgacgctgtggcgcactttgagccggcaccagcaggcgttgcgcatgccgccgagtgcgttcatgccgtccgggtcgagttcgagcaggttggagatggtggcggtaatccatgagccatgggtgacgagcatcagcgtggtgggcatgctgtctgaataggcggagtcggtgaccagtgcgcgcacggcatcggcacctcgctggcccacggcggcacggctttccacaccatgcttggtttcgcccccagtgtgctgtttccaagaggcgtagtcgtcggctgccacggctttgatttcggcgcgggtcatgccttcccactcgccgaagctgcgttcacgcagtcgttggtcacaggtgaccggcaatcccaaaatatcggcgaaggcgtgtgcggtctgttgggcacggaacaggtcggaggtcatcaccaccatgcgccggccggcggcgggagcctcctcgaactgtcgcgtatcagtgcgttcggcggcgtcaggaccgggctgggcgatggcttcgggatgctcggcaagtcggttcaccttggcccagtaataccgtgaagcgagcgcgaatccggtctggtcgacctgccattggcctacgatgtcgagcggcacatcgatctggccttgcaagcgatgttcgagattgtattgcgtacggccatgacgcagcatcatcacttcatcgatcatcggttttcgccacctcgttctcttgcggtttgccatactcatctcagcacaacccctagaatggcggcatggagatttctgagtcgatctgggcgttcatcgccaaacaccgccgtgaagatgtgcgtgatgtggccttgcacgccaaacatgatggcgacgtggatgtgccgttcgcgctggagcagattgccggctggcagcgcgcttcactcaagctacctgactgggcgtcccatgatgggctgattttcccgccgcaagtcccaatggaacaatgttccagccagttcacggctcaatacaaagcccggttagcacagcgattgttggacggggaagcagtcgacgacgccgacgattccccgacatccctagtcgatctgaccggcggtttcggcgtcgacttttcttacatgtcccgagtgtttgaccatgccatatatgtggaacaacaatccattttatgtggtatcgctcgccataatttcccgatactcggccttggccacgccgaaatcatcaatgatgattcaacagcagtgcttgatacgcttggccgagcctccatgatcttcctcgatccggcccgccgtgacgatcatggctcgcgtacctacgcgattgccgattgcacgccggatgtgctgaccctgaaggatacgctgctggccaaggcaccgacggtcatggtcaagctctcccccatgctcgactggcataagaccgtcgccgatttcgccggcgcggtgcatgaggtgcatatcgtctccaccgggaatgaatgcaaggaattgttgttggtgttggggcgcggccgttgcgcctcaccgctcgtggtatgcgtcaatgacgggcaggtgctgtcgtacaaggccggcgataacagcgacaatcacacccctatcagcgattctgccttagttgcatgcaatacctgtaataccgaggatttcccggctgaggaaagcgcgaacggcttcgattcctcgcattggaagtacctttacgaacccaacgcctcaatcatgaaggccgggtgctttgatgttctcgaacagcgcttcgccgtgcatcacatcagcccgaatagccacctgttcgtggcggccgaacctatttccgattttccaggcagatcattcgtcatcgaatccatcgccaccatgaacaagagagaactgaagcagctattggccggtctcacgcacgccaacatctccgtacgcaatttccccctaaccgtggcccagctacgcaaaaaactcaaactcaaggacggcggcaacacctacctcttcgccacaaccgacgcccaaggccgtcacctagtactgcgcactgaaaagcgaaaaagtggctccctctgacgaggaagccaccaatacgtcagctaatcagtccttggcgatggtcttgccggcggtcggaccggaggcaaggttctggatttcggtgacttcgagaaccggaatcacggccggcttcttggtgcccttttcctcggcgatcttgacctgctcgttgtagatgtcgtcgtcaacgtgcagcaccacgttgccgcggaagcggtagccctgcttcttctcgaggttggcgaaggcgatgaccagcggagagccgttcttgaggttctcgtagtgctggccggcggtgcgctcgtggtaggcgatgtgcgtgtcgtccagcacgaacagggacatcttcgggccgaggtccagttcgccgtccttggagacggtggtgatccaaccgaggttgttcttgatgaattccttgatttccggagtaatgactgccatgtcgaatcctttcatgattgctatggacaacgtatttttactctttccagagtaccggtttcgagcgcgactagcccggatgttcgctgtgagtaacctcaccttcgcacagctttcatccggttcttacctgcttggcgatgccgcgccccggccgcgcaccagccacacacctgtcacacacccgacgcccatcgaccggtcgattttggccggtagttcccgtaatctgtgagccgagagagccacaagttttcctaactgtcctgaggtgcaccatgggtttggtcgaacgtttcagcaagctgcgcagccgctggtcccgcagctttcccccgaatctcgcccgactcatgttgctgggctgcgccgcattatggggtggcagttatctgctcgccaaattcgccatggaggcgattccgccccaatggctgatgggtctgcgcatgataggcgcctgcctgtgcatgctggccttgttccataagcacatcgtgccgtatctgacgccgaagatcattgtgccggcgctcgtggtgggtctgacctactggggcacgatggtcacccagaccatcggcctgcagaccattgaaccgggccgcagcgcgttcctgacggccgcctactgcgtactcaccccattcgccacgtggatcatttcgaaaacccgcccgaaggccatcaatctggtcgccggcgtgatctgtctgatcggcgtcggcttcgtctcgctgaagccgggcggttcgctgtctctgagcgccggcgactggctgaccatcgcaaccgccgtcatcttctcgttcaatctgacctgccttggtgtctacaccaaacgcttcgaccctatcgccgtcacttttgtgcagttcggcgttgccggcgtattgttcatcatcggcgcgttgttcaccgaacccatgccgaacgccagctggctggcaccctcagtagtggccagcgtgctctatctgttcctcggcgccacgatgagtgcccagatcatgcagaacatcggtctggctcacgtgcctgcctcgcaggcgtcaatcatcatgtgtacggaaagtctgttcgccgtcacgttctccgcgctgttctggggcgagacaatcatgtggagttcgctggtgggttttgcgctgatcttcgtcgccgtgctgatgtcggtaatcaagccgaccaaacagtcgctgcaccggaactgacgattca

SEQ ID NO: 1905 - DNA, 8454 bp, Unknown
  MAG_14  MAG No. k141_79115
atgatgcactgtgcatccagattcgatacatctgcggtgctcagagacttgcttccccatttaaggccattctgattcagaatgtcaccgtaacggttcagctccatgtccttgttatggtcgataaaatcatatatatcatcgataaaatgatgcaccatatcagagtagcttacatatggcatctgaattggatgttcgagcgttccatcgttttcacggtcaataacccaagagccaaaactatctccgtcaaggatacatacatatttgaccagactatcatatttactcattacttttgaggcttctgctgttttcgtgggttagattgcgggttgtgggagtcggacgtcgagtccgccgcaacggagcatgacgagtgctatgaggttggtgacgtggtggaagccgtaggccatgcggatggtgaccttgatgcggttgtcggacgcctcgagcctggcgttggagtagccgagttggatggtcctgaggatgtccgggcgccgtctcctgatcctcctcgcgagttcgactatctcggggatacggttgtgggacgcccagaacacccaatggttcaattccgtcttggcttggtcgctcatcagccacgcgcactcggactcgaagtcgcgcgtgaaccggctgcccggttccgcccacggcacggacgcgaccacgaccccgcacccgggacagtccacgcgcggcatcatggcgaccagttcgacccgccagcagccgaaatcccgatgacgccaacgacgcacgccgccaccttggtcgtaaccatgacgacgtctgccacagcggtgagcatcggagcatgcccctgcgcgggcgcacacgaacctcgagcacgggctcggggcgcaggggcgaatcgacgatccgcacggtctcgaccaccacgcctttgacgttgaggagctggttgaatatgctgttcatcaggcgctttgcggttgtttgtttatcttggtcgaaaacatcctacccggaaagcgctctccacttactccctcaacggctcaacgacgaaccaccacccacaaaaacagcaatagcgccttatagtacgtatcgataaatatttcccgcccagaccacacggtatggtggagcgcatggctgattacgggaacaactttgtgcaactgcataaccacacgcactattcgctgctcgatggtgcgtcgaagatccctgatttggccaagcgtgcggccgaacttggcatgcctgcggtcggcatcaccgaccatggcaacatgcatggcgcctacgagatgtacaccaactgcgtggccaatggcgtcaagcccatcatcggcatcgaagcttacgtgaccccggaaaccgcacgtcaagacaaatcccgtgtgcactggggcactgaagcccagcgccgtgacgacgtctccggtggtggtcttatcacccacttgaccatgtgggccgaaaacgacgaaggcctggtcaacctcatcaaagcctcgtccgtggccaacctcgaaggtcgcgtcatgcgctacccgcgtatggataaggaggtgctcgccacctattccaaaggcgtgatcgcctcctccggatgcccttcgggcatcatccagactcgtctgcgcctcggtcaattcgaggaggccctgcgcgccgccggcgaattccaggacatcttcggcaaagacaacttcttcatcgaactcatggatcacggtctgcccatcgaaactcaggtgaccggtgacctgctgaccatagccaagaaactcaacgcaccactgctggccactaacgattcccactacgtacacgccgaagatgcccaggcacaggacgccatgctctgcatcaactccggttcccgtcttgacgatccggaccgattcaaattcgacggcaccggctactacatcaaaaccgccgaagagatgcgcgaactgttcaaggaccatccggacgcctgcgacaacaccctcgccatcgccgaacgctgcaacgtgatgttcgacgaccacgaagacggcgcgttcatgccgaaattcccctgccccgaaggctgggatgagacctccctgttccttaaaaaagtcgaggaaggtctggagaagcgttacgacggcaacccgccgctcgacgtattgaagcaggccgactacgaatgtggtgtgatctgccagatgcagttctgcggatacttcctcgtggtcgccgactacattcagtgggccaaggaccacggcattatggtgggtccgggccgtggctcggccgcaggcgccatggtcgcctattcgatgggcattaccgagctcgatccgctcaagcatggcctgattttcgagaggttcctgaaccctgagcgagtgagccttcctgatatcgatgtcgacttcgaccctgaaggtcgtgcgcgagtcatcgaatactgcggcgaaaaatacggcaccgataaggtcgcccagtgcgtgatctatggcaccatcaaaaccaagcaggccttgaaggactccgcccgcatcatgggctacgagttctcggtcggtgaaaaagtcaccaaggcgctgcctcccgcggccaccggcggcaaggatatcagcctgcatgacatcttcgacccgacagccaaacgctacgccgaggccagggaattccgagaactctacgattccgacccggacgccaagcgcatcaccgaagaagccaagggtatcgaaggcctgatccgacagaccggtgtacatgcctgcgccaccatcatgggtagcgcgcccatcaccgacacctcgccgttgctggaacgcaccgatggcaccatcaccaccaccttcgaataccacacgtgcgaaacgttggggttggtcaagatggacttccttggcctgtccaacttgacgatcatccacgacaccctgaagaacatcgaggccaacggcaaacccgccatcgactacaccaagattccgctcgatgacgccgaaacctacaaactcatgtcccgaggagacacgctcggcgtgttccagctcgattccgacggcatgcgttcactgctgaaaaccctgaagcccgataacttcaacgatatttccgcacttatcgctctgtaccgaccgggcccgatgagtatggattcgcacaccaactacgccaagcgcaagaatggcctgcagaagatcacgccaatccaccctgagcttgaggagcctctgaagcaggtgcttgacgagacctatggtctgatcatctaccaggagcaggtgcagtccgccgcccgaatcctcgccggctattcgctgggcaaggcagacgtgctgcgtcgagccatgggtaagaagaagcccgaagtgctggccaaggagaaggtgccgttcttcgccggtatgaaggagcatggatactccgaagaggcctcccaggccgtgtgggatattctggtgccgttctccggctacgctttcaacaaagcgcactccgccgcatacggtctgatctcctactggaccgcatatctgaagacgcactacccggtcgaattcatggccgccctgttgcaaggtgccgccaccaacaaagacaagaccgcactgtacttgggcgaggcccgccgcatgggcatccaggtgctctcgccggacgtcaacgaatcggtgtacgagtactcggcagtcggcgacgtcgtccgattcggtcttggtgccatccgtaacgtgggtgacaaggccgtggccgatatcatcgccgaacgcgaaggcccgcgcggcaagttcgtgaacttcatggacttcatccgccgcgtgcccctgaccgcgctgaaccggcgattggtcgaatcgttgatcaaggccggtgccttcgactcgattgacccgaaccgtcgcgcgctgttcaccgtgcacgaggccgccatcgactcggtggtgagtctgaagcgcaaacaggcggagggccagttcgatttgttctccgatgccgaggatgggggagcggaggccatgggcgacgcttccgtgaccgtacccgatcttgaggaatgggacaagaagaccaagcttaacttcgaacgcgaaatgttgggcctgtatgtgtctgaccatccgctctccggtatgcagtcgattctcgcgtccttgcgtgaaatgtccatcgcgcatctggttgatcgagccaaaacgatgggtgaaggacagcaggtcacgttggctggtttggtcaccaatgtggaccggcgcgtatccaagaagggcaacccctgggccatcgtgaccatcgaagacatggaaagctccatccaatgcatgttcttcggcaaggtctatgaagcggccgccgccgaactcgccgtggacgccatcgtacagattcgtggccaagtggagttgcgcgacgaaaccgtttctctgagagccacggaaatgcagattccgaccttggaagccgaggatgaacgtccgttggtcatcacgctgccgccggtggcgttggagcgccaacgcatgatgcaactcggtcaggtgctcgctaatcatcctggttactgcgaagtacatcttgcggtgctggatgagaagggtaacgctcaggtgctcacgtttggcgatcgtttccgcgtcaagcgggatacttcgttgtttgctgagatcaagattctgtttggccccagctgcttgcctgccgcctgattggcgggtttcgcccctggcctctccctcacctggctttgctggggactccttcatcagagggagctaaggcatgtgccaccatacgatgtgcgcgactattgtggaacgtatgggcatggagatggcggatactggtaacaacgatgacgagcgacaatggattgccgcgatgctggaacggctgtctcattcgcagttccgcgccaaattcgctttgaccgacaaagaacgagcctatgcccgcaccaaaggcaaggcgaccatcgatcgtcatgcgcgagaaatgttgcgagaccgcataggcgcagccgaaccgaagaacgacggcaggcagacgccatggcgcggccatccggtattcaccgctcagcatgctaccgccacatgctgccgcggatgcatcgaaaaatggcatcatctgcccaaaggccgtgaactcaccgaagcggaggtaaaccgacttgccgatttggtcatggcatggattgagcgggaccttatcaatcatccggttcggtgaagcacccagcatcctcagtatgcctgtatgccttcaatagttatgagccaacagccaacacaggcctcgaaaaccgtagacgcaaggtattggcgaatacggcagaacgccgaacgttgcctatggcgtgttcggcaataatgtgacatgatgtctattcaagaagagttgacgaagcgtcaactctaccccaaggaggcggaatatgtactacagcagcggcaattatgaggctttcgcacgcccgaagaagccggccgacgtggacaacaagcatgcatacatcatcggtaccggactggcggcattgtctgcagcctgttatctggtgcgtgatggtcagatgcctggcgagaacatccacatccttgagaaggacccggtacccggcggcgcctgtgacggtcttgatattcccggcctcggctatgtgatgcgtggcggccgcgagatggacaatcatttcgaggtcatgtgggatctgttccgctcgatcccctccatcgaaaccgagggcgtcagcgtactcgacgagtactactggctcaacaaggaggacccgaactactcgctgtgccgcgccaccaaggacctcggcaaggacgcggggctcaagggcaagttcggcctgtccgacaaggcttcgatggaaatcatgaagctgttcttcaccccggacgaagacctgtatgacaagccgatcaccgatttcttcgatgatgaggtgctgaactccaacttctggctgtactggcgcaccatgttcgccttcgagaactggcactccgcgctggaaatgaagctgtacatcaaacgctacattcatcacatcggcggactgccggacttttccgcgctgcgtttcacccgctacaaccagtacgagtcgatgattctgccgatggtcaagtatctggaatcgcatggcgtcgaattccgctacaacaccaaggttgagaacgtggaattcgcgattggcgggggagccggccccaagcgcgagcacaccggcgtaggccaggacaccatccaaaagattcaggccacctccggtttcttcaagcgcaaccctgccagcacgcccaccaagaagcttgccgtgcgcatcgacgtggatcacgagggtgataaatcctccatcgacctgaccgagaacgatctggtgttcatcaccaacggcggttgcgtggagaactccaccatgggttcccagaactcgcccgccgcatggaacccagacctgaagcccggcggcggctggaatatgtggaagcgtatcgccgaccaggacccgagctttggccatccggagaagttctgctccgatccgaatgccaccaagtggatgagcgccaccatcaccaccctggacggcgagattccgccgtacatccagaagatttgcaagcgcgacccgttctccggcaaggtcgtcaccggcggcatcgtcactgtgcaggactccaactggctcatgagttggaccctgaaccgccagcagcagttccgcgaccagcccaaggaccagctgtgcgtatgggtctacggcctgttcccggacaagcccggcaactatgtgaagaagccgatgaccgaatgcaccggtgaagagatttgcgaggagtggctttaccacatgggcgtgccgaccgacaagatcgaggcgctcgccaagcatcacgccaacaccgtgccggtcatgatgccgtacatcaccgcgttcttcatgccgcgcgcggccggcgaccgcccggacgtggtgcccgatggtgccgtgaacttcgcattccttggccagttcgccgagaccccgcgtgacacgatcttcaccaccgagtactcgatgcgcaccggtatggaagctgtctacacgttgctcggcgtggaccgcggcgtgcctgaagtgtggggcagtgtctatgacgtgcgcaacctgctcaacgccaccgtcaaattgcgtgacggtgcaccggtcaccgatatgaagctcaacttcattgaaaaggccgtggtcaagaaggtgctcaagaaactcgacggcaccgatattgccaccctgctacgcgaataccacgtaatctgacatccatccggctcccctcaaggtgaggggagccagcacgcgaagcgtgactgggggagttgctcacaacggagtgttaagagaaagacaaaaacatgactgattctgatccccagttaatccgccacgccaccatcgacgatctggacgcgctggccgccatggaattcgaatgcttcccggccgccgaggccgccgaccgctcgtccctgcgcgcccgaatcgagacctatccggaatgtttctggctattgattgatggcgagatcgtcatggcgttcatcaacggttttgtgaccgatcggcgcgacttgaccgatgacatgtacgaggatgccgcgcagcacaaccctcaaggtgactggcaaatgattttcggcgtggatactgcgccgaagtatcagcatcgcggttgcgccagtacactcatgaggaaagtcattgaagacactcgtgcagccggccgtaaaggcctggtgctcacctgcaaagatcggttggtcggattctatgcgcgattcggatatgaggacgagggcatttccgattccactcacggtgacgtggtctggcaccaaatgcgcctgaccttctaatccccttttggcttccctctttgatgctgggtcgtttaaaaaacagtccggtggactgtttttttagacgaaggcgagacgatagtcgagccataagggcgcgagctttgctcgtccgtaattgcgggtgagctgtccgcgtgatcggactgaggggagttgaacgtggaatgaattgttgcgacacgccggtgaacatctgatttcgttacgtgagcccataaaaagccggcgtatcctgatggtaacggcgtgattcaagctgatttcgacacgccgatagaacgccgtcgttgcaacgattctggcgtgccttttcatgcccgatttgcgttgtggcgtggttgcgtgtaagttattcacctgttgccgctcagcgtggcgggttccttcttctggttggtttcctgtcttgctggtgtggtggtggtttgagaactcaagagcgtgtttgtactacttctttatagtcaatgattgccagttcattcctcgcctgattgcctgtcgtggtggtcgggtacccgggagggtttgatgaggggtgaggttttttgaggg

SEQ ID NO: 1906 - DNA, 4683 bp, Unknown
  MAG_14  MAG No. k141_79587
ctgatcgtggagcacagggacaggctcgcccgcatgaacgcgggactggtggagagcgcgttgaaggcgcagggacgccggatcatcgtggtggacgacacggagccggacgacgacttggtgcgcgacatgaccgaggtgttgacctcgttctgcgcacgactgtacgggcgtcgtgccgccaggcataagacggacgcggcgttgagggcggcgcgtgatgcttgaggcggtcagggtggcgctcgacccgacgccacggcaggaacgactcttggagtcccatgccggtgcggcgcggttcgcgtacaacgcgggactcgcgcacgtcaaggccatgcttggacggcaggagaagccggaatggtcgtactacgcgctgcgcaggtggtggaacgccaacaaggacgccctcgccgtcagcatggagaccggcaagccgtggtggccggagaacagcaaggagtcgtacaacagcggcctcgaatcattggccgacgcgctgaggaacttctccaagtcccgcaaggggcagcggaaaggccgcaggatgggcttcccgcgcttcaaatccaaggacagggcggttcccggattcgcgtacacgacgggctcgtttggtctcattgactgtgacccttatgcgctgcggctcccgaagataggccgcgtgcactgcatggagaacgtgtccaagcgagtgaacggcgcgaaggtgctgcgcatgagcgtatcccggcatgcgggacgctggcaggccagcctgaccgtcgaacgcgccgacctgccgattccatcgccgccgaaaggcgggagcgtcggcatcgacttgggcgtgaaggaactcgccacattgtcggacggcaccgtgatacacaacccgcacgcactcaaatcgaacctcggacggttgaagaaagcccaacggaatctgagccgcaaacggaagggctccaaccgccgacgcaaggcgagaacgagggtcgcgcgtctgcacgcccgcgtggcggacctacgccgcgacctactggacaagaccaccaccatgctcgcccgcgcctacgcggacatcagcatcgaggatttgaacgtggcgggcatggtgagaaaccataggctcgcccgctcggtagaggacgccgcgttcgcggagttccgccgacagctcgaatacaagaccgcacgcaccggcgcgaggctccacgtcatcgaccgctggcatccaagcagcaagacatgttcgaactgcgggacggtgaaagccaaactgtccctgtccgaacgtgtctaccattgcgaggagtgcgggcttgtcatcgaccgcgatctgaacgcggccatcaacatccaagtcgccgggagtgccccggagacgttaaacgcgcgcggaggaagcggaagacggaccgacgcatcgcgtcgggcaacgcggcatcctgtgaaacgcgaaccaagcgacggcgtaagccgtgtgagtcttggagctggcctcggcaacgaggccatgcagatgacttcgctctagcgacaagctaaaacaaagtcatctacaacggttgcaggaataaagaattcctccctgcaagcccatcaccgagacgtgcgttagcactccatgccgatttcggtgaatcagtgcaccacagtcaccgtgcattcggcgaagttcacgatctgacgggacaccgatcccaggaagtgcgcgtccagaccggacaggccgcgcgaaccgaccaccagatggctggcgtaccgagatgccgcaatcagccccttggacgcgggaatatggaaggcattcgcgctgaccttgacaccatcgggaatctcggccttggccatcagcccggcgagaatctcctcggcgcggcgctgaccgaccttcaccggtgccacggcgttctcatagcccggaataacgcccaaatccttgagctgccagcagaacatcacatgcagcggcgcgtcgtgcagtcgtgccttttccagcgcgaagtcgaacgcgcggcgggaagtctcggaaccatccacaccaaccaccaccgggcggcgagcctcctcgaccaccggctgaggctgcgtgtagtggaccggctggtctcctggcgtcagggcattggcgatggcatcggtcacggtctcatcctcgctgccggcgatgcgcaccacggtcaccggcacttcggcggcctcggccagcgaagcggacagggaccccatgaaccagcgggccacacggctcagcgagcggcggccgaccacgatctgctgcgcatcatggccgatctgcagcagggccgaagtgccggaggccttcaccgaggtgagcttcagattcgccggatcgaagtcgatgcctgcagcggccttgtcgacccacacacgcagctcgttggcaatatcgtggcggaccttggcccaggcctcgtcgctgtccggttcggaacccatatcccaggaatgcgtccagccaaacacggcgttgacgctctgaccggttaacgaagcctcctcaagcgcccacttcagcgcggcaaaggattcatcggaaccatccacgccgacaacgatgtcgggcttggttgtcgcttcactcatttcgagcctccttgtaatcgactacgggtgaatctagaaccagcatatcgttttcttctcctctcacggcgcaattcatggaatccgatgaataaacgtcatcgtgaatcggtagagtaagacggaatgtcaattgaggaaggacaagcatgttcgaacggtttaccgaccgtgcacggcgcgtgatcgtgttggcgcaggaagaggcgagggcccttcagcacaactacatcggcaccgaacacctgctgctcggcctgatccgcgaaggtgagggcgtggccgccaaggcgctcgcctcgaagggcgtggagctggatgccactcgcaagcaggttgaagaaatgatcggcaagggcaacgcggctccgaacgggcacatcccctttactccgcacgccaagcaggtgttggagttctcgctgcgcgaagccctgcagctgggccacagctacatcggcaccgagcacatcctgctcggcctgattcgcgaaggcgaaggcgtgggcacccaggtgctcatcaagatggacgtcgacctgggtgagctcaggagcgcgaccatcgatatgattcgcggcaactccggcaccggcaccggtgacggcaagggcgatctggccaacgccggcggcgtgacagacaagcagaacaagtccggttccgccattctcgatcagttcggccgcaacctgaccgtcgaagccgctgaaggcaagctggacccggtcatcggccgcaccaacgagatcgagcgcgttatggtcgtgctctcccgccgcaccaagaacaacccggtgctgatcggcgagcccggcgtgggtaagaccgccgtggtcgaaggcttggcccagaagattcaggccggcgacgtgccggaaaccctgaagggcaagcaggtctactcgctggacctcggttccatggtggccggttctcgctaccgtggtgatttcgaggagcgcctgaagaaggtgctgaaggaaatcaagacccgtggtgatatcgtgctgttcatcgatgagatccacaccatcgtgggcgccggctccgccgacggcgcgctgggtgcctccgacatgttgaagccgatgctggcccgtggcgagctccagaccatcggtgccaccactaccgacgagtaccgcaagtacatcgaaaaggatgcggctctggaacgccgtttccagccgattcaggtgcacgagccgaccatcgccgagaccatcgagatcctgaagggcctgcgttcccgttacgagaaccaccaccacgtgaccatcaccgatggcgcgctgcagtccgccgccgagctgtccagccggtacatccaggaccgcaacctgcccgacaaggccatcgacctgatcgatgaggccggtgcacgcctgcgcatcaagcgcctgaccgccccgcctgagctcaaggaactcgacgagaagatcgccaagatcgccgccgacaaggacgaggccatcaagggtcaggacttcgagaaggccgccgaactgcgcgacaagcaggagaagctggaagccgatcgcaagcagaaggaagactcctggcgcgaaggcgagtccgacgtcaagatggtcgtggacgaggacgtgatcgccgaggtcatcagctccaccaccggtatcccggtgttcaagctgactcaggccgagtccaagaaactgctcaacatggaagccgaactgcacaagcgcatcatcggccaggacgaggcggtttccgccctgtcccgctctatccgccgtactcgcgtgggtctgaaggacccgaagcgcccgtccggttcgttcatcttcgccggccccaccggcgtgggcaagaccgagctggccaagacgctcgccgaattcctgttcgacgatgaggacgcgctgattcgcgtggatatgtccgagttctccgagaagtacgcggcttcgcgactcttcggcgcgcctccgggatacgtcggctacgaggagggcggcgagcttaccgaaaaggtgcgccgcaagccgttctccgtggtgctgttcgacgagatcgaaaaggctcatccggacatcttcaacacgctgctgcaggtgc

SEQ ID NO: 1907 - DNA, 17364 bp, Unknown
  MAG_14  MAG No. k141_79965
aaataggctataggaagcaatcttggctgacgaacatcccactttggtgcgtggatgggctgggcgaatatctcaaacgtcagatcgaaaagagcagggaaaatccagcgaccatctgattctttttctgttttttcgggtatgtgaaataggtggttgagttttggtgattctcatacatcaatttggacgaggatgccatcgcatatctcaatggcgcactcgaagaggatgatcccgcatttgtgcaagatgcgttcggtgtggtcgcacgcgcacgaggcatgaccaatgtggcccgaaaatccggcctcggccgcgaatccttatataaggcgcttcgcccgaattcgcagccctcgttcaacaccatcatgcgagtcgcagacgcacttgacgcagaaccctattccctgccgaagcgtaatcgttcacccgcgcgcggcggcggtgacgcgggtcatgaaacggtcgaggaattccggcacgttgacgcccaatgcgacttgggtgtgtttgtcggggtcctggagccgtgaacgatcaccaatggtgcggccacggaacgggccctcgagatcgacctgtaagttgaagccgaacgtggtgaccaatgatgggtcgagcgcggcggccacggccagcgggtcgtgcagtccacatccgcgaatctccggctggttcttcaggtagaagtcgatgtagtagtcggtcatggtgacgaggaagtcgccggccggcgtccccagagacgcccattcatgggctttctcacgggtgagcgcggtctggtgggtcacgtcgaggccgatcatggtggtgcgtgcgccacacttgaacagatagtctgctgactctgggtcttgggagatgttcgcttcggcggccgggcttacattgccgggcagcgtcaacgcaccgcccatcaacgtcacgttcacgccggaatccttcaggtccggagcgttgcggaatacggtggccatggtggtcatcgcgcccgtaggtacgatggtcaggtccgggccgtattcgcgcgcggcggcgatgatgaaatcgaccgccgagcctggtgcttccggagcgcgcggggagtcggggatgattgcgccgccgatgccgttgggatggtggaccgccaccgagccgggagttggtgcccacgaagcgtccgtttgccagccgtccgcgccgccgttctgccagcgcgcgtaggcctgggtccgctcgtctggtgtggtgccacgcattttcggcaatgttgccggggcgatgggatggtcgactccgggatagaccggaacgtcgtcacggccgaacaagtgcaccaccgccagcgcgttgcgcgcggccagcggcaccgcgacattgccgtaggtggccgtgataccgatcagatcgatctcgtcggcactgcctagggcatatgcgatggcgagcgcgtcatcgatgccggtatcgaggtcgaggatgagttttttgcgcatggcggttccttcaagacgaatcaatcctcccgaatttgtgacgttaagccaacgtcacaaattcgggaggatggggaatgggcaatcagccgagcttggcgagctcttcgggggtgagctcgagccggtcggccttgagggagtcaaggatggtctcggggtggtgggcgccgggaatcacgaacatgtggtcgcccttggcgagctcccatgccagcacgacctgctggtagctcacgccgtgggccgccgcgacctcgcggaacgggtcgaacttggtctcatcataggggtgacggtagccgccgagcgggctccagcacacgaaggccagaccgaccttggcgcagtagtcgagcgtgtcctgggtctccaggtgaatcggcgagtactggttctgcacggccacgagcttgtcgcccagaatgccgcgcgcaatgtcgatttgctcgatggaggcgttggagataccggcctcctgcgccacgccctcgtccaccagctgcttgatggcttcgacggactcgttgtacggcaccttcgggtccgggcggtggaagtacagcaggtcgatggtgtccacgccgagcgccagtgcgctctccttgccgcgccgaatcaggttctccgggcgaccgtccacatcccacgtggggcggccgtcggtgaagttgcggaagtggcccaccttggtggccaccagcacctcgtccttcggccccttccaggtctcaagggcctcgcgcaccagcttttcaccggtctgctcctcgccgccggagcagtagtaggcccaagcggtgtcgatgtggcggcagccggcgtccagcgaggcatgcagggtttcgatgccgacctcatggccgcggttgttttcgatggtcagcggcatttcgccgtggccgatggcggtggtggagaacggtccgaggttacggaacaatgccatggtgattcccttcgtgaaacttatggaaactcgatatccacgatcaagcctaagcatcccgttggatttcacactctcggcctgcccgcacaatcaatctatgaaatttccgcaacttcacggaatagaaaacgcaacttactcatacccagttcagcgaaaacgaggagccggaaccccatggattccggctgttccgctgataaatcagtggcctcgtctgagactcattcccagcaataccagtgcggcaatgatgatggccgtcgaccgcccctgtccaacttgattggccagggcgatcaacaggccggtcatcagaccttcccggtattgccggtcttgtctcggacggttgtcatggtcgttgcctaccatgagaacctcctcttgaattttgagacgtcattatgccggttgacacaacgacaccgcgccaaagtggcacgctagtagaccttggtttggtcagtccagtgtactggtgagcttcggtggaggctggtatgctgtgttgtagcagaaaggtcacgctagcttcgaggcaatcttctcggcggcgccacagactttcgccccgttggacctgactgttgaggtctcctcacctcgattttgagagaaaggcccgatgtcttatgacaccgggccttttactttcaaagctatagggactttcagaagcacatcgcttaccgcccaccgaacgaaccgccgccggaaccgccgctgctaccgccaaagccgcctgagccaccggatggcgaggccgcattgattgtcgcggtgatatccgcaaatccgtacgacaattgcgtgccgaggtcagagaacccagccgcgaacgacgtgcccccgaacgctggcaccgctccggccaatccgctgtcagccacggaatccgcgaacgccgagccattgtagaaacgcaacccataccagtcgtacggacgataattccaatagaacaccgtgtcggaggcattggcatcaagccattccggatcggatacttgcggataggccatggccagctcccgcatcacccggtcggatatgccaaatgcggcagcgtagaccatataccaatcccacagcgtcaaatccgcgactccacggtacttgaagttcgagaagccttgcatatatcgtttgagacccaagcattgcccggccatctgctgaccatgatcggtcagcacgtaggaattccccatcaggaagcagaatatgccgaccgtcatcaggggaatgccgatgagggccccggccaccagatatccggccaaaccgttgatgaatatgctggcgccaccgatcagcacggtgattgccccgggaatgagccatccgttctcggttttcggcgcgatatccgccgccgcgaattcggtcttgcacgcattggtgaacttttcgagttccttgtagccgtctttccaatccttgcaggcgtctttgatgtcatccatgtcaaatgccgtacgacctacgcgctcggaaatcacggtgagcagatagagcaatgcccgctcagaagcactgagatcgggctggtgtgcatcggacacgctagatgcggcagatccagatccgccagatccagatccatcaaatacggattcgacgaatactgattcatcaaatccctcagatacgccgtaatcggactgccacagcatcacaatcgtgctattggtacgcgcattattgcgcttgtatggatcggacccgattcgctgactgagctccaccggagaagcttgtttcagatccacgccgatatacaggtccgccgaaccggggaacacagcaatgactttcttcacggccagagaaagcaaggtcgcgacgagttggcgctcggaaatgtcgggtttgtcgccggaagtcacgatatcgatgagtttggccgccgatgcggggctcagctcggggcgatcgcgccaatattcgatggagccacggtaacgtgaacgtccggaggagcgtaaggctgcaacaacaccaataatcccgaatatcaggccggccgatatggtggtcatccagttgttcaggcgccttgtggcgcgttggcgttccagattgcgccagaaccgttcgtcgtcggcttcgtcttccttcaactcctgcagatgatcgtcggtctcgacacgagccatatctcccgccttggccgcgtcgaaagcggccaccacgtctaggtactcgccgcttttcacatcatttacggtgaaggtgaagctgccatccttggttcggccggtttccgaggtttgttcagtgtgcagccaagtccacgagttgctcgcggtcacacctttggggaaatgcaccgtgccggtgaccgtaccaatcggcacctgattgttctcaccgaatggctcccattggaaggtctccacgtccttccacttggtggccacgtcatgcatggtgaagctcaccgtgaacttgatgctgttggtttttacggtggtgggaatattccagccgatctccacggtttggtcttgccatcgtcatccttgcgtttgcgcaacttgatatcgatatgctccgtgactttaagatcgccgtcggcggtggcggtcacatcgtaatcaagcgtgcggtagctcaggtcggcaccatctgtgccgagaatcaaggcaccggcacagagtgcggcaagaatcagcgcaccgacaaggcttaagcccagggcacgaacaatgcgtttcgacataggcatgcgctaccgcccgccgaacgagccgccacctgagccaccgaacgagccgccgaaaccggagccgccgcccgaaccgaagctggagaaatcgccaccggaatcggcggatggtgctgccgcgctgatggtcgagctgatgtccgccagaccggagttcagctgcgagccgaggtcggagaatccgccggcaaacgacgtgcctccgtaagccggagctgggccgccaacgcctaggtccatctgcccggcagcatcgtggtcgaatggaccattatgacggtggctgtaccagccatacgggcggtagttccagtagaacaacgagttggaggcgttggcatccagccaagccgggtcgttgacctgaggatatgctttggccagttcacgcatcacgcgatcggaaatgccaaacgcggcggcgtagaccatataccaatcccacaaggccaaatcggcggtaccccggtcggtgaagttggagaagtcttccatataacgcttaaggcccagagtccggccggcgatatcctgcccttgatcagtgagcacggtcatcgcgccggccatcgagcagaacagtccgaccaggaatatcggcagcccgataagaccagccaccgggtatccgataaagctgttggctagcagcgaaccaaatcccagcacggcggccaatacgccgggtaggatccattgccagcccacagagcgcgtggcacccagccgctggtattccatgctgcatgcaccggtgaatttgccgagctcaatatagccgtcttgccagttctggcaggtcgccttcatctggttcaggtcgaataccgggctgcccacgcgctgagaaatgacgatgagcaggttcagcagcgcatcttccgattcgctcaatcccaactgttgcgcgttgggtgcctcatcaatggcgagcggcagaatcacgatggtgctggtgatgcctgccgcatactgcttgccttggtcggcggcaatcatttggctcaagcccaccggcgtggcctggctcatgtcgatgccgcgatacatgtccgacggccccggataaatggcgatggccttcttgacggcgagcgacagcatggtggcggtcagctggcggtcttcatcggattggcgcgtcgacggatcgaccacgcgaatcagacgggctgcggaagccggactgatgccgggctggtcgcgccagtattcgacgctgccactgtattgcgcacgccggttgctggagatcacagcccagataccccacgcgcacaacgcgatgccgagcacgatgctgacaatccagaacacgagacgagctctggcagcgaatcgttgcttgtcgagccagcgctgctgttgcttatattcgtcctgtttcaggtccttgagatgattgccggttcccttgcgggcgatgcccttggctttggcggcatcgaacgccgcgaccacatcgaggtagtcgccattgtggatgttgtaggccgtgaacgtgtagctgccgtcgctgttgcgcttggtttccgaggtgcgctcggtgtgcagccatgtccatgaggttttgccggtgatgccgttggggaaatggacggtgccggtgaccgtgccgataggcacttggttcttcttgccgaacggctcccattggaaggaggccacgtctttccatttggtggccacatcgtgcatggtgaagcttacatcgaacttcatgctgtcggcctcggtggtgaccggaatattccagccgatctccacggttgtgtcatcttcggtggcggaggcgctgggcttgaggccatcggtaccgggcgtgtatgcctttggatggtcgctgccatcgctcacatcggcgacataccaatggttggcgtagtcgctgttccattccttgtcggaagagacgtcactgggcagcttgggctcgctctgttgtgcgtagtcgatgccgtcggtgacgttgcgcacgctgatatcgctgatatcagtcaaggtgccggagttcagcgtgtattgctggaacagctgcttccacggcttggtgttgtcgtcactgtcggtacgctcacgcatcttgacgtcgatatgctgcgtgaccttcaaatcaccgttcgcggtggcggtcacgtcatagtccagcgtgcggtagctgaggtcggccgaatcgccgaacgcggaagtcccgattatcgccaaggtgataactgccaacaccaccgtggcaacaatgctgatgattccggcgcgaatgaatcgtatccgcatatcttccctctcttaagacaatacgggcccggccggcggcttaccggacgggcctgaagcgggtcagaactggacctgtggcacctgacgggaagcgtcatcggcctcgaagtattgcgcctgctcaaagtggaacagaccggcgatgatgttcgtcggcacggtttcgatggcggtgttgagcttcaggaccacgtcgttgtagaactgacgggcgtaggcgatcttgttctccagttccttgagctggttctgcagatccatgaagttctggttggcttgcagctgcggatatgcctcagccgtggcttgcaggttgaacagggcgcgggacagctggttttcggcggcggcgcgctgagcagtggtcgtgctcgggttgctggccgcagccactacgccggcgcgggcggcggtcacctgagtgaagacttcagactcgtgggatgcgtaccccttgacggtattcaccaggttcgggatgaggtcggcgcgctgcttcaactgcacgtcgatttgcgcccaaccgttcttcacacggttcttcagcgtcaccaggttgttataggcgctgacgccccaaccaatcaagacaacgataataacgacaacgacaatgccgacgatcagaccagtactcacctatgctcctttgctggaccttgctgtgaccattcttccacactcgcaccgtaaacagaagattcatcacagagtattcatcgtgcggacttgtcttgtaccgctttacccgccgttctcccgtcgatcgaccgaagcgggaagtcgccgcccagtccgacgaagtattccagctcgctccgttgcgagaacgataatactcggcaatactcgcgttgaatatgcgaaagcccgccttgcggcgggctttgccgtttctcctacgcacaaatcattacgctgcgcgcaggaaacgatcagccgaagcgaccggagatgtagcgctcggcttcttcgttttgcgggttgttgaacatcgtgatggtgtccgcgaagtactcgaggtgaccgggctggcccactgccttcaggttgaagaaggcggtgtagtcggcgatacgggcggcctgctgcatgttgtgggtcacgatcacgatggtgtagtcgctcttgagctcgttgatcagatcctcgacagccaaggtcgaaatcgggtccaaggcggagcagggctcatccatgagcagcacctgcgggtggacggccacggcgcgggcgatgcacagacgctgctgctggccaccggacaggccgatgccagggttgtcaagacggtccttgacctcttcccagaggttggcaccgcgcagagcccactcgaccagatcgtcggcgtcggacttggccaggtggtggttgttcaggcgcacaccggccagcacgttctcacggatggacatggtcgggaacgggttcgggcgctggaagaccatgccgacgtcgcggcgcacggccaccggatccacatctttgtcgtacaggttcttgccctcgagcagcacctcgccctcgacgtgtgcgccggggatgatctcgtgcatacggtccaaggtgcgcagcacggtggacttgccgcagccggacgggccgatgaaggcggtgaccttgttcggctcgatgttgatgttcacatcttccacggccagaaagtcgccgtaatagatgttctcgtggttgacgtcaatacgttgtcccatgatgtttccttatatttccttgtgttcttaaggcttaggcttagcgactggcttagcgctcggtcttgacggcgaagaccttcgccacgattcggccaatgaggttcagcagcagcacgatgacgatcagcacgagagccgcagcccacgcacgttccatcggaatcgtggtcacgcaggtggcgtcggcgttgggcgggcagttcgcgctgagcttcgagtactcctggtagacgaacaccggcagggtggtcatctggccggagaacaggttcacgttggtgctggagatgtagccggcggtcatcagcaacggtgcggtctcaccaatcacgcgggcgatggccagaatggcaccggagacgatgcccggcagagcggtgcgcagcacgatcttggtaatcgtgcgctgcttggtaacgcccagagccaaggaagcctcacgcaaatcgttcggcacgatcttcagcatttcctcgctggacttgaccacggtgggcagcatcagcagggagagagccacggagccttcgaaaccgttgatggtaccggggcccagcagaatcgtgaacatcgagaaggcaaacaggccggccacgatggacgggatgccgctcatcacgtcgacgagcagggagatcgtggtggcgagcttgccgcggttcgagtattcgaccaggtacacggcgcacatcaaaccgatcggaatggagataaccatagcgccagcggtgatttcgagagtaccgatgatggcgtgcagcacaccgccgtaaccaccggacggggtctggctaccaccgaccacaccggtcatgttgtagctcaggaagttcaggttcaggcgcttgatgccgttgacgatagtggtccacagcagggagatcagcgggatgcaggcgatcacaaacgccaccgcgatcagggcccacatgaagcggtccatgatattacggcgctggatggcggaacgggtcgggcggaaacgatcgaagtcgatttcgggcgtgccgtccatcggagtcttttcagtgttctcagcagcagtcatcacgcagtcgctttctcggtaagcttacgggcgatgaagttgaccacgaacgtgatcaggaacagaatcagaccggttccaatcagcgtggagacgcccagatcgttggcttcagggtactgtgcggcaatattcgcggcgatggtctggttctgcgaggcctgcagcagcttgatggagtagttgaggcccggggacaggatcatcaacacggccatcgtctcaccaagcgcgcggccgagagccagcatggaggcggacacaataccggacttgccgaaaggcagcacggccagacgaatcatctcccacttggtggcgccgagcgccagcgcggcctcttcgtgcaggcgcggggtctgcatgaagatatcgcgggacatggaggtgataatcggcaaaatcataacggcgagcaccacagccacggtggcgacggtgcgcgacgggttggcggccgggccctcgaacagtggaatgaagcccaagtggttggcaacccagttccagaacgggtagatggccggcaccagaatcaggccgccccacaaaccgtagataacggacgggatggcagccagcagatcgaccacatagctcagcgcggtggcgagcttcttaggtgcatagtgcgaaatgaacagcgcaatgccgatggacacgaagaaggcaatcagcagtgccagcaaagacacgagcacagtaccgaacaacagcgggagcacgtagccccagaagctgctggccttgccgccggtaaagctggacacggtgtcgctgttggcggcctgatcgccaccgatgagtggccaggcgcggaaaaacaggaacaggaacacagcggcaagtacaaccaggatcaggatgccgcaggcgtatgccacaccgcgaaacaccttgtcggcggtcttgcctccaactggctgcacagccgttttgtcttgcgaactcacggattctccttatatagggtggttatcaagtattcaagtggtgcggttttcgtctgtgactttgccaaaccgttcgggtcctgacccgctttaagccgcagccgtatggtttacgactgcggcttaaagttggcggcgactgctcttactactacagtctatcgttcagttgtcaggtccagtccacacgacccttgcgggccgacgtcatcacttggtcttgatggcctcgatggacttggtgatcttagacttcagggaggagggcagcggagcggtgccggcggcatcctgagcggccttctggccctcgtcggaggtcacgtaggtcagccaagccttggcgaactcagcctgcttggtgtccttgtaggccgggcagacgatgtcgtaggagaccaagacgatcgggtaggcaccctcggcctcggtggcgtggttgatcttgatgacgatgcggttgtcgcccttaacggtgtcgtcctgcttggagtcctcgatgaccttggagccggcctcggcggaaatctcgttgtacttgtcgccgaccttgacggccacggtgcccaggtcgccgacctgggagaagtcagcgtagccgatggtgccgtcggcctgcttgacggtggagatcacgccggaagtgcccttggcgccctggccaacctcgttcggccagttctcggagaggtcgtaggtccagttgtcaggggtgacgtccttgaagtaggagacgaagttctgggtggtgccggacttatcggagcggtgcacgacggtgatggcggtgtcgggcagcttcaggtccttgttctgatcggcgatggccggatcgttccacttggtgatcttgccgtcgaagatcttggcgatggtggcagcgtccatgttgatgtgcttgccggcatcggaaacgcccttgaggttgaagaccacggcgatcggggagatgtagaccgggacatcgaaggcggtgccttcagtgcacacggacttggactgctcaacttcgtcatcggcaagggccttatcggagccggcccaagcggtggcaccggtcaggaaggtctgcacgccagcgccggaaccggacgggttgtaggcgatcttggcttcagggttggtgccctggaagccggcgatccaggcttcaacggcggcctgctgagaggaggcgccggcgcccgagaagttgccggagaccggggtggacttggaagtggaatcggaggaggagctgttgtcggtcgtggtggcggtgttatcgccgcaggcggccacggaagcgagcatcacaatgccggacagagcggcaatggagcgaatgaggatgttcttctgcatgattattacttaatccctctatcaactattcgcgggcggctcagcgctgcccggtcaattcatgacaactacaagcgtattggtggtttcaagggcccaaaaccgaaatcagtaaacagaagatgaacacttggatgtttgtgggctacgttgaggctacgtagtttttggagtggactcgcctgcggcgagcccacaatccacaacaaaaaaggcggcccgaaggccgccttccatttactccgcgggagtatcgatcttgtatccgagaccgcgcacggtagtcagatacttggggtgcgccggatcttcctcgatcttggagcgcacgcgcttgacatgcacgtcgagcgtcttggtgtcgcccacataatccgaaccccagatgcggtcgatcagctggtgacgcgtcatcacacggcccttgttctgcatcaggtattcgagcagttcgaattccttgagcgggaagaacacggtttcgccgcgtacggtgacctgatgctggcctacctgcatggcgatatcgccgcacaccagcggaatatcgtcatccacagtgccggaagcctgggccgtggcctgattgcgacgcatcacggcacggatgcgggccagcagctcacggaaagagtacggcttggtcacataatcgtccgcaccaatctcaaggccaacgaccttatcgatttcggcgctcttggcggtgagcataataatcggcacacggctctgctcacgaatgcgacggcacagtgcagtgccgtcaatgcccggcagcatcaaatcaagcagcaccaaatcgatgccgcccttggtgaacagttccagaccttcctcgccagtggcggcggcggacacgtcgtacccctcgcgtgtgagctggtataccagcggctcgcgataggattcctcgtcttcgacgataagaatgcgtgccatagtagcctttcttgggtatgttcccgtgcgcataggcgcaaagttttccgatactatcgtaaccatttgttctccgttagcctgctgtttcctgaaagtacgtaattgcgtaattgtgctacgcacggtgtgcgcacctcgcccactgtgtgattgtgcggcaatggaatggcaccatatcgggcaccaaccaaggccctacgcttgtgtcgactcgtccggccgggcctcgtcatcatcctcatccggggcggccggcagctcgatggtgaacgtcgacccctcccccgtacgcgaccagaccgaaatccgaccgccgttctcctgcacgcagtgcttggtgatggccaagccgagtcccgaaccgccggtctcgcgcgaacgggccgggtcgacccggtagaaccgctcgaaaatgcggtccagtgatttggcggggatgccgatgccctgatcgaccacgcgaatggtgactttgccatcgcgctcccccacgccgaccgccacagtggtgtgttcgggcgagtaatggatggcgttctctacgaggttcttgacggcggtttgcatggcctctttgtcggccttgatcatcggaccgctcgtggcagggctgcctgattcttccaaggaaccttcgccatcggccagctcctcgaccttcgtgggcactgactgtccgttgacactcagtcgaatatccacatggcgggagtcggcttgggtctgattggcggcgatggcagcgcgtgccacatccagcgcggaaatgcgccgcgcatcaatcacactttgcgggctttgggctttctgcaagtcgataagatgatgtaccagttcggtcaggcgcgcggattccttggagatacggccggaaaaataccgtacggcgtccggatcatcggcggcgtcggtcacggtttcggccagtagcgagatggcaccggccggagtcttgagttcgtgcgaaacgttggtcacaaagtcacggcgaacggcctcgaaacggcgctgctcggacatgtcgttgatgaagatggcgtacaggtcatcgccgatatcgccaatgcgcacacgcaaatacagcatgttggacgggcgtgactggccggcctccagtcctcggccattagaggacggataggaattgcgattgaccggcagctgaacctcacgctcacgcacgccaccgtcggcggcggcctgagtgaggatgtcctcgacttcgcgcgagttgagtcggtcgccggagaccaggccgaatggcactgagccggggcttgaatattggaccaagccgttgcggtcggtaacaatcagggcttcgggcaggacttcaatcaggcgacgctcggtggggcgcacgggcgcatcatcaccgaatagagaacgcgtatcctcgtcgccggacaggtcctgttcggcggcgagccgacctgaaacgcggcctttgttgtaggcgatgacggcaacccacgccagtatcagcgcggcgagcaccacaatcacgacgatctgccagatatccatgatttccagagtaaaacgtgcaaggcgtagtgagatgcccaaactacgtaagttcgtctattgttcatttttggtgggacgacataacaaaatgctcccgctggcgggagcataatatggggagctctatttacagctcgtagtccttgtccttgctttccttaatcaggaacagagcgagtagagcgagggcggccatgatggccatgtaccagcccacaccggcaacgccgaacttggaggcgaccagggcctgggcgatggtcggagcgaatgcgccaccgaggatggcggcgaggttgtagctcaggccggcgccggagtaacgcacgtgcaccgggaacagctcaggcaggtaggcgccgcaggggccgaacaaaccacccatgatcatgaagccgacgcacaggaagatcatgatatgggcggcggagtgcacgagcagcatcggcacgaagaagctgaacaccaaggcggcggcggtcacggcaatcatgaccttcttgcggcccaccttgtcggcgtacacgcaggagaccacgatgaagatggcgaagaacaccacggagcacatctgcatgagcaggtactcgccctgctggaagcccaagcccttgacgccgtaggccagcgaccaagtgccgagtacgtagaacagggtataggtgatacccatggctacggtgccgagcacgacttccttccagtacggcagcaggtcgcgcagtgggtgcttggaggtgcgcttctcttcagtggccttctggaacactggggtctcagacatgcgggcacgcacgtacaggccaatgatcaccagcacggcggagcacaggaacgggatacgccagccgaaggcaatcatctgttccttgctcaggttggattcgagtagcaggttcaggccgtaagcgcagaagaagccaatcggggcgccaaggttcgggaaggaaccgtacagggcgcgcttgtcggccggagcgttttcagtggcgaccagcgcggcaccggaccattcgccggcgaggcccacgccctggcaggcacggcagatgcacagaatcacgacggaccatgcgccaatctgctcataaccgggcaggcagccgaccaggaaggtggcgatacccatggtcatcagggcgataaccagcgtcttcttacggccgagcttgtcaccgaagtggccgaacagcatggagccgaacggacgggcgaggaacgaaacggcgaaggtcacgaaggccatcagcgtggcgagggtctggttggacttggcgacgtccgtgaagaagatcatgccgaagtagctagcagcggcaatggaatagcagtagttatcgtagaattcgatggccgtaccgaccatggaagcggcgatgatctcaggaaccgaatccttcttcaccggtttggtcacagccgcggttgcgcttgcagtcattttttctctcctcatgctgcagataaaccccagtgcagcgtgcgcattgtgtattcaatgcttcgcgacggtgttgtcgtcgcttaacgaattgagcacagcgaccggcatgcgggagaagaactggtacggcttgtggccccagcgatgaaccccgcacatcgctgtgccgaacaccgagtatggctcaggttataagcaatagtttgaaaacgctcatattgtggtcatcatacccaaaacgtggatggtgagatgggccagcccgccgactacaggcgcttgacgatgtcgacagccagacgggcggcggtatcggcgtactcggagatgtcgaactccttgaatacctcgtaatcggtgtcggcgttgtcggaaagggcacgaatcaccagtgccggcacgtcattgcgggcggcgacctgtgccacggcggcgccttccatctccacggcgtcagccccggtgagtcggatgacctcctcgaccttttggggcgtgtccacgaagtagttgccggaggcgatgatgccggtgatgtgggtaatgcccgcattggcaagcgcctcgtcggcaacttccagcagacggtcatcagagtggaattcctccaccggagcgtccgcagtgccgggcttccactggcctacgagccgcatgtcagtgtcgaggtagcgcagggtgccgccgagcaccacgtcgttgatgtgcaggtgggtgttgaggttgccggcgatgccgctgaaaatcacgacgtccggggcgaactcgtcaatcagcagctgcgtggtggcggccgcattgaccagtcccatgccgcctaccgttgcggcaaccttgatgacgtcagaaccgaaggagtcgaccgtgccggacacgatgtcaaggctgcccttggcggtgtgcgtcacatgcgtgagcgatttggcgatcag

SEQ ID NO: 1908 - DNA, 11658 bp, Unknown
  MAG_14  MAG No. k141_80439
cacatggttgagcagcacttccgcagcgagtgcgcgggtgcgatcctggtcaaagccgcaggcgccggcccaagacacggtccgctcaacagcttcggccatgagcggagagtggaagggcagggtgacttcgaggtattcgagggtcgggttgaacacggtgccgccgcggagcttctgttcacgcagcttggcctggtgcttgtgctcgcgctcggcttcgagggcgagtgctgccaggtcttccgggtagccggaaagcacgtggtggttgtcggagttggtgacggcgatggagatcgggcctcgggcgttgttcacgcgcttgaccagagcctcaacctgttcgcgggtggcgcccttgacggagagcatcggactggcttcgccatacttggggttcaggcccagttcgcgcacgcggcgagtgccggctgcaccgatcagggcggcgacggccagaatctcgtcgagggtcttgccggcggcctcgatggagccggcggcctcgatggcgcgggccatgtgcacggcgagcacgccctgggagtggccgagcacggcgagcggcttggcctgggccacgctgtagccgaggtgttcgaggtcgagcagggcgccgagctgggtcagtgtcacgccttccacggacgcggtggcgtcggctgcggcgccgaggcgggccgggttcggagtgaagccgaacaggtcgaccggacggccggtggtggtcagcaggtcggcggcgaccggggtgagcagtcggttggctgcggcgatgtggccgcgcagggcctcgtcaaggctgggatcggtggtctggtctgccagggctaccggccacggggtggactggccggcgaaggcgagcgcatggggctcggtggccaggcgattgaggaagaaggtggtcattgctttccttacttgtgtttggttgatgtcttcagaaatcagaggggctggttgccgtggtgtttggtggtgcgcttgacgcgccgcttggtggcgagcgtggccagcgattcgacgatcacctcacgggtctgttcggggtcgatcatgccgtcgatctgcccgatttccagcgacaggttcgcgttgacggtgctggtctcgtactccttgatgtacttggcccgcagcgcatcgacgtcctgcccggaggctttggccttggccaggtcgtggcggtggatgatgttcaccgcgccggccgcgccgagcaccgcgatctgggaggagggccacgcgaagttcaggtccgcgccgatggctttggagcccatcacgatgtacgcgccgccgaacgccttgcgcaacaccacggtcaccatcggcacttgcgcgttggcgtaggcgtagatcaccttggcgccgcggcggatgatgccggcgtgttcctggtcggagccgggcttgtagccgggcacatccacgagggtgaccacgggcaggttgaacgcgtcgcacaggcgtacgaatcgggcgaccttctcggacgagtcgacgtccaggatgccggcgagcacgttcggctggttcgccacgatgccgaccggcttgccgtcgatgcaggcgaagccgacgagcgcggaggcgccgaacagttcctgcacctgcacgaattcgccgtaatcgacgatgcaacgaatcacttcgagcatgtcgtagggctgacgttcgttggcgggcacgatggtggcgagtcgcttggcggtttcgcgttcggcgcgggtggcggcgtaggcgtagaccggcggcttgctttcgctgttggacggcaggtaggcgagcacggtgcgcgcatagtcgatggcgtcggattcgtcctcgccgaggtagtgggccacgccggacacccggttatgcacttcgccgccgccgaggtcggacatggagatggtctcgccggtcgaggccttgaccacgtccggcccggtgacgaacatgttcgagttctcacgggtcatgatgatgaggtccgtcagggccgggcagtagacggcaccgccggcgcaggggccgagaatcaggctcagctggggcacgaagccgctggcctcgcaagtcttgcggaagatgcggccgtactgggtcagagcggccacgccctcctgtatgcgggcgccgccggagtccacgatggccacgatcggcactttgaggtcgatagccatgtccatcagtcggcagatcttctcgccttcggcggtgccgagggtgccgcccttgacggagaagtcctgggcgtagacggccactttgcggccgtagacctggccgaagccggtgatgacagctgcaccggcgttgccgccggcgatgttgccgccctggaagcggccgatctcctcgaacgtgccggtgtcgaagagcaggtcgaggcgttcgcgcgcggttttcttgcctttagcgtgctgcttgtcgcgggcgcgctcttcggcggcgcgggccagttcggcggccttgaccacggcggtgcgcagcggctggtgggccgagggctgggcggcgttggcggccgaggccgcagccgcggccttcacggccggcgaatccatgatgtcagtcattgccgccctccttcttggcgtcggcggccttggccttgccggcgttcacgtccagcgtgaccagcgtgtcgccggcctccacgccatcggccgggccaacgaaaatcttcttcacttcgccggcggccggcgcgtacacgtagttctccatcttcatggattcgagcaccaccagaaggtcgcccttggccacttgctggccttcggacacgttgatgcgcgtgaccacggcctgcatcggggaggcgatgacgccggatttggcaccgtcgttggccgtggcggtaccggaggccacgttgtgcaagcctgcgccgcgcaacggctgggtggggcgcttggcaccgcgggcgcgggccgagccggtgatgttctccacgatgtcgagtggcacggtgagcttgacgcggcggttgttcatctcgatgacgaacgtctccgacttggacttgtcgggcgcggccggggcagcggcacccggggcggtggccaaggaggccggctggccggaggcggcggaagccggtgtgcggttcaggtacgtgcgctccagccacttggtggacacggcgaacggatggccatgctcggcggtgaagtcgtcgttgcggaagatctccttgaacagcggaatcggcgtgggcacgccttcgatcacgagctcgtcgagcacgcggcgcacacgggccacggcatcgagacggttctgggcagtgacgatgaccttgcccatcatcgaatcgaacttcggggagatggtgtcgccctgttccacaccggtatcgatgcgcacgccggggccggccggccactggatcttctccaaggtgccggagccgggggtcaggttggtggccgggtcttcgctggtgatgcgcagttcgaagctgtggccgcgcggttcgggggcgcgggtgagctcgccaccggcggcgatattgagctgttcgcgcaccaggtcgaggccgctgacctcttcggagacggtgtgctccacctgcagacgcgggttgacttccaggaagtacactttgccgttcggggtcaccatgaattcgcaggtgcccaggcccacgtagccgaccgtggtgaacaggcggcgggagtattcctccagcgtgctgacgatttcctcggacaggaagggcgcgggcgcctcttccacgagtttctggttgcggcgctgcagcgagcagtcacgggtggagtacacggtgaagttgccgtgcgagtcgcgcccggactgggtctcgacgtggcgtgccttgtccacgaacttctcgatgaagtattccttcagatcgccgccttgcagcgcgtcgtggttcatgtagaagcggcgcagctcctcgtcgtcatgcaccacggtgatgccgtggccgccaccgccatcagtgcgcttcatcatgatcgggtagccgtgggtgtgtgcgaagtcgagcagcgttcgcacgtcggtcaccggttcggacaggccaggcaccggcggcactttggcgcgcaaggccactcggcgggcggtgatcttgtcgcccaaatccaccagcgcggtgtggtgcggacccacccagatggcaccggcatcctcgaccttctgcgcgaagctcggcacttcggaaaggaatccgtagccggggtgcacggcgtccgcaccggttttgtgcaggatgtcgatcagcagatcctcgttgaggtacgtgtccttgtaggtgtcgccggagagcaggtatgcctcgtcggccatgtccacatagcggctattgcggtcctgttcggagtagacggccacggtggagatacccatctccttggccgtgcgcaccacgcgcagagcgatctcacctcggttcgcaatcagcagttttttgacagtatgagccatagtgtcaaattgtgctctccatatagaggagagggcaagccgcgttcgcacaaaagctttcacgcccttttgtaggctacgaacaaacgcgcgcgtaggttccggcaacgtaaccgttggcgccggctatcaaaaacgttgcaaatccgccgattgcacatccttgcgcgccggttcaagaagttgacgttacggttgcgttcgtcaacttatgacaaatcgaaatcgacaattttgtaagttggtacgaaaccgcacgaaatcgaacacctctacgatggcaaccgtaagttcgggggaaggctcatctgcgggcgaacggaaggcgaccggaccggcatcggtccatcgccgcacgattcgcccgcacagggccggattcatttgggaccgtccaccatatggacggttcgggctgtcggggataccgcacggcccgccggaacctcccctcatccatcgcataccgcccgccgttcacggcgatatcacacaacataggggttattgatatgcagacttcacacaccaccgcatccgcagcggccaccacgccgctcgcccgtcgtatcgtcgccgcatcctggaagccggtgctgttcgccgtgctgatgtggctgtccgcggccgccggcgagattccgattccgggcacgccggtgccgatcacgctgcagacgttcgtggtgatgctcgccggtctcatgctgccgtggcgtcaggccggtgccgccgtcgccacctatctggcggccggtgcggtcggcctgccggtgttcgccggcggcacctccacgctggccctggtcggcccgagcgccggcttcctcttcggcttcctgccgggtgtggtggtcatcgccctgctgcgcggcaagtccgacacttcgtccttcgcggccgccgcgcgcaccgcgggccgctacctgctggccgcgctggtcggcggcgtcgtggtggtgtacgccttcggcttcatcatccagtccgcgttgaccggtgcgccgctcgccgccgtggccctggcctccatgggcttcgtcgtcggcgacgccatcaaggccgtggtggcctctctggccgccgccggcctgtccaagctcggtcgctgacctgagctactagctagctactggccggctattacagcactcccacatcggcggtgcggaccgtatggtccgtgccgtcttgtgttctcaggatcagtgaggcgtcttcgttgaggccgatggcttcgccggtcagcgtggtgccgtccgtgaaatgcgcctcgacctgacggccgcgcgcccagcacaccgccttcatttcctcgcgcaacgactcggcctggcccttcgggtcggcgatgaacttcgccagtcgttcacggaagccctcgacctgacgttcggccaccgcatcgcgcatctcgccaaacgacggcaagcccgtgacatgcagctgcagcgaagtcgactgcggcgtgggcagccaacaggcacccagcgccagattcaggcctacgccgaacacgatgacgacgtcgtcatcggcatcagcatcagtaccggacgacggcggaatcaccagttccgagagcagcccgcctagcttgagcccgtggcagaacacgtcgttcggccatttgagttccagcaagcagtccggctggttcggcgcggcaccgtattcctcgatcatgccgttcagggcgtccagcgtgaccagtccggcgatcatctgcagccagccattgacggattcgtcggtggcgatcgcgcgcggaatgcgcacggcataggacatcgtcgagcaacggccgggctgactgatccacttgtgaccattgcggccacggccggcggtctgccggtcggcggccaccacggccaccgccagttcgccatcctggtggtcgggcagcgtcaacgacccgtcgccgatcatctgcgcggccagcgcgttggtcgaatcggtttcgtccacggcgaccacatgatccgcgacggctgtagttctgggtagctgcggcgttgcagctttcaatgcaatcatcatggacactacgttacctcggttgcgccgttttttgcccgcgatattccacggaaaagcgcacaaaatcaaccattttgggccggacagcccgtgttagcgttcacaacttcggaaattccgcattcgccgagcccacgcatgcacccggccgtcgtattggcttgcgaacaatggcgatgcccggcagacatcgaatatcaaccgttgacctgtgcggctaccatatattgtcatgacgtcaccagccaccgcgaagcttgccgccgtatccagccgccagtcccacccgcatcttgcgcgcgtgggcgctgccgcgcgctggacactggccgtgctggcctgcctgtggcttgcactgtgctcggcggtcggtccgctgtaccgggacgaggagaacggcaccctcgcccattggaactgggccaatatcgcaatattcgtcgtgtcgttcctgatatatctcggaatcatcacgctgatggcgcgattcgcagcaggccagcgcatactgccgaagaccatcggcgagcgcctacgccaccatcagcagaatagcgaaacatcacggcccgccgccgatcagcaggccagccaaccagccaagacccgtcgtaccgttcgcgctatcgtcacgtccaccgtcactgttctggaccgctggatcacacgcggcacgaaccggttctggaagcttatgctggtgttttttgtcggctggctctgggtgccgaccactctgctggccgcattcggcgcggacctccgctcacagatccgcgaattcagctgggcttggaaccagtggaccggcctgaaacagccctatatcggcttcttctccttcgtgccgatggacatctaccccaccgcgcactacatgtggccgtccgatcccacgtatctgaccgaccagcacaatgtggtactcactgtgttctatggcgcgatagtcacgtttgcgaggcatctgaccggctcaaacgatgccggcatcgtgacgttggctgccctgcagacgctgttcgccgtgttctgctgcgctgccgccgccaatcgattcctgaaccgaccttggataggaaaaacggcaacggattccgccgttcccccacaggccggaggattggccagattcctgattctgctgttcttcatggtctgcccgctggccgtgttttccactatctccatcaccaaatcgccgctgttcgcgttctcgttcgtctggtggttcagcgtctggtatgaactcgtccagacctggcaccccgccggcacccgcaaacatcctcagacccctgccatcgccacgcccgtccacttgccgtgccacagcttcatcgccttcatcctggccacgtcggtgatgctgatttccgcgaaatatgcgtggtacatcatcgctctgcaaatcgtgctggctctgatcgccgaccgcaaacgctgggcgacttacgtcgtggcgctgctcatccccaccgtactgattcacggcggcatctccttcgccatctcctctggtgcgatcatcggcggcgatccaatcgaaagccgcggcgtacagctgcaaatgatcgcccgcgtggctcagcgcaatccggacggtatttcagacgaagccaaaaagaacctcgcgcccgtcttcaatctcgatcagatggccgacgcttactcccagcaggatgccgacccggtgaaatcctccggtattcaggccaagaaggtcagctacaagtggcgcacggtgacgcccgaggatatgaccaatttcaacaaggcatggttcgaaatcgtcaaggacaatccgatcatcgcgctggatgcgttgctggccaaatgcttcggatacttcaatgtgaacgatcagccgtacgtatcgatggattattacgtggccagcgattacgtgcagaaaaactccacatggatcaaggattacaaccatgactggcgtgagcacatcgccggcttcactcgcgtatggggcagtattcccgtgctcggctggcctacgcacggcaatttctacgtggtgatgacattgctgatcggcgcggccgaggtgattcgccgacgttggctcaccctcatgacccatattccgctgctactgctgatgggcgtgatgattaccgcgccggccaataatttcgagcggcacatgttgccggttgcgtttgtattcggattcgtggtgctgacgtattggcgagagtctttggctgaaaggcaacgccaatcagcgacgctacactagtgactatgtcagattttctcgaacttcttgctgccgacgttgtcgattcgtccggtgcatccggtatgccgggtgcgcccgattcatccgattcggccgcacccggcatcaccgcgaccaaccgcgtacgcaccgtgctgttcgagtgcctgttcaatcatctggccgacgaacgagtggagtccctgttcaccatcctcggtttcgagcatgacttcgattgttacaccatcgccggataccctgcccggtccgccgcacgtacggccaaggaaatcgagaaaatcgtggccgatttcggcggtgtgtgtctgaccgccaagcgcccgatcggcaacagcaccgccgtagtggcgttgattcgtccggtcggtgcggccacgccggaaatcatctgcaataccatcgccccgtcgttcgccgccgatcggccaatcgccttgggtccacagcgcaccggtgccgatggcgcgatgcgttcgattcaggccacgctctactgtcttcaggccgcgccggccctggccgccaccgtgcagccattgccgcgcccgttacgcaccgacgacgccctgcccgaacgtgcgttgatcggcgacgcggacgcccgtgacgaactggtccgcgtggtctacggaagcctgacagcagcaggcccggatgatccgacgctgctcaccgtctccacattcctgaagttcggcggttcgctcgagaccacggccaaggagctcaacgtacatcccaatacgatccgctaccgtttgaagcgcgccgccgaatccaccggctgggatgccaccgacccgcgcgaggcgtacgtgctgatcaccgccatcgcgttgggtcgtgtggccgaagcgtaacggaccgcagcgtagtcgggcagaagcataaccagcagaaccgtagccggcaaaggccatagctgaccggacataaccgtccagcccgacagcctagcgggccgaatcaggctgcctgaatttcgcgtacgccatcgcgcagtaacgcggccaaggattcttgagtggctaacacttcgtccacgaatccaccggcggacaggctggcgatcacgcgaccggactcgttgtccacaatcggtacaccgacggcaccgacacccaacgtcacatcctcatccgacagtgcatatccacgttcgcgagtcaagcgaatatcctcgcgcaactgttccacactgaccagcgtgttctcgttatatgccggaaacggcactcctgcaagatagcgttcgacatcggcatcctcgaaatacgccaaggccacgcggccggccgcgccagcatgcagaggcagcacgcggcccgggcgcaggatcagcgaatcgatggcatgaccttgcgcacattccacgcataccaattcagtgccggagaccacactgaggaatgaggtcatgccggtttgcgcggtgatggcatgcatgaccgcaatcgcaggctgccattcggtacgagacgtgcgagcggcatcagccaatcgcagccagtccagtgataatgagtagttaccatccgtatccgttacggcccaccccacatcgaccagtccatccagcacgcggtatacggaggatcgcgggatatcacaggcgtcggcgatatctgccggcgacaggccattctccgccgccaatgcgtccatcacacgactcgccttgtctaaagcgcgggtcggttcacgtttgtcttccgccatcgtcgacgttccttcccctgacttatccctgactcatcatattcaactgttcaggccaagatgatcaccactgtatccaaggcctcgcgacacctcacggccggcagtccgcaccaatcgcaccatgtcttgaaccgatgccgttgccggttgcccatctaccagacaggccagctcaggttccaaggagcgggaaaggccactcagggcgattgccgcttgaatctctccggcgtgattgaataccggtacgctgatagtcacggagccggccatggtctggccgacgtcataggtgaagccgcattcgcgtatatgacgagcctgtcccattgctgtggcacgcatcgtggagaatgtgccgccgagctcgttggtataggcatagtgttccaacagctgctcgtagcgagccgggggaagccaggccgtcagtacatgagagggagcgctcatgctcagaggcaagctattgcccaccagctgtgcatagctttgcaatgtctcacgggtgcgtgtctcgatgcacaccgtgcgcaatcgcctccgaacgaacagaccccagatgccgaactggccgtgatgggcgcggaaggtacggcgagcgatctgctgaatgtccagtctgctttcgatttggccgccgatacgtacgcaatcgatgccaagccgatactcgccacgattgatgccccgttccacccaaccgactgcgacgagattatccagcaaacgatacgttgagcttacgggttcaccagtacgttcgcttatggtttttgcggtgcttggtcccagttccgccaatacatcaagtactgccttggatttcaccaatgcatctacgctacggtcatcacggcttggcgccaccatgcgcgtcacctcctgacctgtttgttgatacctcagacatcttaccgggtattcagcgggttgccgcccaaaacgcactgggccccgacgggatactcctgccggggcccaaggacgcgagatacccccccccacgcgcaagtgtcctgatatgcgggaagccccggtacctttgaggggtatcggggcttcctgtacgtgtggtgcggcggcgtgctactctcccacaccctgtcgggtgcagtaccatcgccgtgccaggccttagcttccgggttcggaatgggaccgggcgtctc

SEQ ID NO: 1909 - DNA, 11279 bp, Unknown
  R17_18m  MAG No. k141_100
tcaacggataaaaggtaccccggggataacaggctgatcattcccaagagtccatatcgacgggatggtttggcacctcgatgtcggctcgtcgcatcctggggctggagcaggtcccaagggttcggctgttcgccgattaaagcggcacgcgagctgggttcagaacgtcgtgagacagtttggtctctatcctctgcgctcgttggaatgctgaggaggcctgcccatagtacgagaggacctgggtggacgaacctctggtatgccggttgtcacgccagtggcacggccggttggctacgttcggaagggataaccgctgaaagcatctaagcgggaagcctgctccaagataagcattccgtgcagcctcgagctgctgtagtccccatgcagaacacgtggtcgataggccggacgtggaagccccgcgaggggtggagccgaccggtactaacggacgaaaggcaacactcatattccccgatccgttcggggaccgcatcatcctcctgcaaacgacaccagacggcaatgagcattgtctggccacaagacgaaacatcaacggcatcgcgtcccctatccggttcccaggccgccacaggccggcagaccttagtgtctgaccgtacaagagaagatttgcggcggccatggcccaggagagacgcccggtcccattccgaacccggaagctaaggcctggcacggcgatggtactgcacccgacagggtgtgggagagtagcacgccgccgcaccacacgtacaggaagccccgatacccctcaaaggtaccggggcttcccgcatatcaggacacttgcgcgtgggggggtatctcgcgtccttgggccccggcaggagtatcccgtcggggcccagtgcgttttgggcggcaacccgctgaatacccggtaagatgtctgaggtatcaacaaacaggtcaggaggtgacgcgcatggtggcgccaagccgtgatgaccgtagcgtagatgcattggtgaaatccaaggcagtacttgatgtattggcggaactgggaccaagcaccgcaaaaaccataagcgaacgtactggtgaacccgtaagctcaacgtatcgtttgctggataatctcgtcgcagtcggttgggtggaacggggcatcaatcgtggcgagtatcggcttggcatcgattgcgtacgtatcggcggccaaatcgaaagcagactggacattcagcagatcgctcgccgtaccttccgcgcccatcacggccagttcggcatctggggtctgttcgttcggaggcgattgcgcacggtgtgcatcgagacacgcacccgtgagacattgcaaagctatgcacagctggtgggcaatagcttgcctctgagcatgagcgctccctctcatgtactgacggcctggcttcccccggctcgctacgagcagctgttggaacactatgcctataccaacgagctcggcggcacattctccacgatgcgtgccacagcaatgggacaggctcgtcatatacgcgaatgcggcttcacctatgacgtcggccagaccatggccggctccgtgactatcagcgtaccggtattcaatcacgccggagagattcaagcggcaatcgccctgagtggcctttcccgctccttggaacctgagctggcctgtctggtagatgggcaaccggcaacggcatcggctcaagacatggtgcgattggtgcggactgccggccgtgaggtgtcgcgaggccttggatacagtggtgatcatcttggcctgaacagttgaatatgatgagtcagggataagtcaggggaaggaacgtcgacgatggcggaagacaaacgtgaaccgacccgcgctttagacaaggcgagtcgtgtgatggacgcattggcggcggagaatggcctgtcgccggcagatatcgccgacgcctgtgatatcccgcgatcctccgtataccgcgtgctggatggactggtcgatgtggggtgggccgtaacggatacggatggtaactactcattatcactggactggctgcgattggctgatgccgctcgcacgtctcgtaccgaatggcagcctgcgattgcggtcatgcatgccatcaccgcgcaaaccggcatgacctcattcctcagtgtggtctccggcactgaattggtatgcgtggaatgtgcgcaaggtcatgccatcgattcgctgatcctgcgcccgggccgcgtgctgcctctgcatgctggcgcggccggccgcgtggccttggcgtatttcgaggatgccgatgtcgaacgctatcttgcaggagtgccgtttccggcatataacgagaacacgctggtcagtgtggaacagttgcgcgaggatattcgcttgactcgcgaacgtggatatgcactgtcggatgaggatgtgacgttgggtgtcggtgccgtcggtgtaccgattgtggacaacgagtccggtcgcgtgatcgccagcctgtccgccggtggattcgtggacgaagtgttagccactcaagaatccttggccgcgttactgcgcgatggcgtacgcgaaattcaggcagcctgattcggcccgctaggctgtcgggctggacggttatgtccggtcagctatggcctttgccggctacggttctgctggttatgcttctgcccgactacgctgcggtccgttacgcttcggccacacgacccaacgcgatggcggtgatcagcacgtacgcctcgcgcgggtcggtggcatcccagccggtggattcggcggcgcgcttcaaacggtagcggatcgtattgggatgtacgttgagctccttggccgtggtctcgagcgaaccgccgaacttcaggaatgtggagacggtgagcagcgtcggatcatccgggcctgctgctgtcaggcttccgtagaccacgcggaccagttcgtcacgggcgtccgcgtcgccgatcaacgcacgttcgggcagggcgtcgtcggtgcgtaacgggcgcggcaatggctgcacggtggcggccagggccggcgcggcctgaagacagtagagcgtggcctgaatcgaacgcatcgcgccatcggcaccggtgcgctgtggacccaaggcgattggccgatcggcggcgaacgacggggcgatggtattgcagatgatttccggcgtggccgcaccgaccggacgaatcaacgccactacggcggtgctgttgccgatcgggcgcttggcggtcagacacacaccgccgaaatcggccacgattttctcgatttccttggccgtacgtgcggcggaccgggcagggtatccggcgatggtgtaacaatcgaagtcatgctcgaagccgaggatggtgaacagggactccactcgttcgtcggccagatgattgaacaggcactcgaacagcacggtgcgtacgcggttggtcgcggtgatgccgggtgcggccgaatcggatgaatcgggtgcacccggcataccggatgcaccggacgaatcggcaacgtcggcagcaagaagttcgagaaaatctgacatagtcactagtgtagcgtcgctgattggcgttgcctttcagccaaagactctcgccaatacgtcagcaccacgaatccgaatacaaacgcaaccggcaacatgtgccgctcgaaattattggccggcgcggtaatcatcacgcccatcagcagtagcagcggaatatgggtcatgagggtgagccaacgtcggcgaatcacctcggccgcgccgatcagcaatgtcatcaccacgtagaaattgccgtgcgtaggccagccgagcacgggaatactgccccatacgcgagtgaagccggcgatgtgctcacgccagtcatggttgtaatccttgatccatgtggagtttttctgcacgtaatcgctggccacgtaataatccatcgatacgtacggctgatcgttcacattgaagtatccgaagcatttggccagcaacgcatccagcgcgatgatcggattgtccttgacgatttcgaaccatgccttgttgaaattggtcatatcctcgggcgtcaccgtgcgccacttgtagctgaccttcttggcctgaataccggaggatttcaccgggtcggcatcctgctgggagtaagcgtcggccatctgatcgagattgaagacgggcgcgaggttctttttggcttcgtctgaaataccgtccggattgcgctgagccacgcgggcgatcatttgcagctgtacgccgcggctttcgattggatcgccgccgatgatcgcaccagaggagatggcgaaggagatgccgccgtgaatcagtacggtggggatgagcagcgccacgacgtaagtcgcccagcgtttgcggtcggcgatcagagccagcacgatttgcagagcgatgatgtaccacgcatatttcgcggaaatcagcatcaccgacgtggccaggatgaaggcgatgaagctgtggcacggcaagtggacgggcgtggcgatggcaggggtctgaggatgtttgcgggtgccggcggggtgccaggtctggacgagttcataccagacgctgaaccaccagacgaacgagaacgcgaacagcggcgatttggtgatggagatagtggaaaacacggccagcgggcagaccatgaagaacagcagaatcaggaatctggccaatcctccggcctgtgggggaacggcggaatccgttgccgtttttcctatccaaggccggttcaggaatcgattggcggcggcagcgcagcagaacacggcgaacagcgtctgcagggcagccaacgtcacgatgccggcatcgtttgagccggtcagatgcctcgcaaacgtgactatcgcgccatagaacacagtgagtaccacattgtgctggtcggtcagatacgtgggatcggacggccacatgtagtgcgcggtggggtagatgtccatcggcacgaaggagaagaagccgatatagggctgtttcaggccggtccactggttccaggcccagctgaattcgcggatctgtgagcggaggtccgcgccgaatgcggccagcagagtggtcggcacccagagccagccgacaaaaaacaccagcataagcttccagaaccggttcgtgccgcgtgtgatccagcggtccagaacagtgacggtggacgtgacgatagcgcgaacggtacgacgggtcttggctggttggctggcctgctgatcggcggcgggccgtgatgtttcgctattctgctgatggtggcgtaggcgctcgccgatggtcttcggcagtatgcgctggcctgctgcgaatcgcgccatcagcgtgatgattccgagatatatcaggaacgacacgacgaatattgcggtattggcccagttccaatgggcgagggtgccgttctcctcgtcccggtacagcgggccgaccgccgagcacagtgcaagccacaggcaggccagcacggccagtgtccagcgcgcggcagcgcccacgcgcgcaagatgcgggtgggactggcggctggatacggcggcaagcttcgcggtggctggtgacgtcatgacaatatatggtagccgcacaggtcaacggttgatattcgatgtctgccgggcatcgccattgttcgcaagccaatacgacggccgggtgcatgcgtgggctcggcgaatgcggaatttccgaagttgtgaacgctaacacgggctgtccggcccaaaatggttgattttgtgcgcttttccgtggaatatcgcgggcaaaaaacggcgcaaccgaggtaacgtagtgtccatgatgattgcattgaaagctgcaacgccgcagctacccagaactacagccgtcgcggatcatgtggtcgccgtggacgaaaccgattcgaccaacgcgctggccgcgcagatgatcggcgacgggtcgttgacgctgcccgaccaccaggatggcgaactggcggtggccgtggtggccgccgaccggcagaccgccggccgtggccgcaatggtcacaagtggatcagtcagcccggccgttgctcgacgatgtcctatgccgtgcgcattccgcgcgcgatcgccaccgacgaatccgtcaatggctggctgcagatgatcgccggactggtcacgctggacgccctgaacggcatgatcgaggaatacggtgccgcgccgaaccagccggactgcttgctggaactcaaatggccgaacgacgtgttctgccacgggctcaagctgggcgggctgctctcggaactggtgattccgccgtcgtccggtactgatgctgatgccgatgacgacgtcgtcatcgtgttcggcgtaggcctgaatctggcgctgggtgcctgttggctgcccacgccgcagtcgacttcgctgcagctgcatgtcacgggcttgccgtcgtttggcgagatgcgcgatgcggtggccgaacgtcaggtcgagggcttccgtgaacgactggcgaagttcatcgccgacccgaagggccaggccgagtcgttgcgcgaggaaatgaaggcggtgtgctgggcgcgcggccgtcaggtcgaggcgcatttcacggacggcaccacgctgaccggcgaagccatcggcctcaacgaagacgcctcactgatcctgagaacacaagacggcacggaccatacggtccgcaccgccgatgtgggagtgctgtaatagccggccagtagctagctagtagctcaggtcagcgaccgagcttggacaggccggcggcggccagagaggccaccacggccttgatggcgtcgccgacgacgaagcccatggaggccagggccacggcggcgagcggcgcaccggtcaacgcggactggatgatgaagccgaaggcgtacaccaccacgacgccgccgaccagcgcggccagcaggtagcggcccgcggtgcgcgcggcggccgcgaaggacgaagtgtcggacttgccgcgcagcagggcgatgaccaccacacccggcaggaagccgaagaggaagccggcgctcgggccgaccagggccagcgtggaggtgccgccggcgaacaccggcaggccgaccgcaccggccgccagataggtggcgacggcggcaccggcctgacgccacggcagcatgagaccggcgagcatcaccacgaacgtctgcagcgtgatcggcaccggcgtgcccggaatcggaatctcgccggcggccgcggacagccacatcagcacggcgaacagcaccggcttccaggatgcggcgacgatacgacgggcgagcggcgtggtggccgctgcggatgcggtggtgtgtgaagtctgcatatcaataacccctatgttgtgtgatatcgccgtgaacggcgggcggtatgcgatggatgaggggaggttccggcgggccgtgcggtatccccgacagcccgaaccgtccatatggtggacggtcccaaatgaatccggccctgtgcgggcgaatcgtgcggcgatggaccgatgccggtccggtcgccttccgttcgcccgcagatgagccttcccccgaacttacggttgccatcgtagaggtgttcgatttcgtgcggtttcgtaccaacttacaaaattgtcgatttcgatttgtcataagttgacgaacgcaaccgtaacgtcaacttcttgaaccggcgcgcaaggatgtgcaatcggcggatttgcaacgtttttgatagccggcgccaacggttacgttgccggaacctacgcgcgcgtttgttcgtagcctacaaaagggcgtgaaagcttttgtgcgaacgcggcttgccctctcctttatatggagagcacaatttgacactatggctcatactgtcaaaaaactgctgattgcgaaccgaggtgagatcgctctgcgcgtggtgcgcacggccaaggagatgggtatctccaccgtggccgtctactccgaacaggaccgcaatagccgctatgtggacatggccgacgaggcatacctgctctccggcgacacctacaaggacacgtacctcaacgaggatctgctgatcgacatcctgcgcaagaccggtgcggacgccgtgcaccccggctacggattcctttccgaagtgccgagcttcgcgcagaaggtcgaggatgccggtgccatctgggtgggtccgcatcacaccgcgctggtggatttgggcgacaagatcaccgcccgccgagtggccttgcgcgccaaagtgccgccggtgcctggcctgtccgaaccggtgaccgacgtgcgaacgctgctcgacttcgcacacacccacggctacccgatcatgatgaagcgcactgatggcggtggcggccacggcatcaccgtggtgcatgacgacgaggagctgcgccgcttctacatgaaccacgacgcgctgcaaggcggcgatctgaaggaatacttcatcgagaagttcgtggacaaggcacgccacgtcgagacccagtccgggcgcgactcgcacggcaacttcaccgtgtactccacccgtgactgctcgctgcagcgccgcaaccagaaactcgtggaagaggcgcccgcgcccttcctgtccgaggaaatcgtcagcacgctggaggaatactcccgccgcctgttcaccacggtcggctacgtgggcctgggcacctgcgaattcatggtgacaccgaacggcaaagtgtacttcctggaagtcaacccgcgtctgcaggtggagcacaccgtctccgaagaggtcagcggcctcgacctggtgcgcgaacagctcaatatcgccgccggtggcgagctcacccgcgcccccgaaccgcgcggccacagcttcgaactgcgcatcaccagcgaagacccggccaccaacctgacccccggctccggcaccttggagaagatccagtggccggccggccccggcgtgcgcatcgataccggtgtggaacagggcgacaccatctccccgaagttcgattcgatgatgggcaaggtcatcgtcactgcccagaaccgtctcgatgccgtggcccgtgtgcgccgcgtgctcgacgagctcgtgatcgaaggcgtgcccacgccgattccgctgttcaaggagatcttccgcaacgacgacttcaccgccgagcatggccatccgttcgccgtgtccaccaagtggctggagcgcacgtacctgaaccgcacaccggcttccgccgcctccggccagccggcctccttggccaccgccccgggtgccgctgccccggccgcgcccgacaagtccaagtcggagacgttcgtcatcgagatgaacaaccgccgcgtcaagctcaccgtgccactcgacatcgtggagaacatcaccggctcggcccgcgcccgcggtgccaagcgccccacccagccgttgcgcggcgcaggcttgcacaacgtggcctccggtgccgccacggccaacgacggtgccaaatccggcgtcatcgcctccccgatgcaggccgtggtcacgcgcatcaacgtgtccgaaggccagcaagtggccaagggcgaccttctggtggtgctcgaatccatgaagatggagaactacgtgtacgcgccggccgccggcgaagtgaagaagattttcgttggcccggccgatggcgtggaggccggcgacacgctggtcacgctggacgtgaacgccggcaaggccaaggccgccgacgccaagaaggagggcggcaatgactgacatcatggattcgccggccgtgaaggccgcggctgcggcctcggccgccaacgccgcccagccctcggcccaccagccgctgcgcaccgccgtggtcaaggccgccgaactggcccgcgccgccgaagagcgcgcccgcgacaagcagcacgctaaaggcaagaaaaccgcgcgcgaacgcctcgacctgctcttcgacaccggcacgttcgaggagatcggccgcttccagggcggcaacatcgccggcggcaacgccggtgcagctgtcatcaccggcttcggccaggtctacggccgcaaagtggccgtctacgcccaggacttctccgtcaagggcggcaccctcggcaccgccgaaggcgagaagatctgccgactgatggacatggctatcgacctcaaagtgccgatcgtggccatcgtggactccggcggcgcccgcatacaggagggcgtggccgctctgacccagtacggccgcatcttccgcaagacttgcgaggccagcggcttcgtgccccagctgagcctgattctcggcccctgcgccggcggtgccgtctactgcccggccctgacggacctcatcatcatgacccgtgagaactcgaacatgttcgtcaccgggccggacgtggtcaaggcctcgaccggcgagaccatctccatggccgaccttggtggcggcgaagtgcataaccgggtgtccggcgtggcccactacctcggcgaggacgaatccgacgccatcgactatgcgcgcaccgtgctcgcctacctgccgtccaacagtgaaagcaagccgccggtctacgcctacgccgtcacccgcgccgaacgcgagacagccaagcgactcgccaccatcgtgcccgccaacgaacgtcagccctacgacatgctcgaagtgattcgttgcatcgtcgattacggcgaattcgtgcaggtgcaggaactgttcggcgcctccgcgctcgtcggcttcgcctgcatcgacggcaagccggtcggcatcgtggcgaaccagccgaacgtgctcgccggcatcctggacgtcgactcgtccgagaaggtcgcccgattcgtacgcctgtgcgacgcgttcaacctgcccgtggtcaccctcgtggatgtgcccggctacaagcccggctccgaccaggaacacgccggcatcatccgccgcggcgccaaggtgatctacgcctacgccaacgcgcaagtgccgatggtgaccgtggtgttgcgcaaggcgttcggcggcgcgtacatcgtgatgggctccaaagccatcggcgcggacctgaacttcgcgtggccctcctcccagatcgcggtgctcggcgcggccggcgcggtgaacatcatccaccgccacgacctggccaaggccaaagcctccgggcaggacgtcgatgcgctgcgggccaagtacatcaaggagtacgagaccagcaccgtcaacgcgaacctgtcgctggaaatcgggcagatcgacggcatgatcgaccccgaaca

SEQ ID NO: 1910 - DNA, 12959 bp, Unknown
  R17_18m  MAG No. k141_107
ggcgcgtgtacgtggacagcgcttccaggtaacgccgcgaaccttccgcatacagcacgccaagcgccagcgagctctttcccgaaccggagacgccggccacgcccaccagttcgcccagcggaatgtcgatgtcgatgtgcttcaggttatgcacgcgcgccccgcgcacttcgatcgcctgcggccgttgatcgttgcctatgctcggcactgctccgccaccaccttactgtctgacctattatcaagcgtcacgccgttgcctctttctcgacctcgccctccctcgccgccgccgcacgagcttcatggtctccagtatcatcacgaccaacgacggcagccgagaggctttcgctattgagcaccgcctctcgcatgcagttcgccgcgtcattaccgaaactatccgcgtttagcataatgagttcacgggcggcgggcataatggcaatagaagtccatccacaccgaaggagccccgaggatggaactgcgcgtcctgcgatattttctggcggttgccgaggaaggcaatatcacatgggccgcgcagttgctgcgtatttcccagccgacgctctcccgtcagctcaaacaattggaagaggaactgggcgtcacgctgttcgaacgcggcagtcacaccatcacgctcaccgaggaaggccggatgctgcgcgagtgtgcgcagaccaagtcaatacgagttcctgcgcaccggcattacaaagcactggtcagcgatggttcccggaaaccacccgttggcggaacgcgaatcgttgaccccgcagaatctcaaggatgtgccgctgctgttcccggtgcgcacgcccgtacacaatctgctgctgaactggttcgggcaatacgccgatcaaggcggagctcaacgccgggtatcacacgccggaacgcacccatgagcttttcgaggaactggtgagccatcctgttgaccccacgttccggttgaacgcgccattccgcaccgacttcggccgcaacgaacacggcacgcagggagccgtcaagcgagggcgtgaaggtggcgaccacaccgaatacggccacgccgatcgcgccgccgcgcagaccggcagcttcgccaaggccggccatcgtctgcatatttccacaccggcggtggccaaacagatcaatacgttcgaaaaagaatacgatctgacgctgttcgaccgatcacgcagtggagtgcaactcaccaaagccggcaaggagttcgtcgaggacgcacagatgatcgtgcgccaatgcgaggagagtctacgtcgtgcacaacggtgcagcaccgacggcatcgccaccgtccgccttggcgtttccatgctgcgccccggccgccgcatcctcgacctatggcagcgcgacgccggcaagcacaccgacatccgcctggaactggtgtcgatgcccgatgactccgaagcgatcaacgacatcgtcacccacctcggcgaggacgtcgatctgatatccacggccttcgacaccggctattgggacgacacctgcaacaccctcgccctcgattccgagccgctgtgcgtggcggtgccgcgcaatcacgcactggcgagacgcgcacggctcacattgaaagacctcgaaggcacacgcagccgcattctcaaacgtcatcgcggcgccaacgacacagcccgggacctgtcagaacaatgccccgccatcgatttgatcgacatcgaccattacgacctcgacacgttcaacgactgcgccgaatccggcgacctgctcatctccaaaccgatgtgggccggcattcacccgcagctcgtcaacgtggccgtggactggcccgaaccggtcgtcatgcactacggactgctctacccgctcgacgcaagcccggcgattcacacattatggaatttctcgccgcagacggagatctcgaaccgtgaccgtccaacgaaaccgcgccgatgctccggcgtgaagtgcggtaatctctaagaaaaggccattgtgtcgagatggcggggcaacgggcagcgttgcggatttgggctgaggccccgtcgcttgcggtgttacatattgtgacgatgaggagggcagcatggaggccgcagagagcaggcagccgacgattttcgatgtcgctgcggaggccggcgtctccaagtccatggtttcccgcgtgatgcgcggcgaagggggcgtgcgtcaggagaaggtggaccgtgtgctcgccgcggcgaagaagcttggatacgtgccgagcgccatggccagcgggctcgcctcgaagcgcacgaaaacgctgggagtggtggtcaggaacgcgaagctgcctttctatgggtttcttcagggcgccatgcagaagcgggcgcgtgagcgtggctatcagatggtgtccatcagcggcgtggaggaactgtccgcggatgatgcgcgccaggcgctgcgcgatttgatcgccctgcgcgtcgaggggctgatcgtatgctccgccatgcttgcggtggaggatttcatgccgttcatcgaccggatcccgttcgtgatggccgggcacgaggacacgacgtgcaccgtgtcctcggtgttttgcgatgaggaggacggcggccgcaggctcgcgcaatacgtccacgacttcgggcaccgggaggtggcggtgtttctggtgcccagggaatactcggtcagccagtacggccgcggcatggccatgatcgagctgctcgggcagctcggcatccgcgtgaaggtgatggatatgaaaggggccgaagaggttggaacgctggtggacgaggtgctgtgccatcccaggatcaccgcgtatatgtgtccgtccgacgtggtcatgctcaatgtgatggacgagttgcgccggcgcgacgtttccgtgccgcaggatgtgtccgtcaccggctatgacgggtttggcccgctcgcgtcgccgtaccttggatttaccacatatcggcagcctttggaggagatcggttcccgcgctgtggatctggtgctcgagcgtctggatggcggggaccacgccgtggaggcgctgccagtaaagggggaattcatccacgggcgcaccgtggcgctgccacgttggaaagacgggcgatagacgggcaataggcggaacggaagccgcatcccgcgccgcaatcccatgcacccgcgcgtggtggcgacggagcgatagcacccgtcgcccgaggatgcatcacagtggcagcagatcgagcccgttggctgcggcatagcccaggatccaggccatgggcagggttgccgcccatgcgatgaggatcctgcgcgcctcgccccagcggaccttgcgccagtcgttcgtctggcaggtgccgatgagcgcgcccgatatggactgggtcatgctgaccgggcttcccagcgccgagctgacgagcacggcggcggaggccgcccacagggtgacccagatctgccgggaatccggcacgatggtgccgcgctgcaatgcggctgctcccttgggcatgccggtgagcacgccggtcaggaacgtcgcggcgacgattgcggtgatggcggcgctgtgcgtggcggttcccaattcgactcccatggcggtgccgaacaggacgatcatcttctgcccgtcattgctgccataggcgatgcaggtgagcaggaatccgaggaagaccatggtggtcgaggactgcggggttctggattggaacagcaggtagatggtgcgggagatggcgaacgccaccagaggcgaaagtatcgctatcccgaggacgcgcagcaccagatgccattggggatgtccgccggcgaagccggctccggaggatgctccgaccagggcgagcgtgatcgaggtgggcacgccgcctccgttgagcgccagcagggtggccgatgcggcgacgagcaccgtcgccagcaggagcggactttgtccgccggatccttcggaggagaccatggcgacgatggttcctccgacgcggctgttggcggccggcagcaaggccaccgccgtcgccagcatcaggaagggggccgccgtgacgcggcgcgcggccttgaggttgatggccaccaggggagacccgtcgttccttcctccaagcaggcagaacaccaatgccaacatgggaataacccacatatctcaccctccttgctgagaacgctcccaatactgtaattattgagtttataaatattagcactgaattcagcgaacgttcatctttagcctgaaatggctgtatatcgtcgattagactttcttatgtcgaaaggatatactatgaatcactgggagcgctccgaagatggagtgcccccccccatacaacaacggatatagatagcagcaaatcagcaactcgatacgccgcgtccgtcatcggaacggctgcggctcacaaccaaaagacgtaaaagggtattacccatggctctcggcaaggcaatgccggagccggagaaagaaaggaagcgcgagatggcgtcatcaacccatttgtcgcaatccccgcacggcgccaagacgcacggcggacgcacggcgaacgttctcgttgcgaagaatcgcctgaccggtgcggtcatgctggttccggcattggcattgctggtcgtgttcgtgttcggcccgctggtgcgcgtggtgatgatgagcatgcagggcacggacatcttcggttcgccctcaggcttcatcgggctggagaactacaggacggtcttcacggacccggcgtttgtcaaggtgcttatccagacgttcctctacgccgtgctggtcgtggcggggcgcatcgccttgggcgtgctgctggcgattctgctgacgaggcacatcatgggcatcaagatactgcgtgtggccatgacctcgatcgtcagcgtctcggtggcggccgcatcgctgggcttcctggcgttgttcggttcgagcggcgtgatcaattcgatcatcgagaaactgggcatccggccggtcgggttcctcaccgacgcgaagtgggcgttcttcacggtcaccttggtgaccatctggaccggtctcggattcgcgctgatcctgttgtgcgccgcgatcgacggtgtggaccaggagatcctggaggccgcgcgcatcgacggcgcgaacgaagcccgcatccagtggtccatcgtgctgccgctgatcacaccgacgctgttctacatcgccgtgaccacatgcatcgaggccctgcaggcgttcgcccagatcaacatcctgaccaagggcggaccaggccaggcgaccacgaccatcacctacaacatctacaccaccgcgttcaacgcgggcagcgcgaatttcggcatcgcgtccgcactgggcatcgtgctgttcctgttcgtgttcgtcctgacattgctgcagttccgcttcctggaaggcaaggtgaactactgatgatccgcaagacctcccccgtgagccagggcctgtgggccgtgctggccctgatcgtgaccgtgctggtcatgctgccggttctgtacatctacgtcggcgcgttcttcttcgacgccaacggcctgttcaagggcttcaccctgggcaatttcatgcgcgccatgtcccagatgcccctgacccagcagctgggcaacagcatcgttgtgaccgtctgccagaccgcgggccagattgtcaccgcgttcctcgcggcctacgcgatcgtgttctgcaacctgaggcgcccgggcatgtggatgatggtgttcctcatgagcatgatggtccccggcgagaccacgctcctgtcgaactatctgaacatcgccaactggggcctcatggacacgattccggcgatcttcctgccgttcctcgtgcagggcttcaccgtgttcctgttccgccaggcgttccgctccttccccaaggagctgcgcgaggcctccctgatcgacggcgccggccatctgcggttcatgatcgacgtgctcctgcccatcgtcaagccgaccatcatcgccgcgacgatcaacgccatggtcgccgcgtggaacggctacttctggcccctgctcgtgaccaacaagcccgagcaccgcaccattcaggtcggcatcacccagctgagcggcaccgacggctccaacatcggcgtggtcctggccggcgcggccatcgcggtcgtcccggcgatgatcctcacgctcctgttcaaccggtccctgcgcggcatgagcgtcgcgggcagcatcaagtaacccctggccgcggccgtccacgcgacggctgcggatcgtgggccgatccccatccgtacgacacaagaaaaaccaacaaaaccattttttccggccggcggccgtcgaaggccgtccggcgcaacgagaaaggaaacctatcatgaggaagtcaaccctgctgaaggcggtcgccgtcgcggtcctgcccatgctcgccctgtccgcatgcggatccacgtcggacaccaacgccgacgccaagggcggcgagcagaccgtcacgttctggtactcgaactccggtccggccgtggacgccatcaaccagctcgtctccgagttcaacgacgcccacaagggcaagatcaaggtcgaggcctcctaccagggctcctattctgacgtgcagcagaagttctccgccgccgtccaggccaagtccaccccgtcgatcctgcagatgaacgacacgtccaccggctacatgatcgacagcaagatgaccaccccggtctacaagctcgccaagggcgactccgatttcgacaccgccgacctgcagcccgtggccctcaagtactacagcgacgacaacggcctgctgtccctgccgttcgccatcagccagcccgtgacctacatcaacaacaagctcgcccaggaggccggcctggacgtgtccaacccgccgaccacgttcgacgaggtcgtggactgggccaacaccatccacgagaagaccggcgcgtacggcttctcgatgaacatggtcgactcgtggattctggagatgctctccgccagccacggcgagctcatcgccaccccggacaacggccgcggcggcaaggacgtcaccggtgtgaacatgacctccaagactcagctcgacatgttccagaagatcgttgacatgttcaaggacggcaccgccctgaaccccggcaccgactctagctccatgatgaccgcgttcacctccgacaagctcggcctggtcctgacctcctccgcctcctacacgtccctgctgcccggcgactccacctcgaacgtgaccgtcgcccagttcccgcatgacgcctcgaacaagaaggccggcaccccgatcggcggcaactccctgtggatcgtggccgccgagcactccgaggccgagcagaaggccacctgggaattcggcaagtacatgatggccccgcacgcccaggccgtgttcgccaaggcctccggcaacctgttcgccaacaccaaggccgccgacgagaccgaaggcaaggaggccctggccgacccgaacgtcaaggtcttctacgagcagctcgaggccaacccgtccaccagcgtgtccctgggtgcccgcaccggcgcctacccgtccatccgcaaggacgtgatggcctccttcaacgaggtcgtcagcggctccaaggacctcaagaccgccatgcaggaggcccagacccagtccgctaaggacatcgccacctacaacaaggccgcaggcaagtaaacacccgcgatacccgcaacccaatcggccttcccgccccggtcttctctcccggggcgggaaggcccgtatcacccatagcctcccggcagcagcaaaggagccgacatgaacaccgcagccacccccattcgattcggacgcgaacaatacgcgcagatcaacgccaatctcaaccaggcatgcgcccgctcgccgttcgtcatcgccgcccaccgcggcaccccgcgcggcgacattcgcgagaacacgctcaacagcgtcctcgccaccaagcaagtcaacgcagacatcgccgagatcgacgtaatccgctccaccgacggcgaatacttcgcgttccacgacggcactgaaatggcccgtctacgcatcaccgacgacatcctgtccaagactgccgccgaactcgacgaactgcgctacaccgaataccccggagcctactacggcaacgtcgaacgggtcgcgcacatcctgtccaacgcgcccgacatcctcatcaacatcgaccgctcctggcgctactggggcagcggattcctcgactggctcgaccagttccacctggaaagcaagctcatcctcaaatgccccgtcaccggaggcttccagcaggccctccacgaccacgacgtcaaatacatgttcatgggcatgatccagaacccagacgaactcgatctgttcgtcgacgacgagcagatcaacaccgtcggcgtggaactcgtcgccaccaccgaggacaccccgctcgccgaccccgcgatcttcaacaggatcaacgaactcggcctgtacacgttcgtcaacgccctcgacctgggcaacggatactgcggcctcaagggcatggacgacacccgttccatcctcgaaggcccccaggcaggctggggcgccctcctcgccctcggcgccgacgtcatccagaccgactggcccgagaaactcgacgagtatcgccgggtcatcgcctgattccggcggttctccgcgatttcccctcagcggctcctctgcgtttccggaccagcctgaaacggcgcccgttctgggctggtccggaaacgcagaggccgctgccttcgccgcgacaacgaacgaaagaaggtgccacaatgccgtggttcagcgccaagaacgcgctcgcagaggatcccgtcatggggctgctccgggaacaggtgacgacgacccgcaaaggagtgtccatcgcgttggacgccgtcgaggggcatctgagcgtcgatgaatccagaaagagcgtcaacgatatcgagcacgagggggacgaggtccgttccaaggtcgttcacgcgttggccaaagcctggaccacgccgttggaccgtgaggatttgttccgtttctcccgatccatcgacgacgtgctcgacaacacccgcgatttcatacgcgagatccatctttggaaaggacatgccggcgaacacgccaatgtcgcgttgacccacgtgaacgtcgccctgcacgatctggaactcgccgtgaccgcggaaggcgccgacatgcgccgatactgcctcgaggccagcaaggaatccgcccgcgtgcggcgcgcctacgaatcggggcttgcagccgtctacaccggcgaaatgagcatggacaccctgaaaacccgagatctgctgcgccgcgtcgacgtcataggcctgaggcttggggagtcctccgacgccatcctcgacgggctcgtcaaacgcgggctgtgactcaccggaataccgcaaagggaaaggcgcgaatatgcgcaggaaactgattcttgatttggatacgggcatcgacgacgcgctggcgatcggatccatcttctcgcgtcacagacagtgggccatatacaacggcagcttgatgcgttctccatccacttcgagttggcggggatgcagaacgtattccttgcccaatcgttgggcataccttttgcggaatttgtcgagcgaagatacgccgtatcgtttcgtggatttcacttcaatcgggctgatgcgaggcttcatcgcggcattatcgtattcccgaacgatgaggaagtctatttccatggttttcgtggcatccgccctatccgagcgcgagaagaaatacagtttgcgcccattcgcccggaattgctgagccaccgcattctccaccagcattccttcgttgagcgagagtttatcgaacagaatatcccggtacacatcatccggcgttgtctctcgatcggcaaacgcctgcgacaccagcaaaccggtatccgccatatagcatttgaatgaatcgttatcttcgtacaatcccagccccaccaaagggtcagtcgaattacggcacaggttcaccaagcgggcgtcttccaaccagaagaacgccgaatcgtattcacgagatcgagcatccttgtcgaccgatgccagagtgaatcgtttctcatgcttggacagctgccctggaatctgagcgaaaatgccccgcacacggccggcatcgccattggcgaacttgccgatatcatcactgtacagctgcaggatgccacgcttgatcaaatccacatcgccaaaatcgcgctgctcgacataatcggcaaccgcctgcggcataccgcccaccagcagatattcgcgccacagcctcatcgctcgtttgtgcagcgcatcgggcaacgggaccagacgctcgaacgatttgcgaatcgtttcagcaagcagctcctcccccatggcccagcagaactcctcaaaatcgagcggccccatgtccattttccgttcctcggaggggatgacgatattcgccacatttctcttgatggagatcagcgaaccagtttccacatagtcataccggccatccgcaaccagatatttgatgagctccctcgccgccggataccgctgtacctcgtcgaaaacaatcaacgattcacgctcatacagtcttgtgcggtaatacgcagacaacagcatgaaaaatgtgtcaaagtcatcacgctggttttcgaagatgtcgcgaacgtcacgcggcaaacgcgcgaaatcgatgagaatatatgacttgtactgagtgcggccgaattcctcgacaatggtacttttgcccacgcggcgagcgccttcgatgagaagagcctcacgcccacccgctttttgtttccatgcgatcagcttatccagcatcttgcgcttcaacatgagcaatcacctcattacacgaaaacaacagtataggcatatgctattctacacgaaaacagaggtatagaggtagccgattctacacgaaaacaacggtatggaaacatgcaccgaaccggctcacccccaatctctcccccccatcacaccggcggcctgttcgattgtgcggttttgtgcgaatggctcacacggttcttagtgagaaccgttctctgcgcacctgaccctagaaccggatcagcgccttgatgaccttgcgctggtccatcgcctcgtaggcgtcctggatatggtcgaggtcgtactcggcggtgaacacgcgaccggggttgatttcgcccttgagcaccgcatccagcagaccgtcatcgaggtcatagtggcgcacgggagccgggccgcccttgatgccgatgttgccgtagaacgtgccttcggcgctgatctccacgtcgtgcggcaggcccacacgaccaatcacgccaccgcggcgaatcaggccaatcgccgtgtcgaaggactgcttggagcccacgcattcgagaactgcgtccgcaccatagccgccggtcatctccagcaccttgtcaatagcctcttggccacgctcgggcacgatatcagtcgcaccgaattcgcgggcgagcgccgcgcgatcctcgtgacggctcatggcaataacgcgcgtggcaccgcgcattttggcggcaatcacaccgcacaggccaactgcgccatcgcctatgaccacggcggtgtcaccgggcttgacctcggcagaaaccgccgcgtgataaccggtggacatcacatcggaaacggtcagcagcgaagcgagcgtcgcgtcatcgtagtcttccggcgaaccgggcaccttgaccacggtgccgtccgcctccggtacgcgcaggtattcggcctgacaggcggagaagtagccgccgtgagggcatacggattcgaagccggccttgcataccgggcacttgccgcagctgtacgggaatggcacgaccacgaaatcacctggcttaacggattcgaccgccgcgccaacctcttcgaccacaccgatggactcgtgacccacctggctgtgcgcggcctgtccgctcagcccacggaagaaccacaaatcagagccacacacgcacgtgcgcaccacgcggatcacgatgtcatcatcctgttcaagcgtcgccttcggcacttcttccacggccatcttgccaggctccacgaaaatcgcagctttcatggtttcagacatacgttcataactccttgttttccggcatcgagcgcttaaggcccgttatcctcgtgttctattagacaataatcgccttgcattaaccaatagccataaaccatgtttcgccatacccatgaggtatggcaacaaccgagcaattcactgcgataggccaatatccgagatacgctcactgttcgattcgtcgccatgagtaatctggagaaccggcgatgggacccgcctgaacttgtttcgaaccgcacactgctgatagttcctacacacgatttgacattgcatggaatcgttgtgtcttcagtaggattcagcggtttcaggaaaggctattatgggctcgcaatccccatccgcagatgcccggccgggcacgcgcacggccactcctccggcgcacaaactccccgatatccatcttgatattgtgttggtcgtcttctgcggcggtgccatcggcaccgcgattcgctatgcgttcgcgcagattcccgcagccggcagcttccataccggcacgtttgtggccaacatgctggcctgcttctgctatgcgggtctgaccgcctatttggccggctcttcccggttcgacacgcgtgccaaggagctcaccagccgtgggctcggcatgggcgtatgcggcggtttgtctacgatgtcgacgttggcattggaaggcttcaccgcaattcgcgac

SEQ ID NO: 1911 - DNA, 26963 bp, Unknown
  R17_18m  MAG No. k141_662
ccggtgttaccggagttgttgccgccggtgttgccggcattgttgttggtatcggtgttcgtgttgttgccagagctgctgttgttcttgtcgcctgtgttgttggcattgttaccggacgactcgtgctgattgttggaaccggaatcggccttgccgttatcggcggagtcggattttttgtcggaacctttatcggtatcagacttggcggcgcctacggcgatgatctggtcgatggccatcgtggtgacggtttcggatttcagcgtctccgattcggccacgccatcgacatacgtgacgttatacacctgggttttctcgccattgacgccttgctggcggatctccgactggccttcaggcagattggagtcgatgatggtttgtgtggagtatggcactacggctgtgcgcgtttcctcgccatgcgtcacgcgccgtacgcgcaggatagtggtatcgccgtccttttcgacgctcacacggtcctctttgttcagcacgatgcctttggagtcaagaatggaggccgcaggcagtttgccgttgggggccacggaagtcttgccgtccgcaatgacggtgaccgggccatcctgattgatgaccagtccgccggtgagctggttgtacacattgtcgatgtcgacggtgatttttgtggcgttgttctggttttcctcgaaaaatcccagcaactggtcggcactggtggccacggtccagaagggaacggacgtgccgtcgatgttgatagtggtctggtaggcggactgtacggtgaccacggcatgattggcgagttggtcgccggacgaggtagtgacgatatcgtgggtcttgatatccaccccttgttcttccagaagacgggtggccgtcatcgcatatgtggtgacttgggtggtttgcccgttgatgttcagggctacggatttacgcgcggtgaacgcgaatgatccagccagcgcgatactggtcgccgcgatacaggcgattacgcggatgcgacgcagtgtaacaaaccgctgcggggtccaacgccgtgccattgccatactcttcctgctggatgaacgattacgccacccatcgtaacggttgttccggcccgtactgcggtttcaccggccaccgtcaccattcctgctcgtcagattgttctgagctcaaaaaaagaaaagaaaaagggggcgggagagaaggggatgttcccgcccccctgaaggcgcggagctggttgggggacgctccgccctcattccaggaagcccatagttgggggaaggctcctggagtacttacccaaggtaagaattatatgcgtagaaaagtctacgtatcatataatacgccacttttctacgcgtcgagcctcttgtcgggatcgaaccgacgacctgccgcttacaaggcggccgctctggccatctgagctaaagaggcgattgttcttaacgcgtaaatcgttttgaacaaatctctagtataccggtagttctcgagtggtcaattcaggccgagccgcgccggtaattaatcggccagcgaaatcggcttcttgttggcgccgatcgatggcatctggccttccacgcccacctgatcggagtccaagccgatggacttgaggaatccgtccaccatgctggtgtccgccagcgtgagctgcttcagatcccagtattcgccattgatggtgagcgtgggggaggagaacgcgccggagctgttgaacagttcggggcgtaggatcgtgtagttgttggaggcggtgagccacttgacgtattcgttcttaccactgaatgccgcggtggccacatcctcgctcacgccggcattgacggcctgcttctccagcttggcgttgcttaccggctcgtaattggacaattcgcccggctggaaatcctcagcgtagatgttggagaggtagctcatgaggtgatcgggattgtcatcatgctcggcaatgtagatggcaccgttgaacgcgcggttggagtagttgtcggagctcttgttgtcctggaaattgaggaagtgcaaatcgatgttgagctggccggcgttcatcagcttgatgagcgtcgggtcaagctggcggttcaccgaggcgcagccggggcacagcggctccatgtagatggaaacggtgggcgccccttcggccttctgaccgtaccccttgctcgagatcacgaagccggccttgtcatcggcgttggccggctgggtactgactttcttgagcttgctataggcctcgtccacggtcatgttgctttgctggctactgctgctggtgttggacggccgcatagccttgtatacggcgaatccagcgatggccaccagcaccacaataatggccaccacaatgcagccgatgatggtctgctgcttacgttccttagccgcctgctcggcccgtgcctgctgggcggcctcctcggccgctcggcgctcagcgcgtgtggcacgcttggcctgacgcttcggatctgacatagctatccccttgcaatcgcttcaatgtttgggccccatcataatgaccgggcctgaggaggactgcgcccagagctgatctgaggtgaattccctgtaaaagtgtgacggaacgaacgtatcggatacacaacggccatgtgtgcggatggctgatgtgtgagattccgccccgctctaggcgaacggcatccagttgatcggcatgcccagaatcggcatcgcgcacaaggccacggtgatgatggcccatatggtgaacagcacggtgccgcgcccgccgcccttgggcgccggcgccactggagcaggtggagccccacccacttcggtggatggcgcgcccgccgggcgactgtgtttgagcccgcgcagtacgccgccccccagccgaatcatcatcgactgtggggcgaacacagtgaccagccagccgatggccatgaaaccgcccagcgccagcccggaagcggagaacggcacatcattgagcaacggcaccggaataccccaatccgcggtgaaataccaggagatggtgtgaacgggcagtgccagagccgcggtggccacggcggttcccgccatatagatgatgactagcagcagtatgcggggaatggccagcagcagggctttgaccagatgccagggaaaagtcgccacgcgaatccacgaatcggagtttttgcgctcgccgccgcgtttgccctcgcgctcaagctggggttcggtgttataggccagggtgagcagtagccacaacaacgcagtggccgcgatgatggccacgagcggagcatttgccgccagtgccgccagcggcgccgccagcaggatcaatggcagggtgccgcgctgcagatattcccctcgcttcacgtccaccggattgggcatgggaggattttggaccatggtttcggtgggggccgcttgggcggtttggtcgatgatgcgctgcaatgccgggcgaatggcggggtccaccgctgtgggctggttgcttgcgggatcccagctgctctgggcggtgccggacggggggaatgatgacggctgcggcgtggggagtacggtggtgcgctcggccagcggcgtggtcggggccggagtcgaatcggtgttggtcattggtgtggtggcgccggccattggtgtggtttggtccggcatcggtgtggtcgcgccggtgagtacctgtgtgccggcgtcgtcggtgaaatcggcagcagcgtcgggcaacagttgcgtggcctgctccgcaccggccggcggacgtggcggcatatcggctaagggcagcgtggcggtagcggcgccagccggcgagaatacggcggtttcgccatcgccgttatcgcccttattgccggagaacacggccatggtgggagcctcagcggcttcctcggccgcgcgccagatggttcggggattattgcggtcaacgccgccggccgcgccaaaagggggcatcgcctccgcggcttcggcaacgatcgcagccggttgtccagccacggctcccgcggcgaacggtcccgcctgctcgccctgccaagcgttgggattcaacgcatccaaggcgatggcattcagcaattgatccggcgtgcaacgatccctgcgatccgggtccagtgcagaatggaaggcagccaatgtgccggccggtagtccggaaagattcgcgttgcccgaggcctcgcgctcaagtaccgccatcatcggcttggtgccgaacacaggcgcgccggttgcggcaaaagcgagcacggacgccaccgaccaccaatcggtggcgtcgtcggattcggcaccgtcaataatctcgggtgcgatgaatccgggtgtacccatcactaggccggtgcgggtcacgtgactttcgccctcgcccatcgcgataccgaaatcgaccaataccggtccggcggccgacaccatcacattggtgggtttgatgtcgcgatggacgatgccggccgcatgtacggctttggtggcttcgatgagcttgcgggccaagcgttccagatcgtcgcccacataccggccattggcggccacatcatccttaagattcttgccctcgatgagttcagtgacgatgaacgccaacgtatcgtcgagttccatatccacgatgccgcacacacccggatgattgaccttcttcaaggccatggcctcgcgccgcaggcgctcgcgcggcgtgacatcgggcttgaggtcggggtcgtgcagggccgtggacgcagagccggagcctgccactgactcgtcggtcagggagtcgcgcagaatcttcatggcataggtggtgccgccgtcgtcgcgcacccgccacaccgaccccatagctcctgagccgagccgggagatcagcgtatacccaccaaccacttcgccgggctcaagattcaacgcgttcaaatcgctcatgccctccatcctaatgccttgccggtgcattattctggctctctcctgggaggccgagcttgatatttcttggctcccctctctgagaggggagccaagaataaatgccgtttacgtattgagaagtgccgtttacgccattaaggtcgattgccctgaccggatgtggtagcaaattatgcgctcgaaatgacaggataggtgcgtgggcaggtgcgccagtcgtgaatttgcgactctataaccatcggcatcaaggatgtgtcggcggtgacccaaaggtgagccagccgggcacattcaacagtggcacagcgatgcaagggcagtatcgtgagccgctgatcgaatcgataacgatatcagattcgaatgccgcgacttcgccggtcgtaccttcgaatacttctccgaagacggctacctgttcggcgtgatggcctcccagcaggtcgctggcgctcaggccaaggcctgaggtgtgtctccgataactgaatagctaaatagaatggacggcctgctgagtgctactcaacaggccgtccattgtgtatctgaatgcgaaaagtcattatatggaacggaatatatcgatactgtgcattgtgccgattactgattccgacgcaagtattcgcgcaggaagggcacggcaaaatcgacttcgcctcgttctgtttcgcggataacgaaggcgtcaaggaggcgtttgcggtaggtggcggcatagttaggcgttttgcccatgcgctgtgcaacattcacggtgggagagggaccatctgacgctgccatggcttcgagatactcacggtcgtttttggataagccttgcaactccgggatgcacacggcgttatcaaggtcaatacgtgcttcctcgatacctgccgtaacatcagcgtcgatgatggtatccgagtcccgcatgtctgcggcatcccagatatggtagccaaccagttgaatcatataggggtatccggctgtcacattggctgcagtgcttaattgagcgtcggtgatggacatgccggaggcgcggaatgttgtggcgaaagcatcacgcacttcatcaagaggaatatctgtgagcatgttcgttttcgcgcgacgtaggaacgtgatgacttcgtcattgaacaaatcagaaatcatctgtgggagaccggcgaacacgatggcgatattgcgtcgttccctgatttgatgctgtatggcagtggcgatggcaatcatgtcggatcgctcagccgcttgagtctcatcaatggtgataagcaacccagcatggcgcttctcaagcgcatccaaccgtccggcaatggcacttctcaacgtttcgggcatacgcttcggggatagttcggcttctccgaggccgatgcccgctccagcaaaagtcaacgatggtcggatagtgaggtggtcaagggcccctcgcccggttcgtaaggcatcaacaaggcgttcgcatagtccggcagaggccgtttcttcgatgacatcccatctgcgcgctttggcccggtctccgaacacagtgagcatcacggtttttccggttccacgagcgccggtgacgagcataatgcgccctggggcaccgactccgttatcgagacctttctcgaaatcgcggataactttgcctcggccgatgagcaggggcggttcccctcctgccgttggcttgaatgggttttcctttgccttcatgtggaccgcctcctcgctgaatcaacctaaaataaaaattatcaaaagtatcaaaaaaataaaaattatcaaaagttgggttgagtcgactgaagaaaacagccgtggcgacaatgattctgccgcaatccgcggtgacaacaactgacgcggaccttcttggcagaatcgttgtttgtcccgtttcgccaatcaacgtcgctcaagttcggtgcgcagaccggctaccgtagcggtcagctcacgcacttcctcgcgcaataggtcgatttcgggattggctgatgttgcaatagcctcttgcgcggcttccttggccacttccttctcccgagcgtcctcgcgccgatccgtctccagattgacctgatccacgatccacgaagccagcgtggccgtcacaataccgatcaacgcgatgccggtgaacatcagcaccaccgcaatgatcttgccttggaaggtgaccggcgagaagtcgccatatcccacggtggtcacggtcacgaacgcccaccacaacgccgtgccgaagtcggtgatcgtggatccggacgccccgcgctccacggaatacacggccagcgcgcccacgtacatgagcattcccaccgcgccgaccgcgtatacggtgatgcgcccgcgcaccgccatgccggaggtgcggttcagcacgtgcagcacggtcagcaaacgcaacagtcgcaagggccggagcatcggcagcgcgatggtcagcagcgtgaacaggttgtgcttgaaccaccgccagcgatcgtcggccaaccacagcgagaccacataatcgacgacgaacaccacccagatcacgttgatgacggtttcacacagcgcgatatgcgtgcgggagagaatttcccacgaatacaccaccagaaacaccacggacagcaccatcagcggccagtccgtccacttcttccacgtcttcagtcccatattccgattgtagtggcgcgtccgctgcgccactgcggagcatgactccggacatcagtgttgtatacgttcgtatacatttcacgttgtgtacgaacgtatacagcggtatttttcatctcgtatttcccttatgactatcaccacagtgatataatcaagaatatgtaaggagagagaaggagccggccaatggagaccgcatcgatcgaactgtggcatggctcttcgcatgtcatcaagcatcctgaatacgggctggtcaagccgaacaacgattatggccgcggattctattgcacgcgcagcgtcgagctggccaaggaatgggcgtgcgcgggactggatgacggtttcgcgaatcggtacacgttgaccacggacgggctcctcttcctggacctgtcccagccgccctacaccatcctgaactggctggccatgctggtcgaaaaccgtcgtttccagccgaccaccgccgtcgccgcgcaaggcatcgaatatctgaaacaagtgtttctgccggatgccagtcaggctgacgtcatcgtcggatgtcgtgccgacgattcgtatttctcgttcgcccgcgcttttgtcaataacgcgatttccatcgaccaactcgctgaggcgatgcggttgggcgagctcggcaagcagatcgtactcgccagtcctcaggcattcgcggcactgcggttccaaggctgcgaaatcgcccgcgcttcgacctaccacggattgcgtaacgagcgcgaccgcacagctcgcgaagcctaccgccgcaaaagtgcagaagccgatctcgacggcctgttcatgcgcgacatcatccgcgagaaagtgaccaacgatgatccccgcctatgatgagacatacttgccggacgccatggccaacttggccggcgccttcgattatgcgctgaacgattgcgggttgccggtcggcctattcatggacttcttcgccacctccgaggcggccgcgcttttcgggcgaggcacgcccaaatacgtgtgtggcatgtccggcgaggagctggtggccgaaatcatgcggcaaaccggttgggcgcgcattctcgatatgccgccagccgcactgcgcgccggctcaacacccgaatactgggccggatgggtactcgcatactgccaatggaccaggggagtgcggttctcggacattctcgatgtgctgtcgctcgacgatatcgtgcgactgtacccgactctgcacgaagccgacgaaagccgattcgtcgacgtgtacgacgagcgggccgcccataatcgcaccgagggcgactcccggctgcacacgatccgcgtgcgcgccggactcagccaatccgggctggcccgccgctccggcgttaccctgcgctccatccaaatgtacgagcagcgccgcaaagaccttggcaaagctgccgtctccaccgtgctcgctttggcccgcacgcttggctgccgcatcgaagatctgttggagccgtaaagacgcggagtagtatcgcgccgcatcgattctgataactgaacaactacttttaaggcccggccggatgctcgtttggacatccggccgggccttctggctccacacggggtgccgaggtatccgttctccgcttcgaggggctgatttggccttccgtagaggtttactcccgtttcgaggggctggtggcccgctagaacacgggtataaacggcttcgccccaccgtcattccgccattttggggatgcgcttacttgagtaccagcccctcgaaacggagatagatctccggaaagggtcaaaacagcccctcgaaactcaagatggcggttgcagggcggttgaggatcagtcgaagagcggttcaaacgcaaatgtgaacaatgccacatgtgattgggcgggtcgctgcacgccgattttcggggggtgcatgggaatggcggaatatcaacgaaaaaccctatatctaggtttgttatgtgacacgcgccactacatatagtgccttgatttcaaatcacaccgctgtaatatggccttcgcttcactgttcatcagaaccacatcaaggggagtcgccatgaccgtcaccgtgttcaccaagccgcattgcccgcagtgcgatgccaccaagcgccagctcaccaagctgggtgtgccgtttgaaaccgtggacctgacgcagaacccctccacccttgagcagctgcaggccgccggtttccagcaggctccggtggtcatcacgccggacaactcctggaccggctaccgccccgacctgattcgcgaagtcgcccagcaggtggccgccgacaaccgcgccgccgccacggtgtccgcgtgagtctgagccagcccgaattcgcggccgaaggcaagacgatcggcgcattggtctacttctcgtcggcctccgaaaacaccgcacggttcgtggccggatgccgtttgcaggacgaaggcatcaacgtctaccgcatcccgttgcgggccgccgacccggcgctgaacgtccgcgaaccgtacgtcatcatggtgcccacctatggcggcggcgtggtcaagaaagcagtgccgattcaggtcaaacgcttcctcaacgatccagccaaccgcgagtggattcgcggcgtcatcgcctcaggcaacaccaatttcggtgaggcctactgtgccgccggagacatcatcgccgccaaatgcaaggtgccctacctctaccgttacgaactcatgggcaccccggaagacactgccgccgtgcgaaacggcctcgtccgcttcttcaccgaacagtaaatcttgaccccctcgaggtattggctcccctctccgaggggagctgtcaacgaagttgactgaggggagcaactgtctgagtaaacacacttctgccatattccaaggatttccaatgactgacctcaccgccaccggcctgccgctcgacaatactgccgacaccgcagcggaacagtacgacccggcgcacgattaccacgcgctcaacgcgatgctcaacctctatgacgccgacggcaagatccagttcgacaaagacaaggccgccgaacgcgaatacgtgacagggcacgtggccaccaacagcaagcggttcgcctccaccgccgagcgtctcgaatacctgatcagcaaccagtactacaaccctgcggtcttcaaccagtactccgctgaattcctcgaccgcatctacgagcacgtggaatccgccggctttgagttcggcactttccttggtgcgttcaagttctacacgtcctacgcgctcaagacgttcgatggtcgcctctatcttgaggacttcccgcagcgttgcgccgctgtggccctggagctcgccgccggcaatgagcagcaggccatcgaatacgccgacgaaatgcttgccggccgcttccagcccgccaccccgaccttcctgaacctcggcaaggcccagcgtggcgaaccggtcagctgcttcctggtgcgcatcgaagacaacatggagtcgatttcgcgcggcatcaacgcggccctccagctctccaagcgcggcggtggcgtggccctgctgctgagcaacctgcgcgagctcggcgccccgatcaagcacatcgagaaccagtccagcggcgtgattccggtcatgaagctgctggaggactccttctcctatgccaaccagctcggcgcacgtcagggcgcgggcgcggtgtacctcaacgcccaccaccctgatatcctgcgcttcctggataccaagcgagagaacgcggacgagaagatccgcatcaagtcgctggctcttggcgtggtgattccggacatcacgttcgaactggccaaacagaaggcccagatggccctgttcagcccgtacgacgtggagcgcgtgtacggcaagccgttcgccgacatctccgttaccgagcattatgacgagatggtggccgacgaccgcatcaagaagacctacatcgacgcccgtaagttcttcaccaccatcgccgaactgcagttcgaatccggctacccgtacatcgtgttcgaggacacggtcaaccgcgcgaacccgatcgaaggtcgcgtgaccatgtccaacctgtgctcggaaatcctgcaggttcaggagccgagcgcatacaacgaggacctcacgtatgcgcatgtcggccgcgacatctcctgcaatctgggttcgctcaacatcgctaaggcgatggatggcggcttgggccacacggtggagacggcaatccgcgcactcacctcggtggccgagcacaccagcatcaacgcggtgccttcgattcgccgcgccaatgaggagggccacgccatcggtctcggccagatgaacctgcacggcttcctggcccgcgaaggcatccagtacggttctgaagagggcctcgacttcaccgacatgtacttcatgaccgtggcctaccacgcctaccgtgcctcgcacgcgctcgccgtggagcatggccgcacgttcgccagcttcgctacgagcgactacgccaagccggccggccagggcaactacttcgacaagtacaccgatggtcgtcgttcgctcactccgcgcaccgaacgggtccgtgcgctgttcgaacagtacggcatcgcgatcccgactgcggccgactgggaggccctgcgcgacgcgattctgaaggacggcatctacaaccagaacctgcaggccgtgccgcccaccggctcgatctcgtacatcaaccattccacgagctcgattcacccgatcgcctccaagatcgagattcgcaaggaaggcaagatcgggcgcgtgtactacccggccgcctacatgaccaacgacaacctcgggtactacaaggacgcctacgagatcggctggaaggccatcgtcgacacgtacgccgaggccacccagcacgtggatcagggactgtcgctgacgctgttcttcccggacaccgccaccacccgcgacctcaataaggcccagatctacgcctggcgcaagggcatcaaaaccctctactacatccgcatccgccagcaagccctggaaggcactgaagtccaaggctgcgtctcctgcatgctctgatcgttcgagggagcgtataccgcctttcttcggcactcgacgtaccttcgtacgccttcggcctcagacggcggtctccgcacgcattgaacaaccagagagccgttgttactcccctcactcggctaacgccgacagctcccctcagagaggggagctggccgcgaagcggactgaggggggctccaccatctaaggaaccaacaatgtcacgaaccatctatagagcactgctccggctgaccgcgccggaggagttcgaaaacaaatccaacgacgataacgacaacgacaacgacaacgacaacgacaacgagtaataaggaacactcatggcacctatctccattccgcgcaaaccgctgaaactcatcgaccgcgtctccgcaatcaactggaaccgcctcgaagacgagaaagaccttgaggtctgggaccgcctgaccggcaacttctggctgcccgaaaaagtccccgtctccaacgacatccccagctggcagaagatgaccgaggacgagcacacgctcaccatgcgcgtcttcaccggcctgaccctgcttgacaccatccagggcacggtcggtgccgtgagcctgattccggacgcgctcaccccgcacgaggaggccgtgtacaccaacatcgccttcatggaatccgtgcacgccaaaagctactcgtccatcttctccaccctgtgctccaccgaacagatcgatgccgcattcgactggagcgagaacaacgagtttctgcagaagaaggcggaaatcgtgctcgactactacgagggcgacaacccgtacaagcgcaaggtggcctccaccctgctcgaatccttcctcttctactccggcttctatctgccgatgtacttctccgcgcacgccaagctgacgaacaccgccgacgtgattcgtctgatcatccgcgatgaggccgtccacggctactacatcggctacaagtaccagaagggcatcgcccagctgagcgatgccgagcgtctggatctgcaggactacacgtacgacctgctcaacgagctgtacgacaacgaagtggagtacacccagtcgctgtacgaccgcgtgggcctgaccgatgacgtcgagaagttcctgcggtacaacggtaacaaggcgctgatgaacctcggctacccggctttgttcccggctgagatttgcgatgtgaaccccgcgatcctggccgccctgagcccgaacgccgacgaaaaccacgacttcttctccggctccggctcctcctacgtgatgggcaaagccgaagaaaccgatgacgacgactgggacttctaagggtttcgcggtccgcgaacccgcagcgccgccgcgttcgcacgacggcgctacgctggaggcatggaacaggagccgttggtcagcatcatcatcccggtatataaggtcgagaaattccttgatgaatgcgtgaagtctgtggttgcgcagacctatcgcaacctcgagattctgctggtcgacgacggctcgcctgacgactgcccggccatgtgcgacgcctgggccgcccgcgacccgcgcatacgcgtgattcacaagcccaacggcggcctgtccgacgcccgcaacaccggcatcgccggggccaccggtgcgtacatatacttcgccgattccgacgacaccgtggcccccacgttggtggaggactgcctgaacgccatgcgcgagtatgacgccgacctcgtgatgttccagttcgacaccatctccgagaacaacaagccgctgctgtccaactatcgccacaacgacttcaccgaggtgcagatcctgaccccggtcgaggccatcaaaaagcaggtcaaggctgagatcgacggctatttctgggccttcctggcacccgcctccacctatcagggcaccggattctccttcccggtggggcgcaaaatcgaggatctctcccgtatctgcaacgtgatcggcgaggccacgcgcgtggtccgtctgcccaaggcgctgtaccactaccgcatgcgcgagggatcgattaccgccaactgggatccgcagctcacccgcgactggacccgcgccgccgacgaccgcgaggaatacatcgtccaccgattccccgagctcaagggcttcatgacgctgcaacagctgaatttctttgccaacctcgattacgagaccatgcgccagtcgctgatcgccgggctcaagatcgatcccgaggacgccgacgcgcttcgtcgtcgcatcgagggcctgacccagtccgccgatgagggcgatgagcccgtaccggaaacgttgcgtgagttgctcggactgctcaagctgggcatcaccaaggtggccgatggcacgttcggtaaggccgatggcagcggtactgatggcgatgccgagaacgatgacgtaacgctggccgaccgtttccgcgacatgcgcgaggactggcgccagctgcgcatccagcgcatcgaaaacgccgaggagcgcaaggccgagcgcaaagccgcccgcaacggcgtcaccttcgagtctgtgttgcattagtcggcgactgatggaatccgtcagttcgggaaggcaggcctgctctacgccgggcgtgccggttcgcacgttcgagaaacaggcgtgtcatgggccgaaccacacaacacccccagaaacgcccataaagttaactacattttcagacacgccacttgccttggtccacggtccgtgtatagtagttctcggctcaacgaagagaaccttcactgaaccggaaaaaagtaaacgctgaagcttgcagtttccgaaagcaaagttgtacgtcggtggcgagggcggaagcgcagtaaagaacaaatccctttacaacggatcgtgaggcacgtacctgcctctgaaaggattagtaattatggcagaagtcgttttcgaccacgtcactcgtatctacccgggcaacgataagccctccgtggatgatctgaatcttgatatcaaggatggcgagttcctcgtcctcgttggcccttctggctgtggtaagtctacgacccttcgtatgctcgccggcctggaagaggtcaacaagggccgcatcctcattggtggcaaggatgtcaccacgatgcagccgaaggaccgcgacatcgcaatggtgttccagaactacgccctgtacccgcacatgaccgtggccgacaatatgggcttcgctctgaagatcgccggcactccgaaggaagagatccgcaagcgcgtcgagaaggccgctgagatcctcgacctgaccgagtacctcgatcgtaagccgaaggctctgtccggtggtcagcgtcagcgtgtggccatgggtcgtgcaatcgtccgtgagccgaaggtcttcctcatggatgagccgctgtccaacctcgacgccaagctccgtgtccagacccgtacccagatcgctgccctgcagcgccagctgggtgtcaccaccctgtacgtgacccacgatcagaccgaggccctgacgatgggcgatcgcatcgccgtcatcaagctcggtatcctgcagcaggtcggtgctccgaccgagctgtatgatcgtccggccaacgtcttcgtcgccggcttcatcggctccccgtcgatgaacctgaacacccacccggtggtcaacggcaaggcgaagatcggtgaggacaccgtggacctgccggctgaggccgtcaacaagctcaccgccgaagacaacggccagatcgtggtcggcttccgtcctgaggacgctggcctggccccggctgacgacccgaacgccttctccctgaaggttgtgaacgtcgaggatctgggctccgatggctacatctacggcaacatcgtcaccgatggctccgccgctgaggcttcccaggtcatgtccgaccagaacaagctcaccacgattcgtgtgaatccgcgtgcgctgccgaaggttggcgcgaccgtcaagatcaagatcgacccggccaagatgcacctgttcgctccgtcgactgagctgcgtctgaactaatagatacttggcgaggtctaatcgcttcgtcaaccattaaacgaggttattctcttcctctcttatgacctcgttggaaaagccctgcatagctgcggggcttttctttttgccttctagacggtctgagggagagaccaaacggtgttttcccgtaaacataacgcgccgaagtcgtggccaaggagcacacatcgcgaacgacacgtaaaatcgaacacatggagttgaacgaattgccccagatggatccgcgtgcgctgaaggccacgtctgtcaaagccgaagacgaacacgccgattcagcggaaccgcaagcactgaaaatcaccgccgccagctcgaacccaaagatgttcacgctgccctggcacaagcccttggccacctggcctgaggacctgctggccaacctgccgcgaggcatctcccgccacgtcgtgcgattcgtgcacgtgggcgacgaggtgtacgccatgaaggagatcacgcgccaggtggccgagcgagagtacgagatcctgcgtcgactgcagaagctcgaactgccaactgtgaccccgatcgccgtggtcaccggccgtcacacccgtgaaggggagccgctggaggcgattctggtcacccggcacttgaagttctcactgccgtaccgtgcgctgttcgcccgcaacctgcgcccggacaccgccgaacgactgatcgacgccctcgccgtgctgctggtgcgcctgcacctggccggcttctactggggcgatgtgtccctgtcgaacgtcctgttcctgcgcgacgccgacgctttctccgccttcctggtggacgccgagaccggtgacctgcaagtccagctcaccgacggccagcgcgaatacgatatcgacttggcccgcaccaacatcatcggcgaacttatggatttggcgtccggcaagctactgcccggcgacgtggatgagatcgaggtgggcaaccgcctggtcgaccgctaccactcgctgtggagcgctctgaccgacaccgacaagttcaacccggacgaaatgtggaagatcgagcagcgcgtcaacaagctcaacgagctgggcttcgacgtggacgagctggaaatgaagaccgccgaggacggcaagcgtgtgctggtccgcccgcgcgtggtggacgccggctacgccaaccgcaagctgctgcgcctcaccggccttgacgtgcaggagaaccaggcccgtcgtctgctcaacgaccttgacgcctaccgtgcctccacgtggcgtgagggcgaggatctggaaatcgtggccaccgattggatgcgcgaggtgttcgagccgaccgtgcgtatgattccgcgcgaatatcgctcccagatcgagcctgctcagttcttccatgaggtgcttgaccatcgctggttcctggcggagaaggccggccacgacgtgccgatgggcgaggccgtgaccagctacatcgacaacgttctgccgagctacaaccttgattccaaggcactcgccgaacttaacgaagaggccgattccggcgtcattgacgacgaatccacctacagcgacccggacgacgacggctacaaccccgatgacgatccggatgcggcagtgtggagtcattaagcggacaatccaatggactgtctgtcggtgagcccatcacacaaagaagcccctcaaatagaggggcttccgtgtatgtacaacctattacggcctcaagcgacaatcactccgccgcagccttgcgccgtgcgttggacaccgcgtacaggctgatacccgccgccactgaagcgttcagcgactcaacagacgagctgatcgggatgccggcaatcgcgtcgcaggtttcgcgcactagtcggcccaaaccgctgccttccgaaccgagcactacaacgagcggatcggattcaaagccggtctcgccgacgagcttatcgccgccaccgtcaaggccgacaacgtagtatccacgctccttcaagccctcaagtgccttagtcaggttcaccacgcgcgccaccggcatatgcgcggccgcaccggcagacaccttccaagcggcggcgttcactgaagcggaacggcgttccggcagaatcacaccattggcaccgaatgcggccgccgaacgaatcacggcgcccaggttctgcggatcggtcacgccgtccaaggcgatgaacagcgggcgcgcagcaatacgggcggccgccgaattcgcggcctccattgccttggccttcttctccgcgcgatcggccagttcgttcaacgaggagtactggaacggatcgaccttcagaatcacgccctgatggttgccggaacgggcgatacgatccatctccagacgatcggcctccagcatgtgcaggccgttcataccagcgattttcacgatttcgcgagtacgatcgtcatgttcaatacgagacatgatgtacagcgtggaagaaggtacgcctacgcgcagtgcttccagcacggaattacggccgtacaccagatccgaagtatccgccgaagcgaacttgtccactcgacggcgggctgccagacgcgggtcggccatctgccgacgttcggccgctttcttggccttatacgccttgtgatagacgcggtcctcggctttgggagtggggccgtaacccttcagtttgttgcgatgcttgccacccgaccccttggtcggtccttttttgatagccataggtgctattgtcccagcaccccgcgccaaaacgcggctattccgccgtcggtagccggtaaggtattgagagtgaagaagcagcgcatgatattcggactgtccctgctgtattggggattatggttggcgattctgattctgtggatgggtcgcttcgtgacctcattcttgtcgatatatttggtttccgcgctgcgcctcgatgagggtgtggtgggcacagtcgtggccatgtacggcttcggcgcaatcatcggctgcctgttcggcggtaccttgtccgacagattcggccgccaatccatgattatcatcggcgaaatcggcgcagcggctgccctgctggtcgtttccgtgctcactgaccccgtggctttaggcgcggccctgtttgtctatggtgcgttcgcctcactgcccagcccggtcatcgccgcgtatatcgcggatgtggtgcccgccgaacgtcagcaacgtgcgtacgtactgcaatcgtgggcgattaattttgggtacgcgattgggccgattgtggccaaccagctggtcaagatctcgtattcgctgatgttctacgttgaagcggcggtgatgatagccgtcacgatattgctgattgcgttcttccgcgaggtgcggcatttggggattactgtatcggtgccaagtgcggtgcgccatgaagacgaacgcagtgttacgcatgcggaattcgccggcgtcgaggggccgaatcactcggatgccgcaccggctgccagtgccaagggctccatgtctcgtaattggcggcgcgtgctcactgatacgccattcctcggcttctccctgctgatgttcggctacttccttgtgtacttccaaagcacctccggcctgcccattgccatgacggaccttggtctagggctgggcgagtattcggtgctgctcaccatcaatggcggtatgttgtgcctgctgcagattcccgcgatgaaactgttctcgcgcatgggcaattcacgcgtgctggtgatgggcctcgccgtaaccgtcatcggctatgcggtgcaggccgcggcccattcctggggcggattcgcgcttgccgtagtgctgtggacgctgggtgagctgggcacattccctatcgccaccactacggttgccgccatggcacccgcgtcggcacgcggcacgtaccagggcgtctacaacgtagtgtggtcggtatcgattgcgctggcgccgctgattggtggctggaccatcagcaacttcggcggtcgaacgctgtggatcgcctgcacgatagtcctgatcgccgtaaccctcggtctcaagctcaccaaaggcttgcgcgaccgcgccatggccgccaacctgcgcaatgcctcacagtaaataattcccgtcaagaaaagtgtgaggcatccgaacttttccgcacaatcaaacatggtccgcaacggcgggatctcactgatatgacgctctgcatgtgcgattgaggcatcgtaatcctcacgcttttcttattgagaatcattctctgcgatacgttctagaatcatcacaagcaatgcgccatatacaacggcagatataggcggtctccttcaacgcgcattggtctaggatgcagcacatattgcatgccgacccggctgtcgaatttattcttgaacttatcgagcgatgaggttttgtatctctttgtcgatttgacctccacggggcagaccctggccttcatggcggcatttgaatactccccgataaggagaaaatcaatttccatgcggtccttcgcctgacgggaatatcgggaatagaagaataggcgatggcctgaggcccggagctgctgcgcaacgacattctccaccagcatgccttcattcacttccagcttgccgaacaggatatcgcggtacaactcattcgacgtgtatgcgcggtcggcaaacacttgcgttactaacaagccggtgtctcccatatagcatttcatcgtggagtcctcttggtgtaggcgcaggcccacatgcggatccgtggcattcatgcagcggttgatcaggaacgattcatccaaccagaagaaagcattgccatattcacgttcgcgtgcgttttcgcctaaagacgacagtgtgaacttcttttcatgcttggaaagttgccctggaatttcatcgaagatacgtttgacccgttctttcgaatctccgccgtatttctctatgtcctgagcgtacaggtgcaaaatttggcgtttcactcgatcgacattgcccatatcggatgttcccagataacgctctacggcctgcggcatacctcccaccagcatgtattcacggaacaggcgttccgccttgttgtccagcagcggagacattgctcgcctgtccgcaaaagattgccgtatcgcatcggcgagtagttcttctcctctggcccatagaaattcctcaaaatccatgggaaacatgctcaccgattcttcctcggagggaatcaagatgttttcgacattcttcttaatggagatcagggagccagtctccatgaagtcatatcgaccatccgcaacgagttgtttaaccgcgctgcgggcaaaggggaagagctgtacttcgtcgaaaataaagagggtgtcacgctcatgcaggcgtacgccgtaatagacggaaaggtccatgaacagcgtgtccaaatgatccagattgttgcggaacgagtctcgtaccgcctgcggagccttctgccagtcgataaggatgtatgagcggtattcgttcttcgcgaattcctcggcgacggtgcttttgccgacgcggcgggctccttcaatcattaacgcagtagtacccttgctcgctgctttccatcgccgtagatggtcgtatacttttctcttatacatgttaagctcatattcctagtattttcaaggatttatgagctattatatcacgattcctaagttatataatgccgtaaaactcactattcctaggttatgaattgctttgattctcacgattcttaagttatatgtcgagctgtcgaatgctctgtaacggtagtgcggcatacgttcttcacgattcgctgtaagcgttattcggtttggagatacgggcaagaccgcatatggtgagtggttcttatcgagaactattctctgcgcgtatgatgtatggcatgcaataatccaacaaaccatcgctggcattgacggcaacgaggcgcgattctttggctatgtggccgacaacagcgaggagatggaaccggaccgcatacgcccggccatcctgattttgcctggtggcggctacgccatgacctccgaccgcgaagccgagcccgtggagaatacgctaatgctcatccaggcctgccgggccgccggcgtgagcatcgaagcacacctgttccccgaaggcagccacggcctgtccctggccaatgtggaaaccgctggcaacggcttctatgcgcacatcgtcgaatgcgtgcagtgttggcctgatttggctgaagcctggttgcgtcgcctgttctaggcaaaacgctattacgctgtgcgccaagtgcgccacgcagttatggaataatagcaatcgtatgcatcggcagcagttgcgccgatgtccataaccgcgcagtcctgtgcgtccagccgggagagaaaacccggcagcggccgcaaggctgactactccgcggcaataccaaggagaacattatggatgatctcaaagatcaatccgcagtgtccgcgaccgcaacgaacgaggtcgtggaatcggaagaagtgcgcgcgcaggaagcgctattgggggaagctgatccaagtctgaccagtgccgacgacgtggccaaagccctgaatgtcgacccatcccagggcctgagcgaggaagaagccaagcgtcgactggccaaattcggcccgaatgagctcgccaccgccccgcccgtaccgaaatggaagaaattcctggcccagttccaggacccgctggtctacctgctgatcgcggccaccatcatctcggtgatcgcatggttcatcgaaaaggccaatgcgcagcccggcgcggaaggcggtgaagtgctgccgttcgacgccatcgtgatcattttgattctgatcgtcaatgccgtgctcggctacatgcaggaggccaaggcggaggccgcggtcgaggcgctcgcccaaatgacggccccgcagacctcggtgctgcgcggcggcaaagtcatgcgcatcaacaccgccgacgtggtccccggcgacatcatcgtccttgcggaaggcgactcagtctccgccgatggccgactggtcaacgcggccagcctgcgcatcgccgaggcttccctgaccggcgaatccgtgccggtcggtaagaagccggacacactcaccgaagccaaggcgctgggcgaccgtgccaacatgatcttcaacggcacttccgtgacgcaaggcaccggccgcgcaatcgtgaccggcaccggtatgaacacgcaggtcggcaagatcgccgacatgctctccgccaccgaagatgagaaaaccccgctgcaaaaggagatggattacgtctccaagatcctcggcattgcggtgtgcgtcatcgccgtcgtggtgctggtggcgctcgccgtgctggaaggcttcgacgacgtccatgacgtgattgattccttgctgttggccgtctcgctggctgtggccgccgtgccggaaggcttggccgccatcctgaccgtggtgctggcgcttggtgtgcagcgtatggccgcgcacaacgccatcgtcaagaaactgcattcggtggagaccttgggctccgcttccgtgatctgctcggataagaccggtacgctgacccgcaacgagatgaccgtggagcgcgtggtcaccccgtccggcgcagtgcagatcaccggcaccggttacgcgccggaaggccgcatggttatgaccggtggcgtcagtcctgaatccgagcaggcccagattgtggccgatgaagtcgtcgccacgcttgtggccggcacgctcgcgaacgacggcgaactacgcgaggagaacggccgctgggagatcgtgggcgaccccaccgaagtctcgctgatcgtggccgcacgcaaggtcaaggccgatcgcaagatcaagcgctacacgcgcgttggcgagattccgttcacctccgaacgcaagcgcatgtctatcatcgccaaggacagcgccgattcagacaagctcaccgtgttcgccaagggcgcgcccgacgtgctgttgagctactgcacgcgcatccgcgtgggtggtcaggtccgtaagctcaccgaaggcgatcgccagtcgattctcgccaccgtcgaacgtctctcctccgaggcctaccgtacgcttggcgaggcctgccgtccgctggaaaccagttctttggctgatgtgcccggtgtaagcgtcaacgccgcaggccaggtgtccgacatcgccgatcaggccgaagccatcgaaaccgatctcatctggaatggcatggtcggcattatcgatccgccgcgtactgaggtgcgcgactccgtgaccgaggcccatcgtgccggcatccgcacggtgatgatcaccggcgaccacccgctgaccgccgcccgcatcgcctccgaccttggcatcatcgccaaggacggcaaggccctgaccggcgaccagctcgaccagctgcccgatgaggccgcactcgacaaggccacgtccgaagtgtccgtgtacgcgcgcgtggcccccgagcacaagctcaagatcgtcgaatccttgcagcgtcaaggcaacatcgtggccatgaccggcgacggtgtgaacgacgccccggcagtcaagtccgcggacatcggcgtggccatgggcatcaccggcaccgaagtgaccaagcagagcgccaagatgattctggcggacgacaacttctccaccattgtggccgccgtacgcgagggtcgcgtgatcttcgacaacatccgcaagttcctgcgctacctgctgagttccaatgtgggtgaggtgttcaccgtgttcctcggtgtggtgtttgctggcttcctcggcatccgccagccggaaaccgtgggcgtcaccgtgccgctgctcgccacacagttgctgtggatcaacctgctgaccgatgccgcgccggcgttggctatgggcgtggacccgcagaccgacgatgtgatgggtcgtaaaccgcgtaaggtgacggaccgcgtgattgacgcctccatgtggggcgacatcatcttcgtcggcgtcattatggccatcgtcacgctgattggtatggacatgcacctatccggcggcttgttcaccgaccgctcggtggatgccatcggccatgaagcgcagatgaccgaggcccgtacgatgggcttcacgattctggtgtttgcccagctgttcaacgcgctggcctcccgttcgcatctgcagtccgcattcgtgggtctgttctccaacaagtggctatggggtgcgattggtttgtccgtggcgctgcagctcgtggtgatttacgtgccgttccttaacggtccgttcggcaccgtggcattgagcccgatggcttgggtggaatgcatctgcctggccgcaatcgtgctgattgcctccgagctacgcaagattgtgctacgcgcgatagccaagcgttaagccatcgcaatagccctgattgtgggcatatagcagtgggccgggctctggtattcagggcccggcccactgctatatccaaacggctcctcatggggcggtaattatcccatggggcggtaatttcctcatggggcggtcgctgaaaacggcgttattccgcgaaaaaggaaaatgcgctaaccgccccatggggaagttaccgccccatgggaaacgggagaacgctgcagacctcagttgtggctgccgtcggggccgtcagtagaggtggacccgtcttgagacttctgctgtgcctgctgcttggccttctgctgtgcctcttggtcggccttccgctgagcctcttcctgagcttgcttggcggcatctgcctgctgcttggcctgcatcgaggcagtgacgtcggactcggccttctgcagtctagaaatcgcattgttgacgtcggattcggacggactggtcccgttcatcaccgtattggcctcggtgatggcgttttgcagcgcggtgcgggtgttctcatcggccacactgcccgcggaattatccagcgtgccctgcgcctgcgaaatagccgagctcaggttcgatttcagtgtgtcggtatcggccgtcgcctttgaagtattaacggccttgatcgcattgttgatggcatcc

SEQ ID NO: 1912 - DNA, 10962 bp, Unknown
  R17_18m  MAG No. k141_713
atcgactaccgcaacgtcgacccgcgcctaggcaccatggaagacttcgacgcgatggccaaggccgcgcacgaggccggcatcaaggtgatcgtggacatcgtgcccaaccacaccgctgacaagcacgtgttcttccaggaggccctcgccgccgagcctggctccccggcgcgcgaccgcgacatcttccgcgacggccgcggcgagcatggcgaactgcccccgaacgactggcaatccttcttcggcggtccggcctgggcgcgcgtggccgacggccagtggtatctgcacctgttcgataaggcgcagccggacgtcaactggaagaatccggacatccacgaggagttcaagaagaccctgcgtttctggtccgaccacggcaccgacggcttccgcatcgacgtggcgcacggcctggccaaggacctcgaatccaagccgttggaagagctcggccgcgaatacagcgtggtcggcgtgctgaatcatgacttcagccacccgctgttcgaccgtcgcgaggtgcacgatatctaccgcgaatggcgcaaggtgttcaacgagtacaacccgccgcgctttgccgtggccgaggcgtgggtggtgcccgagcaccagcacctgtacgcttcgatggacgagctgggccagtccttcaacttcgacttcgcgcaagccaactggtatgccgacgagttccgcgaggccatcgccgccggactcaaggcggcggccgaaaccggcggttccaccaccacgtgggtcatgaacaatcacgacgtgccgcgcaacccctcccgttacggcctgccgcagatcaagggcgcgccctaccaccagctgccgcacgactggctgctgcgcaacggcactacctatcccgaggatcgcgagcttggcacccgccgcgcccgcgccgccgctttgatggagctcggcctgcccggcgccgcctatatctatcagggcgaggagctgggcctgtttgaggtggccgatattccgtgggatcacttggaggatccgaccgctttccacactgctcaggccacgatggacaagggccgcgacggctgccgcgtgccgctgccgtggaccgccgccgatgagccggccttggccgacttcagccgtccgactccggccgatgacggtaccggcgagaaccatgtgccgctgtgcgccgccggccagttcggcacgggcgcttccttcggcttctcgccggctacgcgcgctgagggcgtgacgccgaccgccgacccgcacctgccgcaaccgctgtggttcaaggattacgcggtggacgtggagcaagccgacccggactcgatgctcgcgctgtatcgcgccgcactggcgattcgccaggagtcgctgaccaccacgcgcgacaccacggccgagcaggtggacatgggcgacgatgtggtggcgtacacccgcgcggcggttggcgggcgggtgttcacctcaatcaccaacttcggcaatgccccggtcgcgctgcccgatggctccgtggtgctggcgtccggcccgctgacccccgaaggccagctccccaccgacacttctgcgtgggttattcagtagatcccttggaataagcgaaaggccgccgttccgaatgaatcggagcgacggccttttggtatgcactggggaccaccctcaggcgcttacgcgccagcgtactgcaacacggacagcctgaaggctgcgattgccggctcgctgttcgtgcgcacctcacccgaggggagccaaggaagaatcactgaacctgggcgcgggcgatcttgccggtgaaggagttggcctcgtcggcatccttgacgccatccttgttccaggagaacatggcgcgcagcttcgggccgacggtctcgatgcgctcgttggagtacttctcctgcagttccttgaagtgcggggcgccggcatcctgatcgtcgatgaactccttggcgaaggagccgtcctggatgcgctgcaggtggtattccatgcgcttgcggcagtcctcgttgatgacggtgttgacgtagtcgccgtactgggcggtgtcggagcaggaccaacgagccttgttcaggccgccctcgttcatcagatcgacgagcatcttgagctcgtggcagacctcgaagtaggcgatctccggctggtagccggcgtcggtcaggacttcgaagcccatctcgacgagcttgttcacgccacccatgagcacgttctgctcgccgaagagatcggtctcggtctcttccttgaaggtggtcttgatggcaccggcgcgcagagcaccgagggccttggcgtaggccagggtcagagcccaaccatcgccacgcggatcctgctcgacggccacgacgaccggcacgccacggccagcggcgtactcacgacgaacgatgtgacccgggcccttcggggcaaccatgaacaccgggtgatcctcagacggcttgatgtagccgtagtgaatgttgaagccatgagcgaacgcgacggcggcacccggcttgatgttgggctcgatgtcgttggcccagatggtgcgctggtactggtcgggggccaggatcatgatcacgtcggcctcggcggaagcctcggccacggacttgacctcgaggccctgctccttggcgaagtcgaccgacttggaggtcggacgcaggccgacgaccacgtcgacaccggaatcgcgcaggttcagcgcgtgggcgtggccctgggagccgtagccgatgattgcgactttcttgccttcgaggacggaaagatcgccgtcgttctcataccagatttgtgctgccattattggcactccttttcagtagtggggtgtggcgccgctgggcgccggggtatctacggtgtgcagataagtcctgtgttgcgaggattgtgtccttcaaaccgaaatcaatcctaccgagaacgccgtcgcagccccgctggagtccacaacgtgagctaggtcactattggagtatggacagccgtgtgcagagaacgattctcgataacaactctgcacccttttgaacagaatcgcacaatcccacatatggggaaaggctgagatatcaacgatcttgcatattcggtgttcgtttgcctgcaagaaatcagcgcatagttgttattgagaatgattcgctgcgcgcaacaacacaaaaccgccgctcccgtatgggcgggaacggcggtttgctagcttaaatccccttcaggggcggcaatcactgaacctgggtacgagcgatcttgccgttgaaggactcggcctcgtccttgtccttggcctcggcgttgttccaggagaacatggcgcgcagcttcgggccgacggtctcgaggtgcgggtgagagttctcttcctgcagcttcttgaacttcggggcgccagcagcctggtcgtccatgaactccttggcgaaggagccgtcctgaatgcgcttgagctggtactgcatgcgcttcttggtctcctcggtgatgacggtggaggtgtagtcgccgtactgagcggtgtcggagcaggaccagcgagccttgttcaggccaccctcgttagccaggtcgaccagcatcttcagctcgtggaagacctcgaagtaggcgatctccggctggtagccagcctcggtcagcacgtcgaaaccgaggtcgcacaggtggttgatgccacccatgaggacgtcctgctcaccgaacagatcggtctcggtctcctcggtgaaggtggtcttgatggcgcctgcacgcagagcgcccagagccttggcgtaagccaggcacagcggccaggtcttgccgtccgggtcctgctcgacggcaacgacgaccgggacgccacggccagcggcgtactcacgacgaacgatgtggcccgggcccttcggggcaaccatgaacaccgggtgatcctcggacggcttgatgtagccgtagtggatgttgaagccgtgggcgaaggccagggcagcgcccggcttcaggttcggctcaacttcttccttgtagaccttggcctggtactggtcaggcagaaggatcatcacaacgtcagcctcggcgacggcctcgccaaccggcttgacctcgaggccctgctccttggcgaactcgacagacttggaggtcggacgcaggccgacgaccacgtcgacaccggagtcacgcaggttcagcgcgtgggcgtgaccctgagagccgtagcccaagatggcgaccttcttgccatcgaacacggacagatcggcgtccttctcgtaccagatagttgctgccatttttggcgctccttttatttatttgtttatgggggtgaaatctttaattgttattgtgctctgctggttctgcagaaactgtttttagttgtggctttccttgtgggcttttccgatatgcaggtttagtcctgttgcaccggaaaagcctcgtaggggttcacttcgtggaattgagatttttcacgttgtgaacttggcgatatttagttatggaggatttcacttggtaaagtcagcgtccttcgtctcacggcaggtcaggaccgacaccaggcagcacacggccatcacggcgagatagaggcccacggagtgaacgccccaatgggagctcagccaagtggcgatggtcggcacgaacgccgcgccgacgatggcggccaggttgtagccgatgccggacccggagtagcgcacgttcgcctcgaacagttcaggcaggaacgcgccgatcgggccgaaggcgacgcccatcagggcaaagccaacgcacaggaacaccatgttggcgaagaagttcttctggccgaccagaccaccgtccagcaggaacgggaagagcacggcgaacacgacgagtgcgcaggaggagaaggtcagcacgcgcttgcggccgatcttgtccgcgtacaggcaggacagcacgatgaacagggcgaacacgcagatggagatcatgagcatgagcaggtattcctggttggtgaagccaaggccgccgccgccttcgccctgctccttggtgccccaagcgagggaccaggtggcgagcgtgtagaacagcgtgtaggtcacggccacgaggaaggtggcctgcagcacctgacgccaagacttgcggaagacctcggtcagcggggacttgacgaccttcttctgctcctgagccatacggaagatcggggtctcctccatgtgaacgcgaaccacgaggccgacgatcaccaggatggcggacagcaggaacggcacacgccagccccaagccagcatcgcgtcctgattgttgaaggattcgagcacgaagtaggtgccgttggacaggaagaagccgatcggggcaccgagctccgggaaggagccgtacagtgcgcgcttgtcttcaggcgcgttctcggtggcgaccagtgccgcgccggaccattcgccgcccaggccgatgccctggatgaagcgcagcaggcagaggatggcgactgcgccaacgccgacctgatcgtaggtgggcaggcagccaatcaggaaggtgccgacacccatggtcatcaggctgacgaccagcgtggtcttgcggcccatgcggtcaccgaagtggccgaagatcagcgagcccagcgggcgggcgatgaaggcgatggcgaaggtcagcaagctcatcagcagtgcgacggtggggttgtccttcgcggagaagaagatgtgcgggaagtagtttgccgcggcggtgccgtaggcgtagaagtcatagaattcgatggcggtaccgaccatcgatgcggcgatcacggtcttgaccgaatcgcgtaccaaggtagcggctttacctgccgcctgccctaagccagtctcttcgactgctgcagtcattgttactcctgttttgctctcgttcactctcattggcgggcgattatttcgtctcacagggaggttgttgttctgttgctgtgttgttgccgtgtactgtccgctaccgtttccgtctgcgggattctgccgtaagccttgtgagcgcaacaaaaaaagccccgcaacttgcagggccttaccgattgtgtcagcttgattggccctgccttcgttgacggggcttcaagcatcaatgccgaattagtccgccagcgaagacgggctaataattcgtgcggatacaaacgcagaagcattgaatccagtcatcgcgtggcctcctttcggtatttcctcaggccgttcgacctgaactggaatgtaaacataggtttggctgtcttgccaatccagcaagggttcacattgtggacgccacgtcgccgagacgaacgcccccgccgcggggaggaacgccgccggcggccggggagccggaccggcccgtcattgcgcggactcggcggtgagggtgacgattccggccagcagcaccatgacgatggcggacgggaagagcaggtaatagccgaagctgtgctcgaaggcgttcaccagtagcgcgccgatgatggcggcgagcgccagaccggccgagttggcgagcgcataaatgccgaggtcgtggccggctcggcgcgggtcgggcaaagagtccatcaccagttcaaggcctaacgcatcgtagacgccgaaggcgaatccggagatcagcgcgaagagcagcatgccgttttcgcgtgccgtgccggtggaccagacgccgagcccccatgccaccgccacgccgatggcatacagcaggcaggatgccgccaccactgcagtggtggcgatgttccgttcctcgatcttctcggagatcggcccagcggcccaggacgcgagcgcagcaccgatgagcgttgccgcggccatgccggcgatgaggaggcccgcgggaatggtcaatggcgcggaagtgaacaccacagccttgccatacacccaaaagcgcacgagataccacagaaagaccccggtcagcccaacgcccgtcatcatgcacacgcgagcggcgaacacacgggcgaatgcaggcgcatgtgccggcggacgcagctggtcaaacacctggctcgactcgaatcgttgatgtggctgctcctggctggaaggctccttgggcagcatgatcacggtcaggatgccggaaaccgcaaacagcacggcggtgtaggcaaacggcgtgaaggagtcgaacatcacgccgagcgcacccatgcatacaccaagcgcttggccaagcatcacgccgataccgtgccagcgctcaatgcgcggacggaatttgtccggaacccgttcgctgatggcgctggccaacggcacggaaatcatcgcataggcaaactgcatgagcgcccagaagaaacacagcactacgaggcctgtgttccgccccagaaccagcgtgatcagcgcgcacagcacgccacccgccaccatccacggggtacggcggcccagaggaatacgtgtgcggtcggacagcgcggagaccaagggcatcgcgaacatggaggccaccacgccaacgaccaccagcacggccagaggcaccaccaagtcagtggcgacgggcagcggacggctggtggacggattgatggtgaccgatatggcagaagcggtgtcgtagtcgaacaatcgcgccacggcgttgggcatggcgatggtgttcaacgccgcccaaggcgcgccgaccagaatggaagcggcgaagaacccccagttgagacgggatacctggcccgtggtgggtcgctgaccattggcggcgaccatcggatcgcgcatatcgagatatgcagacgacagatcaggcgcaggggcatccacgctggccgcggcagcggcagcagccgacgaaccggcggccgccagacgcacggcctgggcctcgggctgatcggcggatgcctcgggaggacgccgacgatctttgatggccagtcgggccacggcatccttgtcttcgggactcaatgccttgtcgagatccgggcggtcgtcaatacccgggcgcacgtacggttccaacatgttgctgctctttctttgctctcatcaccggcgggaggcaccggccagctccgactgagcatgacccgcaaccccgccacatgcaaaaccgcccgagcgcactagcttcagtgcactgcgggcggtttgttttccatggacccagcttacgccggacgcactacttggagcgcgcacagcggagtggcgtttatgggccaacggttagtcgatatcggcaatcggcgggttgctcagcagatcatcagtctcgtggtcaccggcggcatcggtccaggcgaggctggcgaccggagtggtgttatccgtgccgagtccgcggccgggctcgaagatgagggcggccttggtcttgccgtcggcagcgatccagcggaaggtgatggatgtgtcgccgtcggcttcgtagctgaactcgccattgaatgcaggcagttcgttgcggaacttggccagggcgttcagggccttcaccaccgggcgctcgaggttttcgtcgatttcggcggtggagtagtaatggcgattgatgtcacggccgttgttggtcttgcgcagcagttccatgtcgttgcggccggcgagcgcgcccacgtagtagacctgcggcactccgggcaggaagaactggactgcgcgggcggccagatagtgctggtcgttgcagccgagcgcggagtagtacgtgctgttgacctgatagaggtcgaggttgctggcggcggcaccggtggcggcctgggattcgccgtgggtgttggcgtggatggtgttgaccagattatcgacgtcctcgtcgggcacgaggcccttgaggctgcggtcgagctgatcggagccgatgtcgatcacgccgatgccgtcgtgcgtatcgagcacggtgacggcgttgttcgggcggatttcggtccagtggaccacgggttccacgtgaccggtgaacagcgagtgcaggagcagcggaggcagggcgaagtcgtagacgcggtccaccttggaggcgatttcaacctgcttcttgtagtagctatgcacctcaatgagaatttcgaggcctcgcttgacgccttcctcgcgtaggcgtgagatgagcttaaaggtcttgggggtcatgaagcagctggtgccggcctccttggcgccgtagcccacggcgtcgagacggatgtagctgacgtgggatgcggccatctgatcgaagatggacatgaggtattcccagcccttgtcggaatcggtgtcgatgtccacctgctgcggggtgaagctgacccagaccagacgggtcttgccggcgaacttgtagtgggtgaacggcaggcccgggcgcgggcggtagatgccggccagatcctcttcggtggcgccgttcgggaagacggagctcatggtcagaaacatcgggtaatactcggattcctcacctttttcaagcacgtcttggaactgcttggattcccagctcatgtggttgacgatggcatcgaccatgatgccgtgggtcttggaaagttcagcgacgtcgtcccagctgccgagacgcgggtcgactttggtgtggtcgatcgggtcaaagcctgcatccgcaccatcgaacggagtgaagaacggcaggatatgcacgccgtcatacacgccgtcgaagcgggtgcgcaggatgtcggtcatcgagctaagagtgccatcgccgagacgatcggcgtaagcgatgagctgcactttgtttttcatgggacctcccttggttcatggatgcaggtgcaatgtgtacgcagtgtatgcgtgcttttacatacttatacgtatcgaaccggtttgatattacctcgaaagggacgttgatgtccagtaataccgcaaaatgcgcgtgtcgaaccggtttgatgcggtgttctacacaacccagcctgtccgaccccaatgtgtccgtttctgcaaaatcggacatccaaacatctcacgcatcacacatgaccgattctccggaatcggacacacagaacacttttttcggaacttagacgtccgattcggcagaatcggacacatgtgcacaagtcggatgatgagcacgactatcgacgggcgttcgccggttgtggacgccgctgaaatcgatgcgatccacaccgggcacacgcatgaagacgcgcagcatcaacgcgtggtatcgcctggcaccagcgtcatgggaataagcacgttcggctcgaacggcttggggatgttcctgcgtgaagcgttagccgcagccacttcctcattggcaatagcctgcacgatatggtcggccgccgactgtgcgatcgccgagaaatcctgcgcgaccgcggtcagcttcatgccagccaaatcagtcaaatacgtaccatcgtaggcaacgatctgcagctcgtcaggaatggaaattccgcggctcaacgcttcgcgcacgcagaacgacgcaccaatgtcggaactgaccacggcatcgacgccgtcggtcgccaccttgtcgagcgcattgctgaccgcacgatgacagccggcaaaatccatcacttcgccagcttcaacatactcgtatttcacgcctgcggaggtcaattcctgttccaacgtgaggtaatagcgcaccgtcgggaacgtggtctttcccaaatcgaacgatccttcctcgacttctccgcgcgcagccaaatcgaagaattgatctcgcggaccgccaatcatcaccacatgtttggcaccattgcggatcagcatctgcgcaatcaatcgcccaccctgctcgtggtcggatccaatcgacgaaataccgtctccaagcacacggtcgaacgcgacgatcgggcgatgaatcgacgtccaataatcgccgggatgcgaagtgtgcgcacacatgacgatgccgtccatcatgtgccgacgcaacatgtcgacatac

SEQ ID NO: 1913 - DNA, 25657 bp, Unknown
  R17_18m  MAG No. k141_776
cccgatgttctccgaagttcgctgatttataggaagagacttggcagacaacaaacgcaccggcctgtccgctctagccgacgccggcaatgaaggcgaggatttctccgtcatcgacgccatcggtggcccgcgtggcgtcatcgaatccatgctgcctggcgtggtgttcgtcgtactgttcgtggccacgagcaatctgaatctcaccattgcggtttcggccgtgttggcggtattgcaggttattgtgcgactgattcagcgccagtcggtaatgggcgcggtctctggtctggtggcggtaggcatctgcctgatttgggcatggcagactcatgaggcccgcaattactacatcttcggattcattaccaatgccggctatgccgcgttgcttgccgtgtcgctgattgcgcgcgtgcccggactgggtttggtcgtcgaattcatccgtagcctgcccaccgagcatttcaaggcatggttccatgactggatggacgacaaggccctgaaacgcgcctatatgattgtcaccggcctgtgggtcggtctgttcctgctgcggctggtggtgcaggtgccgctgtatctgaccaaccatgtggctgcactcggcgtgacccgcctgctcatgggcattccgttctgggcattggcgatttgggtgagttacctcattattgccacgccgatgcaccggcataaggtcgcggctaagaagacacagactgaagtcgctgttgatgccgaactcgaaccgagcgcaatcggaaaggacgatgatgcaagctgaagttcgtatcgaacgatacgccgaccaaggccgctgcgtggcccatatcgacggtcgtgtggtgttcgtccgcttcgccttgcccgacgaactcgtgcgagtcgaacttgacgagccccacgaccgggacgaccggttctggaccggcgaagtcgtcgaggttctcgagccgtccgaagaccgagtcaccccggcatggccacttgccggtcccttggcgatgggcgggggagtgggcggcgcggatctcgtgcacgtctctttgcccggccagctcaagtggaaggccatcaccgtctccgaacagatgagccgactcggccatatcgacgtggccgttcccatcgagcgcatgcccggcgacaaggcagccggcggcctcaattggcgtacccgcatcgaaatgattgccgacgacaacggcatgccatccatgcgccggcgcggcacacacaaccgcgtggccatcgacaccatgccgcttgccacgcgcacgctgctggacgtcgccaagcgcgaacacgtgtgggaaggcggctttgaacccggctcccagattcgtctttccgtgcccgaaccgcgcggcgagatcgtcgataccgcggcagcaggcgacaattacgccgtacttgtggacggcgaactgcgcgccggctcccagctgctcaccgaacaggtgaccatcaacggcacgaccttcgactatcaggttgacgccaacggtttctggcaagtgcatcgccaagcgccgatcgccctcggtacgcacgtgatcaacctggtcaacgggcagctgcagtcagcggcggacgccgtaatctgggatttgtattccggttccggcctgttcaccctgccgctggccacaatgaccggtgaacgcacccgcatgctcagcgttgaaggcgcgcgtgtggccgtcaagaacgcccagcgcaatctgcgcgccatgaacctgaacgacgtggacgcccgcgcgggtgacgtctcgcgcacgctggaccatgtgccggcgcatctggccaagccgaatgtcgtagtgcttgatccgccgcgtgccggtgctcgtgccaaggtctgccgccagattgccgcggccggcgcatccagcgtggtctacatcgcctgtgatcccaccagcctcgcacgcgacaccgcgacactcatcggcgaaggctacgagctcaaagacatccgtgccttcgacatctacccgatgacccaccatgttgagacggtggccctgtttacccgctgacaggtgagcatatgacacgacgaattctcgaattgctggcctgcatggcggctgtgttgtccctggccgcctgcacgccggccggtagggcggtcggcgatacccaagacagcatgccggaagtcgcccacgattccacacatcccacggatgtcacagtcggctttgtggggtcgactgacaccgccgcagacgagttcgtcatcaatgcgctgtctgatgacaaactcaatgtctactatgcctcgctcgaaacatccgcaagctcggcaaacgcaactgatggtgtatccggtgaaaccgaatcttctgacgccggcactaccagcgaaaacggtgccgatagtatggatgctcatactggcgtcgacaagaatgcggccaccgcacagcagggtgttgccgatttcgtagctcgcgcggtcaaaatcgtggttatcagcggcatcgacgttaccgacgccaaccgggagagctggaaccagacgttgaccaatgcgcgtgaagccggtattccagtcgctctcattgatccaaagcatgcgcccgaagatgaactgctgtacgccgtcatccttcacctcaacaccaacagtgccgattctggcgacactgccgataccaagccaatgactattactgacgccgtgctcaccatcacgcgcgacgaaccccacgaacgcgagatcaaagtcaccgtttcctgagccgaatcaggcccttgaagctgagaaagcaccctgaatcatccctgagccttagcggattgcgaaacaagacgcggtaggctggagaatatgagtgcaacaacagccgtggaaatgcctgaaatcggagcaaccggtcttacccccaaagaagtggtgcagcgtatcgaaagtggccaatcgaatgcggtgaaaacatccacctcgcgttcggttcaagatatcgtgcgagccaacgtattcacgctgttcaacggcatcatcttcgccgcgatggtactggtgctgatcaccggttcctggagggacgcggtgttcggtttcgtcatcatcatcaacacgggcatcggcatcgtcaccgaactcagggccaagcgcacgttggataagctttccatccttgtggcctccgaattcctcgtgcatcgtgacggcagggacgtggaggtgccccacaacgagatcgtgctcgacgacctgctgtggatccgtgccggcgaacaggtgccggccgacgggcagatcatccagacctggggactggaactcgacgaatccatgctcaccggcgaatctcgtaccgtgcgccacaaggtgggggagcaggtgtattccggcgccaccgcggtctccggcatggcattggtcaaggtcaatgcggtcggcagccattcctacgccgccacgctcaccgcgcaggccaaggtatacaagaaaaccgtgtccgacctgaacaagggcatcaacacgattctgaaattcatgaccttcctcgtggtaccgctgtgtattctgctgattctttcgcagattcatacggtcggcggttggggcacggcactctccaccggcgaatggcggcaagccgtggtttccgcggtcgccggcgtagtaggcatgattcccgaaggcttggtgctgctgacttcgctgaacttcgcggtggccgccatgcgtctcgcccgtcacaatacgctggtgcaggagcttgaatccgtggagacactggctcgcgtggacgcgctgaacctcgataaaaccggcacgatcaccgatggcggtatcgccttcaaccggctcgtgatgctcgattccgccaatgcggctgcggaacaggcagccacgcaggccctctacgactgctgcaacgaagagcagcccaacggcaccggccaagccgtactcgccgggctcaaggcccaaggatatggggcaggtgcggttgagtctcgtgtcccgttctcttcggcgcgcaaatggagtgcggtgcgtaaatccggcgagacctggtacatgggagcgccggaggtgattatttctgcgcttgagggtgactattcgtcggtgttgcagcaggttaacgagtatgccaatgacggcaaccgtgtgttgcttgttgcgcggtctacagctcccctcagttcgcgaagcggactgagggacgcagttgagggagccaatgtctcggacggcccgcaactggatgtgcaggctgagccggtggcgttggtgttgtgctctgagaagattcgcgaggacgccgagcggacgctcgcttggttccgtgagcagggtgtgcgctgtcgtgtgatttccggtgacaatccagtgaccgtgggtgccatcgcccgcagagtgaaactgacaggcgaccatgagccggtggcgatggacgcgcgcgaactgcccgaggacgtgaacgaactggcccgcgtgctcgaaaacgtcgatgtgctcggccgcgtgctgcctgaccagaagaaggccatcgtgcaggcgctgcacacgcagaaccacgtggttgccatgaccggcgacggcgtcaacgacgcgctcgccatcaaggaggcggacctcggcatcgccatgggcaacgcggcacccgccaccaaagccgtggcccaagtggtgctggtggattccaagttctcgcacctgccggacgtcgtggcacggggccgtcaggtcatggccaatatggagcgcgtggccagcctgttcctcgtcaaaaccgtgtactccgcgctgatctcgctcggtgtagtgctgacgcaaatcccatacccatacctgccgcgccatatcacgtatatcggcgctctcaccatcggcatgcccgcgttcatcctggcgctcgcgccgaacacgcgccgctatattccgggattcctcaagcgcgtggtcacgttcgcgctgccgggcggcatcgccactgcgctgtcggtgctgctggccgcttgggtgctgccgccggtcatgggctggaacgtgaccggcgatgccgcggacctgtccgccctgcgcgccaccagcgccatcatcctgttcgcgatgggcgtgttcgtgctggcccgcgtggccagaccactcaacggttggcgtggcgtgctggtggcggtgttcgcggcggcgggcgtgatcggcgcgttcgtcccgttcgtggcgaacttcttcgccctgattctgccgaccggcgccacgatggtggccacgctgatcgcgttggccggttccgcgctgatcttcgcgctgtgcctgtggctggcgccgttcgtgcgcggactgacgggcaagctctcgcgtcggcattgagacggcggcgcgattgtctcatacttcaagccgacacgccagagcctcggtaacgtgcccgtaccatgtgtagcggataatcagcggcatcataagccgattcatgatttcggaggaagcatgtccttacgcgacgaccagctggctaccctcaaggcagccggcaaggacttcgattactacaacatcgccaatctcgacggcatcgatcatctgccgtactcgctgaaggtgctggtcgagaatctggtgcgcaacatcgacggtgccaacatcaccgacgagcacgtcaagaccctgctcgactgggatccgaacgccgaacccagccacgaaatccagttcacgccgtcccgcgtgatcatgcaggacttcaccggcgtgccctgcatcgtggacctcgccaccatgcgtgacgcggtcaaggacctcggcggcgacccggaggtcatcaacccgcaggtccagtccgatatggtcatcgaccattccgtgcagatcgacaagtacggcatcgccgacgcggtccagcaaaacatggacatcgaataccagcgcaacggtgaacgctaccagttcctgcgctggggtcagcaggcattcaagaacttccgcgtggtgccgccgggaaccggcattatccaccaggtcaacatcgaatacttggccaaggtggtcatgagcaaggccgaggccaacggcaacgcgctcgcctacctcgactcctgcgtgggcaccgactcgcacaccaccaccgaaaacggtctgggcgtgctcggctggggcgtcggcggcattgaagccgaggccgccatgctcggccagccgatctccatgctcgtgccgcgcgtggtcggcttcaagctcaccggctccatcccggagggcgttaccgccaccgatgtggtcctgaccatcaccgacatgctccgcaagcacggcgtggtcggtaagttcgtggaattctacggcgaaggcatcgcctccgtgccgctggccaaccgcgccaccatcggcaacatgggccccgagttcggctccacctgcggcatcttcccgattgacaatgtcacgctcgactacctgcgcctgaccggccgctccgaagagcaggtcgcgttggtcgaagcctacgccaaggccaacaagctgtggggcgacgcttccgacccggattacgtggaaccgcagtactccgaatacgaggaactcgacctcggtaccgtggtgccgtccatcgctggcccgaagcgcccgcaggaccgcattctgctgtccgaagccaagagcatgttcgagaagaccgccccctcctacgagaccgagaagaccgtcaaggatccggtggccgtgtccaccgacttccgtggcgatttcgacatcgaaaacggcgacgtggccatcgcctcgatcacctcatgcaccaacacctccaacccgtccgtgatgatcgccgccggcctgatcgcccgcaacgcacatgccaggggccttaagcccaagccctgggtcaagacctcgctggctcccggctcgcaggtcgtggccgactacctcaaggccgcggggctgcaggacgacctcgatgcactcggctaccagctcgtcggcttcggctgcgccacctgcatcggcaactccggcccgctgctgcccgagatttccgaggcgatcaacaccaacgacctgaccgtcaccgccgtgctttccggcaaccgcaacttcgaaggccgcatcagcccggacgtcaagatgaactacctggcctccccgccgctggtcatcgcctacgcgctcgccggcacgatggacttcgacttcgagacccagccgctcggcaccgacgcggacggcaacgacgtgtacttgaaggacatctggcccaccaactccgaagtcgccgccgtggtcgacggcagcgtgagccgcgagatgttcctcaaggactacgcctccgtgttcgacggcgaccaccgctggaagggcctcgacgtgccggaaggcgagctgttcgcgtggaacgacaagtccacctatgtgcgcaagcagaccttcttcgacggcatgaaggccacgccggacccggtcgccgatatccacggcgcccgtgtgctggccctcctgggcgactcggtcaccaccgaccacatctccccggcaggcgcgttcaaggcctccagcccggccggcaagtacctgaccgagcgcggcgtggagccgaagaacttcaactcttacggttctcgccgaggcaaccacgagatcatggtgcgcggcacgttcggcaacatccgtctgcgcaaccagctgctcgcctccgtgggcgaggaggtgacgcctggcggcttcacctacgacttcctcgccaagaagccgaccacgatcttcgaagcctcccgcgactacatcgacaacaaggtgccgctcgtggtgctcgccggcaaggaatacggcaccggctcctcgcgtgactgggccgccaagggcacggtgatgctcggcgtcaaggccgtgatcaccgaaagcttcgagcgcatccaccgctccaacctgatcggcatgggcgtgctgccgctgcagttcccggcaggcgaatcctatgagtccctgggcctcaacggcaccgagacctacgatatcgccggcgtcgagaagctcaacgagggcgtgacccccaagacggtccacgtcaccgccacccacgaggacggctccaagaccgagttcgacgcggtggtccgcatcgacacgcccggtgaggccgactactaccgtaatggcggcatcctccagtacgtgctgcgcaacctcatgaagtaaccaccttcttggctcccctctcttgaggagagctgtcagcgaagctgactgaggggagcaaggccggtatccgccaacggataccggccttttccacgcatgccaaaatgctatactgtatagcatctttggaatggaggttgccatgaccatggtccaaatgaacgttcgcattgatgcgaaactgaagaacgaggtcgaagaagtcctcaagggcaaaggcgtatcggtgagtgacgtaatccggtcgctgtggttgtacatcgccgaccgcaaggaagtgccggcattggaaacgaccgccgaagagcaagcccgcgaggaggaaaagcagcgcaagctgaaactgattcgagaaggtgccggatacgtacacaaggaactggtcaaggccggactgatctcagaagacaccgacctcatggaaggccttacctacaagcagttccgcgacaaaatgtacgacgagcaacttgatgcgtattacaacatgaagagggccgattgatgaccgacgtttccatgcagcgtattttgctcgataccaacgtactgttggactatttgctccatcgtgatgatcacgccaagatggcggaagcggttatggaacttggcgcgaagaacaacgttacgttgttgtgcgcgtcattgtcgctgaaggatatcgcatacctatcatcatcggcgattcgtagggaattcaaaccgaatgaatcggaagtggagaatttcactcgcggctttctgtcgtcacgggtgccatggcgttgtatcgagcaggtgaaggagatgtgtgacatcgtcgctgtcgatgagtcgacatgtgataaggctttttccctgcaaaaacggcatcgggattttgaagatgatctgatcatcgttgccgcgcaacaatccggtgccaactgtgtggtcacatcggatgccgaattaatcagtcattttcccgaatattgcaaaacaccggctgaaatcgtggcggcactggaataaatgagcgtgtggctcccctcatggaggggagccaccaatgatgtgccggctactgtagcctacttcgcctgtagacggaactgcttccagatgtcgctgagcttctgaccgttgcgtgtgcgcttccacacgtccagaccgccgccgcgacgtcctccggcggcggcacgggccgcggcggtcggagtcggatattcggagccgtcatccagacggagacgaccgttttcggtgaccgtggcaaaccagcgctcgcccttgcgcggccgctcccacaccagacgctcgcccggcaccagcagaccagcgtcaatcacctgccggatcgtgacgcgccgcgaactatgagacggccgtggagaggtcttcgacaactcatcgacattctgcttggtcagatcacgggcgtccttgtcataccggatgccccagtattccacgatgagtcggaccgactcttcctgccgcgcctccagcagggcaggtgtgcagtcagcgaaatccttcaactgattggtcagcgggaaacgacgtgaatccgcgcgcaacagcatgcggtcgcgacgtgccggatattcactcaacctgtccaactgatcctcagggccctgcaccagcgccatattgccgagtcggtacatccagaaatcatgctgatcctgcggccagtccgcaaacgatttcgaccgttcgatatccaacggcataatcggcagcgcactgaaccggcgtggtcgatccaactgcatgccggccttctgctcgttggcgcgaatcagcagcagacggaccaaatcgccgtcaccctgcatctcgccatgcaaacggaccaatgcgccttcacggtcgccgtccgagacatgcaacccgttcacgcgctggaccaaatagcccttgtcaagatcacggatggcggcgttcgcataaccgcgccgctccaacgctccagtgcgattcagcgtgcggatgcccgtcacctgttccaatgcggtcagaatttccaacagccgacgctcgtcatgggcacccaacgattccagcgtggccgtggttctggcgatacgcgaggcacgaaccacaaacggcgacaaatcggcgtcgcccagcccgcgatacgaattgaccaacgcccacatggccacgggcttccactcgtggctgcggtaatcgtccaatccctcaagccggctacgcacctcggcgggcaatatggtgtcgctggggcgcgcgatgatccgccacgccatcgcatagggcgccagcacctggttgatgaacgtgggcaccgtgcctttgtcgatgtacggttgcagcacgtcggccaggaaatcctcgatgagcttgtcggtggccggcttgtgcgtgagcacgagatgcagataggcgaagaattcctcacagtcatgcggatcgtcgccaagcgggtcaatgatgtcatcccagcgggcggcgtacacgtcaagttcggcggtcgacaggctggccgtggcgcgcgccttgaacacgtcggacggggtgagcggcaggccgcgcatgttcatcacgtcgaagatgcgatgcgcgccgtcgagatcgtcggtggtcacgatgacgagcgtcacctcgttgaccagatactgcgcgaattgctggcgttcggatgccgaccaattggagatctcgtcgtacgtcttgcggatgttggcgacgatgttgcgttgcgcagcggtcgccagatcgtcgtcgttcatgtcgaacacggattcgaggttgtcctcctgcacgtgttcgcggaagaacgccgcgtcgcgctcgcgcaacgtgaggcgaggctcggtgacgatgccgcgcagcttgtcgccgggctccaccagcagcgcgtcgagttggcacatgaggtccgggtctcgctccagatcgcgcaacacggcgatgatgatcgacagggataccagccgctgctgcccgtcgatcacgtcataacggttgtcgccctcgcgtaccagaatcagcgagccgaggaagtacggggtaccgggtgacttgcaggcgtcgtccaagtcgcttaccagttgcaggatgttctcggccttccatatgtaggcccgctggaatgaggggattgtgaaccggaaatccggggtgaacactttcccgagtggtagttccttcgcgctgattgccatgtcaatcccttcgtcgccggcctttggacggtatgccgacgtgccgactgtgctcaagcctaccagtgttcgcccggcggcgggtgcatcacgccggctcgggcaccgacccctcgtacaagtagaacgaagatgggttttctcccggcacggatgcgggcagtgactgctcgcacacctgcgtcaggccgcgatgtacatagaatccgacatcgcacgtggtatccgtgaataggaagtattgacgtatgccggctgcgtggaatgcgctcatcatcgtctcgaacatgcgccggcccagaccgtgaccgcgcgccgccggatcaagtacgaacagcaccacttcagccgaatactcatggccaatgttcgccgcctgcttacgcagttgcctatcgacatgaagagtcccgagaatctcgctcgcagctgccatgccgtcgtgggcaaacgccagttgcaatagcttgcgcaacgaatgacgccggtgcatgttcagcgggctgcgatggtcgagctcgtcgatacgccccacaatcaatgcgacgggtttatcttccagctccgcgacaaaggccgtggtcacacgtgccagacagttctcccaatcggcctcggctgccagcaagccggtccgctcatcatattcggcgtaccaagtgcggcgcaccagatcgatcagcgccggataatcgtctttacgtaacgttcgaataatcgcttcactcatgttctccattatgactgatatggctcgataacccgacgtgttacagtcgcgccggcaaatcggcccgctccaccagcctcgccatctgtacgcggcccatattgagcttgtccgccgcggaggagagatgcgccttggccgtacgctccgagataaacatacgggaggcgatttcggcgttgggctatgtgctgcaagacgattcgccgattacggtgtatgtcactgcgttcctatcaacggatcaagacaccaaggtgacgcatgccttcacgttgcagtgaatcgcgcggcggtccaagctgcggtcgaatgccaatcgaatctcaagtgcatgccacgcgcatggtggaaacgcccgttacgctttgcgatgagcagaacgagccgatcgatcctattcatggaatgttcagctttgttcctctaagattggtactggaacaaacgctaaaggagcgattatgacattcggtcagcagccccagaacaacgggcaatacaacccgcaatacaacacgcctgattacaacgccgcccaacagtctggatatggccagcaatacgcacagtccggttacggccagaactactatgcccagccgcagggcgcccccacctaccagtacgcgccgcaggatgcggccggtgccggcgcgggtgccgccaccatcaacacgacgatgacctacaactacgaggaggcccgccgcgtctccgtagccaaggtgtacggcgagatgaccattggcatcctcgtcaccgccgtggtcgccgtgctcggccagatcaccggagcctactacagcttcctcatggccaccggcatggtgggcctcatcggcctgtgcgtggtgcagattgccctggccgtggtgctcggcatgcgcgtcaccaagatgaagtcggccactgcgcgcgtcatgttctatgtgtacgccgcattgatgggcttcaccttgagctcgatcttcatggtctacgacctcggctcgatcggcgtggcactcggtgtcaccgcagcgttcttcttcgcgctgaccatgttcggcatgactaccaagttcgacatgctcaaggccggcccgatcctgatgatcggcctgatcgtgctcatcatctcgcagatcgtgctcgccttcgtgcaggtcgacggcatgaccaagatcgtctgcgccatcggcctgatcctgttcgccggcatggccatctacgacgcgcagtccacgcgcgcgctgctgaccgaatacgaggcccagggcccggaaatggtcaagaagatctccatcctgtgtgccctgaacctgtacctcgacttcgtgaacatgttcctgtacatcctgcagctgctcggcaacagggactagcctcgccagccgattggtgggcggcatgtagcctgctcgtcaaacgtcacagcccgaccacattgtggccgggctttttcatgtctgtcacattcgcacgttaggctgtctccccgtgaaaagacaagaactcgtaggcatgctgagcctgttgttgaccgcgctgatctggggttttgcgttcgtggcgcaggtccagggcatggatttgatgtcgccgatgttcttcaacgccacgcgcttcacgctgggagcactgtctttggtgccgattctgctgtggcagcgtggccgggggagcgcagataagggcgatacagccggggtcgatgtcgttgggaccgaggcccccagggccgtctccacagatgccgcatcgaacggtgcatccgacgtcgttaccatcaccggtgccaagctgaatgcgaacaagcccgattcggccgtggcgcgattgctcgccaacccggtggtcatttccgtgatctgcggcatcgtgctgttcaccgccagcaccctgcagcagtatggcattctgtacggcaaatcggccggccgcgcgggattcctgaccgccatgtacattgtgatggtgccgttgctggcctgcgtgttcctgcgccggcgcatcggcatgctggtgttcgtggccgtggtgctgtccatcgccggcttctatctgctgtgcatcaccgatggtttcggttcgatcggcctggcggatatcctgctcgtgttcacggccgtgctgttcgccgtgcatattctggtgatcgatactttgggcggcaccgtggacgccatcaagctttcattcggccagttctgcaccaccgccgtgctgagctgggcgggttcgctgatcgaaggctcggtcgactgggtcggcgctgctcattcctggattccgattctgtacgccggcatcggctcggtgggcatcgcgtacaccttgcaggtggtcggccagcaatgggtgccaccgacgcgagccagcctgctgatgagcctcgaatcgttcttctcggcggtaggcggtgcgttgcttctcggtgaagtgatgaccccgcgcggctacctcggctgcgccctcatcttcctcggcaccctgctggcccaagcgccggccaggctgccgaagtggctgcaacggtgaatgaatcggacgcaggccgattccatagcacctcagtccgtggtcttaggcgcttcacccacttgcggcgcgccgttgatgtcgcggtggatgttctgcatttgcacttcgatgttctgcagcgaacgggcgcagtcgagcagtgtctgtgaatgctcgctgagcttgttgtccggcaaatcggtcttgtagcgcagcgcatgctccagcgacgcccaataatccatggcgatggtacggaactgcacctccaccggcgtgtaatgcgcgcccgaggagagaaacacgggcaccgcgtagattacgtgcaatgaacgatacccgttctgtttcgggttcttgatgtaatccttgacgcgcagcacctgaatatcggactgcgacgacagatagttggacacggaatacacgtcgtcgcggtaattacagatcacgcggatgccggccacatcgaacagattgtccttaatcgaattgacactgattggcagattcttgcgctccagcttgccaatgatcgaactcaccgacttcagacggcgttccatatgatgtatcgggtcatggctgaaccgcacctggaactcgtcgtcgagaatctccagcttggtgctgatctcgtacatcgcgccttcatacacctgcatgaggtcaacgaatttaacgacctgttcgggagtaaaggtgcctcccggaagatccaacgctttgagacgggcctgtagatcggaggttttgagtcggctatgtcggtcaagtatcacgtccaccaatatactcggcggattccagacaatctggatgttcgcggggaatctttccaagaacccatatttaagatcgtgacaaccaatggcatacgtgaccggagcatgacgaaccccgccgatagaatcggtcgttatgaatgaagacatgatgaccgaggcggagcgtgcctcgattgcagccgatggaaccgatagcttgttgggggagcgcggcaagggcgtattccatatccacacgctcggctgccagatgaacgtgcacgattccgagcgcatcgccggcgtgctggaggccaatggctacgtgcctgcaaccgaggaccagatcaatggcaatgacctcgatctgctggtgctcaatacctgtgcggtacgcgagaacgcagccgaacgcatgtatggcaccatcggccgattcaatcgcgtcaaactggttcggccgaacctgcagatcgccgttggcggctgcatggcccagcttgaccgcaagaagatcgcggatactgcgccatgggtttccgcggtgttcggtaccaagaacatcgaagatctgcccaagctgttggatcagaatcgtgcgaccggcaaggcgcaggtccaggtcactgaacaattgcggcagttcccgagccagcttcccgccgcccgcgcctcccgcatcagctcgtgggtggcgatttccgtgggctgcaataacacctgcacgttctgtatcgtgcccaccacgcgaggcaaggaaaaggaccgccgccccggtgacattcttgatgagattcgccaatgtgtggccgatggtgccaaggaggtcacgctcctcggccagaacgtgaactcgtttggttatggtattggcgatcgatacgctttcagcaagctgttgcgcgcctgtggaaccatcgacggtctcgaacgtgtgcgcttcacttcgccgcacccggccgccttcaccgatgatgtgattgcagccatggccgaaacaccgaatatcatgcatcaactgcacttcccgctgcagtccggttccgaccgcatcctgcgcgcgatgcgccgctcctacaggtccgccaagttcctcgatatcctcggtcgtatccgcgaggccatgcccgacgcccaaatttccaccgatatcatcgtcggattccccggcgaaaccgaggaggacttccagcagaccatggacgtggtgcgccaggcgcgcttctcctcggcgttcacgttcatctactcgccacgccccggcacgccggccgccgcaatggaacagattccgcgcgacgtggtgcaggaccggttcgaccgactggtggcgttgcaggagcagatcaccgaagagaacctcgccacattcgagggccgcgacgtcgaagtgatgatcaccggcaaactcggcaagaaggacaccgacacccaccgtgtcaccggccgcgagaaaactggcgtgctggtgcacatcggcgtgcctgaaggcgaaccggtacctgaaatcggcgatttcgtcacggtcaccgtcacacacgccggccgccataatctgcttgccgaccccgatgtggccgctggacagacctattccgtgcgacactgagggggcgtatatgacgcaacgagtcgtctccatcgtcggtcccaccgcgtcaggcaagacggggttgggcatcgccatcgcccggcgtctggccgaagcgggggagcgggccgaaatcgtgaacgcggacgcctaccagatgtaccgtggcatggatatcggcaccgccaaacccaccgccgaagaacaggcggccgtgccgcatcatctcatcgacatcatcgaccccgaagacacgatgagcgtggcccgattccagcagcttgcgcgcgagaccatcgccgacctgcaatcacgtggcatccggccgattctcgtcggcggctccggcttgtacgccagagcggccatcgatgacatcacctttcccggcaccgatcccgacgtgcgcacacgtcttgaggaacgcgagaaaaccgagggtgccggtgctttgttcgacgagctgcgggccaaagaccccgaggccgccgcgcgcatggacccacgcaacccacgccgcaccatccgtgcgctggaagtcatcgagcttaccggcaaaccgtattcggccagcctgccgcgctaccggtacgtgattccgtccgtacagatcggactcgacctggaccgcccggatttggaccatcgcatcgacctgcgcaccaagcagatgtatgacgatggattcatcgaagaagtcgaacggctgcgcccgcatctgggtgccaccgccgtacgcgcgctcggctatcagcagatcatcgacctgctggacggtatctgggatgtgaacgacgccttcgcggacatcgcacagaaaaccaagcgactcgcccgcaaacagatgggatggttcggccgtgacccgcgcatccactggctgcaggccctgaacccgaaactggtcgacaacgcgatggccattatcgcgcacgccgacgccggcgactacgacccgatcgacgcccgagccgacgaatacacccagcatcatctgggcgatatcacggcgtaggaatcagccaaaggccggtgcaatcacccgcaatcagtgtgcaggcccctgattccagccggcgatcaagaacacgcgcgtcggattcgccgggcgtagtatcgcgtcgaacatcgtctccagtgcagacgtgtcgccccgatatgccgagtgcttggcggagcgatactcctcgcgcgtcactgagccccagtcgagatcccagccggcgtcatgcgccaagcgtgaaccgaatatacgcagcaccatcgcattgccgccacggaacggatgcagataaccgagctcatcataaatagaagcgaacgcgtgaacgaacacgtcgcgatccaacgcatgcaggttgcgcttgtccgccaactccatcgcgatgttgtgcgcgccggtctcaatgagcccagccgggaagaacgcctccggattcgcggcccgagcccggtcgttcgtcacctcgcgtgtggtgtttgaggtacgcaacttgcccgcatcctcgaacacgccttcgaacagccccttatgaatggcggtcaactcgtccaagtcgccagacggattccaccgacgttccgccaacaatacggtacgtgcgaacaccgcatccgcgcgatccgtggcatgatcatccagactgccggcagccagacgatcctttccggcagggtcggcggcggcgcgcagacgcatggcggtctgctcgtccgccacgtcgatgagatgggtcacgggctccaagccacgttcgtaggcaaccgcggcgcgcatcgttgcctcgcccggcgtcatcgcttccagtgcgcagttcttgagtgcaaatgcgactgcgctcgcacgctctgcgggtgtcatgcaacccatgataaggcatattcgcgctccagcggggaatcgactcggacgaacctcgacgaaccgcggcgaatcggctgtcgggattcgtcaatcgaccatatcgtcacggtgtcgtcaccaaccatgcacccccgtactagtagaatcagacccgatatggcacgaacagcatcctccaacagcaccaaaccccgtaaatccaaagacaacgggtctacccatgatggcgaaaccaaggtccagcccgagcttgacctcgaacctgagccgttgtggaagaagatcctgctcgcgattccgcgcgcgttcggctccggcgtacgcgccgtcaccggcgtcggcgaatacgacccagcctaccgtcgtgacggtttgtgcttcctgctgctcgtgctcgccgtactgttctgcgcgtccgaatggttccgtgtcagcggtccattcggccagctgcttcacgccatcgcggccggtgtgcttggtctgatgagcgtcgtgctgccggtgttgctcgccgccgtggccttccgactcatgcgcaattccggtaaagggtccaataacccgcgtgtggtcaccggttgggtgctgctcatgtggtctatttgttcgatcatcgacgtggcgatcgccgccgaccacaccggattcgacatcacgattctgcaatccgccggcggcctgttcggcttcttcctcggctcaccgctcgcctggggcctttccaacgtgttcgccatcatcattttcgtggtcgtcggcctgttctccttgctgatgattaccggcacccacgtcaccgatttgccggaggatgcgcgcaaaatcgcagctaaaatccaacgcaaaccgtatgtgccgatgggccaggaggccgacggaagcgccagccagttccccaacgaggtccgtgtgggagataccacactcgcctttgccgacggtgttccctcgcatgacggcaacgacgacggcaacgacaacgatcaggccggcgatgcacggcccagcctgttcgcacgactgttcggccgcaaatccaagaccgaagacgacaaaacccttgacaagtatgctgccgacgatccgttcgaccgtgccgccagccagcatggtgccaccgccgaaaccccggtggtcgatccgatgaccggcgagattactggtgcgcgaaccattgcatcgtcttcgtacgacggtcgtccgcacctatccagccctgcgcctgctgccgatgcggatgatggcgacgcttcccgaacccgcgtcatcaccagtggccagaccatcgccatgcccggtgggggagcggtagacgatccgtgggcacccagtgccgcccaggccggtactgtcgcgctcgcaggggcagccggggcgatgggagcggccggggccgccggtgccgcggccgcggcagccgcgaccggagcctacgcaggcgccgatgcggatggcagcggagtcggccagggcgtgcccaatacggacggacagccgaatgccgccgccggcaacggtacagacgacgacgccaataggccgtatcagttgcccgacctgaacctgctgaccaaaggtcagccccatgcgatgcgcaccccggccaacgatcgcgtgatccgggcactgacttccaccttcgaacagttcaacgtggacgccaaagtcgtcggcttcctgcgtggcccttcggtcacccaatatgaggtcgagcttggccccggcgtcaaggtggagaaagtcaccaacctgcagcgcaacatcgcctacgcggtggccagttcggatgtgcgcatcctttcaccgattcccggcaagtccgctatcggcatcgaaatcccgaacgaggatcgcgaaatcgtgcacttgggcgacgtattgcgctccgacaaggccgtgggcgacccgaacccgatgctctccggcatcggcaaggacgtcgaaggccacttcgtgaccgctgacctgaccaagatgccgcacctgctggtggcaggtgccaccggttccggtaagtcgagttttatcaactcgatgctcacttcgatcatcatgcgtgccacgcccgaacaggtgcgtctgatcatggtggatcccaagcgcgtggaactgtccgcctacgcaggcatcccgcacctgctgaccccgatcatcaccgatccgaagaaggccgcacaggccctcgaatgggtggtcaaggagatggatgcacgctactccgacctcgaattcttcggattccgccacgtcaaggacttcaacgaggccgtgcgcgccggcaaggtacatgcgcccgccggctcccagcgcaaggtggccccctatccgtacatcctcgtggtggtcgacgagatggccgaccttatgatggtggccaagaacgatgtggaaagctccatccagcgcatcacccagctggcacgagccgccggtgtgcatctggtgctcgccacccagcgtccgtccgtggacgtggtcaccggtctgatcaaggccaacattccatcccgactggcgttcgccacctcgtccgccaccgattcgcgagtcattctcgacacggtcggtgccgagaccctgattggtcagggcgatgcgctgttcctgccgatgggttccgccaagccgattcgtgtgcagggctcgtgggtgtccgaatccgagattcgcaaggctgtagagttcgtacgcacccagcgcaagccgaagtaccgcgaagacatcgaacagatggccaaggaagccgaaaagaaagacagcatggagcctgacgaggagatcggcgacgacatggacgtgctgctgcaggccgccgaactcgtggtcactagccagttcggttccacctccatgctgcagcgcaagctcagggtcggcttcgccaaggccggccgactcatggacttgctcgaatcgcgcggcgtggtcgggccgtccgaaggctcgaaggcccgcgaggtgctcgtccagccgcaggacctgccgcaggtgctcgccttcatccgaggcgaaaccagctcgctcgaagccagcgccccgcaacaacccgaactcggcgaataattcacccatcgacctccctctgatgagggaggtgcccgaaggggtggagggagagaagcgcggacagcatcagcacgaaacctgattcccgaataatagcagtcaatatccagccaccactcactcaaggtaggagtatgggggtaacgtgaacactatggatgagaacacaatggacaagcagtcatcgcccaaatcatcgctgttcgacggatggaacgcgccgccgaacctggtcacctactcgcgcatcgtactcgtggtgattttcctgacactcgacattctcgccggttcctggggtgagaacaacctgatcatgcgttgggtcgccgcggtactgttcatcatcgccgcgtccaccgataaaatcgacggttggatggcccgcaaatacaatcaggtcaccgaaatgggcaagctcatggatccgatcgcggacaagctgctcacttgcggcgcaatgattgtatgctccgcgttcggcgagctcggctggtgggtgaccatcctgttcctgattcgcgaaatcggcatcaccgttatgcgcttcttcgtcatggagcgtccgggcggcaaggtcatcgccgccgcatggcccggcaagctcaagaccgtattccagtgcgtgggtctgtccatgctgctgctgccgttctggtcattgggtaacggacaggccacgccgttctggatgaccgcttactacttcctgacctacgccatcatctacgtggcattggtcctgtgcctctactcgggtgccgtgtacctgtacaacacgttcgtcgccccgaagcggaagtgacggatattccaatgcaggaattgtgcgacagtctcgcggccggcatcctcaagatctgcgaggcgaacaatacgaaaatctcctgcgctgaatccctgaccggtggcctgctcgccgatgcgttcgtgcgtattcccggtgcctccaacgtgttgctgggctccgctgtcacctacgacatcaatgccaaggcctcgatcctacacgtggacaaggccctattggatcgagaaggcgccgtacaccccgaagtcgcccggcagatggccatcggtgccgctcgcctatacagccagccggaatacggcgaccgaatcatcggcctttccaccaccggcgtggccggccccggtccggacggtgataagccggccggactggtgtatgtgggcctgcgcatccccgcaagcctcaccgcggaccatgccgaagtgctcaaagccgtcgaactccatcttgatggcatgcgcgaagaggttcgtcgcctcaccgtattccacgttctgcaaaacttgagtctattcacagcaagttttaaggaataaaaccgcgggaccgtcgtgttgtacatagtggaaacactgaaccgaccttggaaggggcgatggcgatggaaacgatgacccgagtgaacgaacagatggatgtggccgccaagaagccgatggctgtgcagccgggtgtcgcccgtatgcgtgaactgactccggcccagcgccgtgcggtgatgttcgcccagcagcaggtgctcaaggcgcaggctgccaagaaggccaaggatcagcgtcaagccgttcgtgaacgtatgtgggatgaggattcgccgtcgtacaagccgactgccgccgccgagcccgtggtggttgaggaggagcctcgcgaggtttcgctgcgtggtgctatcggctacgtgctgcgcgaactgcgtacgcgcgatcgccgcacgttgcgtgaggtctccgagaaggcgggcgtttcgctgggctatctttccgaagtcgaacgtgggcagaaggaagccagctccgaactgctgagctccatcgccgatgcgctcggagtctccacttcgcgcatgctgcgcatggtggccgattatctcgacacagtcgagggctgatcggttggcggtgtgaagccgcatcccgtaatctatgtctagctgtgaacccgtatcgcttgtggcgatgcgggtttttgctgtcctgcgggtggtggcacactggcgtgtatgcgtgaacgggaattctgggaattacttgaagaggtgttcggtcggacctacggtcgttcgctgtcgcgtgatcaacggatgtccaaattggcgaatatgaccgtggtcgaggcgctggacgcgggggaggagccacgcgtggtctggaatgtgctctgtgaccaaatggaggttccggactccaagcgttggggccacgatcataacgcgccgcccatgcccgccgtctgacactgcgggattacggagtcgctgaatcgtgaaattggcgatttcggcgtgttgcacgccaaattcgaacaaatgttcgtgtgtgtggttatagttattcacagtgacaagaagccgcatacgtgtgcacagggtgcttgtcatccgccataagccttaccgcagtaggtcttagggaggtcagatggccgagctcgggcaagctggaaccacaatggttggtttggattgcctcacatggcatgtccgtcatacggtggaggcatccgattcgcgcacgacttcgacaaggagaagatcatggcacttgagaccaagccggccaaggacccggcagccgaggacaagcacgagctcgatcccaagcgcaaggcggcgctggacaccgcgctggcgcaggttgagaagagctttggcaaaggttccgcaatgcgactgggcgaccagcccgagcagaacgtcgaggtgattcccaccggttcgttggccctcgatatggcgctcggcatcggcggcctgcccaagggccgcatcgtggagatctacggccccgaatcatccggtaagaccacgctcgcattgcatgtggtggccaatgcccagaagaagggcggcgtggcggcctacatcgatgccgaacacgcactcgacccggcctacgcccgcaagctcggcgtggacaccgactcactcatcgtctcccagccggataacggcgagcaggccctcgaaatcgccgacatgctgattcgctccggtgcacttgacgtcatcgtcatcgactcggtcgccgccctagtgccgaaggccgaaatcgaaggcgaaatgggagacagccatgttggtttgcaggcccgactcatgagccaggcgctgcgcaagatgaccggcgcgttggctcaggccggcaccaccgccatcttcatcaaccagctgcgtgaaaagatcggcgtgttcttcggcaatcccgaaaccaccaccggcggcaaggccctgaagttctatgcctccgtgcgtctcgacattcgtcgtattcaaaccctgaagaatggcgacgaagcggtgggcaaccgcacgcgcgtcaaggtggtcaagaacaagatggccccgcctttcaagtccgccgaattcgacatgctctacggtgaaggcatttcccgtgagggctcggtaatcgacatggctcagcaggttggcgtggtcaagaagtccggttcgtggttcacctatgagggtgatcagctcggtcagggacgcgagaaggttcgtcagttccttaaggacaacccggccatcaccgaggagattgagaataaggtcaagtccgagttcggtctgatcggttccgccgaccagttcgcggaagatggcgaagccgcagcagcggccgctgtcagcgaggccgccgctgccgacgtggccaaggacagcaaggccgcagcggcgcctgctgccaaaacgacccgtgccaaggccggcgcagctaaggcctgaacatgattagtgccgaagcattcttgc

SEQ ID NO: 1914 - DNA, 4631 bp, Unknown
  R17_18m  MAG No. k141_1272
aggccattaccgagcggacggtcaagggagtgacgcgcgaatatctgcagctgtccgtactctcttccgatggtttggtcatcaacgttcccgtggacaatgccaggaaggtcggcgtgcgtgacatcgtctccgcatccgaagtggccaaggtgttcggcatcctgcggaccccgatcatcgagaaagagatgaactggtctcgccgttacaagctgaacgtcgaaaagatcgccaccggtgacgtcaacaagatcgccgaagtggttcgcgatctcgcccagcgcgatgtcgacgagcacggcctgtccgcaggcgagaagcgtatgctcaccaaggcccgcgccattctgacttctgagatcgccttgtccgagaagatcgacgaggcggaagcccagcgtctgctcgacgtgaacctgggctacgagcccgctcagcccggtgacgacaagcatcacaccgccgagcccgaagaggccgcggccgatactttggctcgtgtcgaagccgagaagaagtccaagaagaagtgatttgattgttgaggccccggtcgtgtccttatgcgatacgccggggcttcgtgattcataatcgtttgctgccgttcatctgggcaatgccatcgaagggaactgcatggggtctgcaggagtgctgatagggcaaggttttgacgctcaccgttttgcgcctgccggttcaggccgtgaactgtggattgccgggctctactggccggtgcctgattcatgcagcgaggccgatgccgccaaatacgagggtatcgaaggcgattccgatggcgatgtggccgcgcacgccctgattgacgcgttgcttgccgccgcccgattgggagacattggttcactgttcggtgtcggtgcggacgcgcatggtgccggaaggcatggcatcgatatgctgcaagaagttgtggcgcatctggcatccaacgggtatacgccggcatcggcctcagtggcgatcatcggcaaccgcccgaaaatcggcacacgccgtgctgaagccgaagccgccctgtctgcggcggttggttgcccggtatcggttaccgccaccaccaccgaccatatgggattcactggccgcggcgaaggcatcgccgccatcgccaatgccttggtggagaagatataacaaagcccccgctatgaatttgccagcgggggcaagaaaaatgaatgagattacttccgcactgtctccacggccttggcgatagcccagaacagggtggaaagcgtcacgataatgaagctcgggggggcggggaacatcgccgacagcacgagtccggcccaaatcgacaccaggcacagcacgctggcgatcaccatcgccttgaatggggagccggccagaatattggcggtggccgcaggcgtgatcaccagcgcgaaaatcagcaaggtgcccactgccggcacggcaatggtgattacaccggccataatcgccataaacgccacgttcatcagcccgatcggcacacccttggcctgtgccacctgctcatccaacgagctgaacagcagcgggcggtagatgatggccaacaatgccagcagcaatacgtcgaacacggcgaagccgatgatctggccggtggtgatggtcaggatcgagccgaagaggatcgactgcatctgctgggaggcggaactcgacaatcgcgcgaagaacagacccaagccggtggcgaaggccagtacggtgccggttgcgatttcacgctcggaaacgcgcttgcccaaagcaccgatcaccagtgcgccgcccagtgcgaacacgcccatgcccagtgatacgggcaggccgagcaacaccgcgccggtcgcgcccggcagaccgatatgggccagcgcatgggccgcgaaggtggaacgacgggcgatggtgaagtatcccatgacaccggcggccagggcaatgcacaggccggcgatgaaggcgttggtcatgaatggagcggacagtgtgtccagccattcgggatcatacgaaaagttgatggtgctcatgtccctgtattttctccatgcctgagctgcagcccgttgacgggctgtggatcggctagcttgatgttatcgattctcggcgctgttggcggcactgccattggtggcgttgccgtgctcgtgatggtgcaattgcgccacttcggctgccgtgtgcatatcctgcggctggtcctggggctcatccggcgtcggggtcacgaacatgtcaccctgcggagtggtgaccacctgcacctgtgtgccgtagaggtgggtgagtaggtcggagtcgagcactttgtgcatatcggcgtagtgcgggtgcccgtcgagcaagtagacggcaccggtcagaatcggcaagagcatattgagatcgtgcgcaaccacctggatggtcatgttcagttcacggttcagcttggccagcacgtgtacggtggcgcgttgactggccagatcgaggttggccaacggctcgtcaagcatcagcagttgtggatcgcacaccaacgcctgggcgatggccacacgctggcgcaaaccgccggacagttcggacagacggtactgcgccttgtcggcgatgccggtgaactccatcgcctcgagcgttttggctttctgggccttggtgatggggtggatgccgaatcgggtgccggtcaggcccagcaacacggattgttcggcggtgagattggaatcgacattcgccacatagctctgcggcacatatccgatgcgtttgttcatctcgcctgcgggcttgcccagtacggtcaggctgccatggcaaagcggcaaaagtcccagctcggccctcatcatcgtggttttgccggtgccgttggtgccgacgatggccgtgaccgaaccggtgggaatggcaaaggtgccatgctgccagatgatatggtcaccacgcttgatggcggcatcgctgaacacgatgcaatcggaagtttcactcataacgcccgattgtggcaaacgatgctgacaatcgttctcaatatcgtgtacggatggtgacaaccaaagaaaagggttgtgcggccatctcgacaatggtcgcacaacccttctcgtgcaaggcgtctatcggcattgcatgaatccgatgccgttgtcctttgcttctaactatttgccggagtcggtctggtcgttgccggaggcatcgccggaatcgccattggaggcatcggcctttgccgaatcctgagacgaatcactggatgtggccgccttgcactgacggatgtacttgggctccgtgctggaaccggtgctggccttggaatcgtgcgcattggcatcatccgtggcggcgccgtcggcgctggaatcatcggaattcgcgttgccgtccgtggcgtcttcgcagccatagctcggatccaccgcgtcgatgatggtgttgatgagctggttgatccaggcgttcagcgtgtcggtatccttgggcatttgttcggagacgtcgactaccggcacatcggcacgaccggcagcgccagtgatcatattggtcgcgtcactggcttcctgcgtgttgttgaccagcacatccacgcccttgtcttcgatgagtttctggaaagactgcaggtccgcgggggccggttcgccgccggaagcggtcgattgcgtatatcccttgggcgtctgattcttgaacccgagatcggccatcagataatagaccacgggttcggtggctgcataggtgaggtcggagtgggatctggtgaactcggacgcccatgtttccagcgatttctcatccgcctgccatgccttgagccgcttctggaaggccttcttcttgctggggagtgcctttacatatgcatcggtgatggccgtggccatgctggatcgagcgtctttggagaaccacagatgcgggttatcgccttccatggcacccatgacggaagcggcggatacgatattcgtggtcttggtcatcgatttggtggcccaggaatcgtagcccgcaccgttggccacgatgatctgggccttggacagcttggcgacgtccgaggtctttggctcgaaatcgtgggcatccacattggtggagttcacgatggacgtgacttccacatcatcgccgcccagctcggcggccagcgagccccattgattgagggaggcgaccacattgatcggcccggtcggtgcgggaacactggtcttgttgtccggctcggtttcagtgggggaggtggctgcgcatgcggcggtcgcgaacaacaggacggcgctcaggccggctgcggcgagtcgcgtaagtcgtgtgatttgagtccccatggcacgccttcttcgtgagagcgaacgatatataatcctgacttgttccaacgatagcctatcgtttcgatagaatgcaccgaaaccacaggggagggcgttgatgtccacaataatcgacggcaaacgaatcgcggccgggatcaagaccgaccttgccgaacgggtgagcaggctcaaggcccggggcatccagccggggcttggcacgttgctggtggggtcggatcccgggtcgatgaagtacgtggccggcaagcacgccgattg

SEQ ID NO: 1915 - DNA, 10454 bp, Unknown
  R17_18m  MAG No. k141_1412
cgctgcaatttgtacgacttgcccgcgttgggcttgatgtagctggcggccttcatcgcggcgaacaatgcctcgttgatcggcatgacgacaggtcctttcagcggcggattcggtagtgcgaacaccccaaccttagcccatgaccggcatgaacaaaaaagggaaggaacccgagagttccttccctgtgtgccgtatcagacgcgatacgcgccgattatcaggcggcgaagtattccacgccggcctcgaagatcggctggtacttgttgccgggcacgttgacgtacaggccgttgccggaacgctccgagtgacccatcttgccaaacacgcggccgtccgggctggtgatgccctcgatggcgagcagcgagccgttcgggttcacatccagatccatgccgggggtgccggtctcgtccacgtactgcgtggcgatctggccgttggccctgagctgggcgagtacctcgtcggaggccacgaagcggccctcgccgtgggagatggccacggtgtggatgtcgccgaccgaagtcttggacagccacggggagaggtcggaggctacgcgcgtgcggaccagtcggctctggtggcggccgatggtgttgaaggtcagcgtcgggcaggcgtcggtcatcggcacgatgtcgccgtacggcaccagacccagcttgacgagcgcctggaagccgttgcagatgccgagcatcaggccgtcgcggttcttcaacaggtcacgcacggcctcggtgacggccggcgcgcggaagaacgcggtgatgaacttggcggaaccgtccggctcgtcgccgccggagaagccgcccgggatcatcacgatctggctcttgttgatctcatcgaccaacgcctgcgtggattcggcgaccgcggccggtgtcaggttgttgatgatcagcgtggtcacgtcggcgccggcgcgctcgaaggcggcggcggaatcatactcgcagttgttgcccgggaacaccgggatcaccacatgcggcttggccacggaagagccgacgtacacggtcttcttcggcgcgtggaagtcgatggtctcgacggtcgcgcccttgtcctcgcccttggaacggtacgggaacacggattcgatgccggactcccaagcttcctgcacagcgttcaggtccagcgtctcgccggcggccttgaacgcgtattcggaggtggtggtgccgatttcgccgatttcgaccaggttggagacggccggaagcttggcattgtctgccagctcgacgatgaacgagccgtatgccggggtgaacaggtcatccacggcgatgctgtcgttcagggtcacgccaatgcggttgccgagcgtcatcttgaacagggcttcggcggtggcgccatagcccggcgtggagacggccagggcatcgtggaagtcggtgagctcctcgatcacggagaacacctcaagcagcgcatccttgtccggggtcagaccgtcggccaggtagcgcggcgcgatgcgcacgatacggtgatcggcgtccttgagttcaggggaggtggcgcgcttcatgttgcccacggccacggcgaaggagatcagcgtcggcggcacgtcgagatcctcgaacgaaccggacatggagtccttgccgccgatggcgccggcgcccaggtccacctgggccatcagtgcgccgagcacggcggccgccggcttgccccagcgttccggctcgtcgcgcagcttctcgaagtactcctggaagctcaggtaggccttctcatgctcgaagccggccgcgaccagcttggccagcgactcgaccacggacaggtaggcgccggtgaactggttcttggacatgatgtacgggttgaagccccacgccatcgccgaagcggtggtggtctcgccgaacaccggcagcttggcgaccatggccatgttcggggtgagctgacgcttgccgccgaacggcatgagcacggtgcccgcgccgatggtggagtcgaagcgctccgaaaggcccttgttggaggccacgttgatgtcggtgaccagcttgttcatacgctcggccagcgtgccctcgccccacggggtctcgtaggactgctgtgcctcgacatgcacggtctggtgcttggaagcgccgttggaggccaggaactcacgggacagattcacgatcttgtcgccgttccaggtcatcaccatgcgcgggtcctcggtcacggtggcgatcaccgtggcttcgaggttctcttcgcgggcgtaggccaggaactcgtccacgtcctcggcggccacgtccacggccatgcgctcctgggattcggagatggccagctcggtgccgtccaggccctcgtatttcttgggcacggtgttgaggtccacgaacaggccgtcggccaactcgccgaccgccacggacacgccacccgcgccgaagtcgttgcagcgcttgatcagacggcaggcatcgccgcggcggaacagacgctgcagcttgcgctccaccggagcgttgcccttctgcacttcggcgccgtcgagttcgagcgattccacgttatgcgccttggacgaaccggtggcgccaccgatgccgtcacggccagtgcggccgcccagcaggatgatcttgtcgccgggggccggggtttcgcggcgcacatggtcggccggagtggcggccacgaccgcacccacctccatgcgtttggccacgtagccggggtggtagatctcgtcgacctgaccggtggccagaccgatctggttgccgtaggagctgtagccggcggcggcggtggtcacgagcttgcgctgggggagcttgccttccagcgtctcggagaccggcacggtcgggtccgcggcgccagtgacgcgcatcgcctgatacacgtaggaacggccggacagaggatcgcggatgcagccgccgatgcaggtggccgcgccaccaaacggttcgatttcggtggggtggttgtgggtctcgttcttgaacaggaacagccagtcctcgtcgtggccgttcacgtcaaccttgaccttgacggtgcaggcgttgatttcctcggactcgtcaaggccggtcaggacaccgttcttcttgagccacttggcgccgatagtgcccatgtccataaggcagacgggcttggcgtcgcggccgagctcgtggcgcatcgccaggtaacgctcgaaggcggccttgacggtggcgtcatcgatggttacttcgtccagctcggtgccgaacgtggtgtgacggcagtggtcggaccagtaggtgtcgatcaccttgatttcggtgatggtgggctcgcggccctcctcgctgaagtacttctgacagaattcgaggtcggccagatccatggccagaccgcgctcgtcgatgaacttctggccggcttcggcgtccatctcgttgaaaccggcgatggtctcgaccttgccgggcaccggcacctgggtcttcagggtttccttggtctccaggctggcctcgcgggcctcgaccgggttgatcacgtaatgcttgatggtgtccacgtcggcgtcggtcagttcgccttccaacgcgtacagcttggcggaacggaccgtcgggcgctcgccctgggagatgagctggatgcattcggcggcggagtcggcgcgctggtcgaactggccgggcaggaactcggtggcgaagaccttggcgccggcgaagtcgggcaggtcgtaggccacattgtccacctgaggctcgctgaacacggtgggcacggtctggccgaacagctcctgggagatgccttcgacgtcgtagcggttcacgatgcgcagggccttgaggccgttcagtccgaggatcgtgcgcagttcgcccgcaagctgctgggcttcgacatcaaagccgggcttcttttccacgtacacgcgaaaaaccatggaaatcctttcttgaaaatattgaaaaattgaagaagtgcggtaaaagaacttggctcccctctccgaggggagctgtcagcggagctgactgaggggagttgtcatggcggtgaacgtcttgacctcccctcagtcgcctatcggcgacagctcccctcggagaggggagccagctgtatgttctgctacctgcacctaaacgacttattcggcgacttcgatgccttcggacttggcgagttcggcgaggcgctcctcgatctcttcgtaggccgggatgatgctgccgagaccacggcggaacaggtccttgtcaaggtgctcgaccttgccggagtggtccttctggtcccacagacggcaggaatccggggtgatctcgtcggccaacagcagcgtgccgtcggtggcgcggcccatttcgattttgaagtcgaccagcttgacgtcgatcttggcgaagatctcgatcagggcctcgttgatcttgcgggccagcggggcgatctcggcgagatcctcgcgagtgcatacgtcgagggccaccaggtcatcgtcgttgacgaacggatcgtgcagatcgtcgttcttcaggaagtactcaagcaccggctccttgagcggcaggccttcctccacgcccagacgggagcagaagtggccggcggccacgttgcgcagcacgatctccaacgggaacatgttcaccttgcgcaccagctggccggtgtcgttcactcgcttgatgagatggctgtcgatgccgcgcttcttgagcaggtcgaagatgatggtggtgatgaggttgttcaggcggcccttgccggtgaagtcttccttcttttcaccatcgccagcggtggcggtgttcttgtattcgacccacagaacctcgggatcgtcggttgcgtacagttgcttggccttgccctcgtagagcttttccagcttctccatgactcacctttcaggagtggaatttctgggtgaactaacggtaaaagggtatcaatcgagggctacaacaacactcggcatgacgctacgatgcggccagcgcatcatacgtcgctgcatcgaacgaccatacgctgttgggatggcggaggcggatggtattggtccgacaatcgactcattgccggtcgcatagtcgttcggagtaacagtatctacgcaagcacgcggacactcagatgttcgtcaatagacaaaacgtgagtgtacggccgcgcacgcacgataatgggagtgacgaaatggtgcaaggaggttcgtcatgatcgatcatattggtttgtttgtttccgacgccgcacagtacgcggatttctacgagaagctgctggccccgctgggctacgtcaagaaagtggcgtacccgaccgccgtgtgctttgccaatgacgaggatggtgacagcgtttggttggagtctccgaaggacggcaacccggtggtgccgtctcatgtggcgttccgcgccaaggatgaggccgccgtcaaggcgttccatgaggccggtctcgcctctggcggtaccgacaacggcgctccgggcccgcgcccgaactatggccccacgtattacgccgcgttcatccacgacccggacggcaacaatattgaggccatgctgagctgatcaggccgtggactactccacggtaatcgtcaacgcatcggccacacggccggccttggcacgggcgtcggcttcggactcgccgacggccagtgccacggccatgcggcggtggccatgcacttcgggcttggcaaaaatgcgcaggtccgtgccgggttcggccagagcagcggccacatcggtgaactcggcctcaccgtcgccggccaccacaatcgcatggcttgccgccaccgagccggccggaatcgtgagcgccacatgctcgggggtgatcggcaggccgagaatcgcgcgggcgtgcagcgcgaactcgctcagacgctgggaggtcatcgtcaccataccggtatcgtgcggacggggggagacctcgttgaacagaatcgagccgtcggtgagcacgaacagctccacgccgaatacgccccaaccggtttcgccggtcgcctgagccttggccaccaagccttcaacggcggtacatgcgatgtcgcgcgcccgctcggcctcgccatcgggctcggtagccggctgccaggactcgcggtaatcgccggactcctgacgttggccgatcggcgcgcacgtcacaatgccggcggacgaagaaacggtcagtaccgtcagctcacgctccagcggggcaagcgcctcaacgatcacgcgcgacacatcgccctcatcggcggcgcggcggccctcctgcgcttcggtccaagcggcatcgatggcgtcggcggaacgcaccaccgactggccgtgaccagacgagctcatcaccggcttgaccacgcacggatagccgacttccgaagctccggcgcgcagctcttccagcgagccggcaaaacgatacggtgtagtcggcaagcccaattcttcgtgggccagtacgcgcaggcgctcgcggtccatgcaaatcgcggcgatttcggcgctcggcaccacctgggcgcccgcggccgcagcaccggccagcacatcggtggcgatggcctctacctcgggcacgatgatgtccggcttgatttcatcgaacaatgcctgcaattcggcggcattcgccatatccaacgcgcggtattcatgcgccacctgctgggccggagcgccggcataggagtcagcagcacacacccatgcgcccagtcgcatgagttcaagtgtgacctccttgcccagctcgccagcgcccaaaaacagcacacgggtggggtgcttgcccagcggtgtgcccagcgggtggttggctgcgcgagttgcgggggagacggcggaagtctcagcggaggttgcgggggaagaggcggaagtcacggcagtattcacggcgttctcagtcatacccacattctgccatgacgcgatgatttcggtatgtcgcgtgagcggagtgcctcgcgcggcaaaattacgggcggaatatccggcttcatggggcggtaaattccccatggggcggtaatgagtccatggggcggtttgttggttttgtgaaaccgcggaattaagccgttttgccttaccgccccatgggaatttcaccgccccatggggtaaataccgccccatgggcaggttgccgccccatgaagattcagatgcccgtaacccgccataaatactgcgtatagacatgccattgcgtgtgtaacagagccgtcgtaccttagcaattaccggccgatgaagtatggggcggtcgggccaacattttgggatgcgacatatagcgaatagcggcgtgccggttccggcatttcaggctacaagccggcacgctggcaatagtcgaagtacttaacgattccgcctatgtggggctcgaattcggtgacgtacgctcgctgagcctgctggagactccgggcgcgctggacgtggcgctggaacttggctcgctgtccaaaatgtatatggtggccggctggcgcggtggcatggcgattccgccgcattcgtggattggctgctcaacacggccggcgtggcgctgatgccggggatctgcttcggtcaggcgggcgaaggctgggtgcgcatcagtctgctcaagcacaccgccgagttgttccaggccgtggcccgcgccgatcgtgcgctgcgaagcgcgtgattcaatattgggcaaaatgcggcagcccataccatttccggcctatccaagcagcgcggccgacgctattgccgcgcggtggtttaggatgaggcaatgcgcgaaaacgggattgaagagagcattgatcgtccgctgactatcgctcttgtggtcgatacggtgggcaatcagggcaacggcacctccaattcggccttgcaatgggctgcggaattggagcggcaaggccatcatgtgaggcttgtcggtataggggcgcccgaatatccggcgcgcgtgaataaggtgccgctcgtctcgtgggtggccgccaagcagctcatgcaattcgccgaacccagcgacacgttgttccgcaccgccttccaaggcgtggatgtggtgcatatctatatgccgttcaaattcggccgtcgtgccgctaaagtcgcccaccaaatgggcattcccgtgactgccggattccacctgcagccggagaacgtgctgtattcggccggcccgctacgtcgcattcccggtatttccagcttcctgtactggctgttcaagcactggctgtacaagcacattgaccacatccatgtgcccaccgaaatgaccgcgagcctgttgcgcgcgcacgggtataaagccaagttgcacgtgatttccaatggttattcaccggtgtattcgccgaagaagccggccgatccggatgcctcggctcccgtgccgttccgcgtcatcgcttccggccgactggccagcgagaaagatcagattacgctgatcaaggcggtgtcgatgtcccggcacgccggcgatattcagctggtgatcgccggtactgggccgctcaagcagtatctcaagttccgcgccggacgtttgctggcgcgcaaggccgatatcggattccacaagcacgccgatatgcccgatttgttgcgttcgggcgatttgttcgtgcattgttcgattgccgacatcgaatcggtgagcgtgatcgaggcgatggcgtgcggattggtgccggtgatcgccgcgtccgaactgtcggcggccggccagttcgcgctgatcgacgagtcgttgttccccgtgcgggacgcggccctgctggcccgacgcatcgattggtggatcgcacatcaggccgagcgcgccgaatggggcgagaaatacgccgaatacaccaaggcgcattattccgtggaagcctcggtccacaagttcgtggatatggaacgcaaggcgataggggagtaggagccttctcgtttgcggagaggttttccctcagtccgcctgcggcggccagctccctcatcggcgggagctacgaaaaaacctccctctggtgagggaggtggcatcgcgaagcgatgacggagggagagattagcgaagggttttacaacacctcaataagttgatcgacctcttcaggcgtggtggcccagctggtgcagatgcgcatcacggtatgcgtgtcgtcggccttctcggtgaagccgagcttgacctcgcgctccagacggtcgatggtcggctgatccatcgtcacgaaaatctggttggtgggcgcttcgaaagtgagcatgtagcccttggcgcgcagggcctcgcgaatacgatcggccgcctcattggcgttgcgggcgatcttgaagtacagattgtcggtgaataaggcgtcaaactgcgcgcccagcacgaagcccttggccagcaaggcgccgtgctgcttgatgcgggtcaggaagtgcttcggcgtgttgtgcttggtaaacaccacggcctcgccgaacagcgcacccaccttggtaccgccgatgtagaacacgtcggcgatggtcgccagatccgtgagcgtcatgtcggaaccagtggcggtcagcgcgtagccgagtcgcgcgccatccacgaacagcggcatatcgtacttatgcgccacatcggcgatagcctgcagttcggctttggagtagatggtgccatattcggtgctttgcgagacgtacacggatccagggaacaccatgtgttcgtagttgccgtccgcatagaaggtcttgcagaactcgtccagttcggttggatccattttgccgttgtgttggggaatcgtaagtaccttgtggccggagaactcgatggcgccggcctcgtgcacgttcggatggccggaggcgaccgcgaccacgcctgcatacgccggggtgatggtgtcgatgacgacctggttggtctgcgtgccgccgacgaggaaccacacatccgcgtccggctggccgcaggcctcgcggatcttggccttggcctgatcgctcagttcgtcggacccgtagcccgaatacagatggttgttggcttcagccacggcttcaagcactgcgggatgggcggcgcgggagtaatcgttctcaaaagacagcatgacggaccttttgtccttgtgttagatgaattggatatgcccgagtgtacaacgcggcggttcccggcaggagcggggaattcatggagaaaacaaaacccttccgcgaacggaagggttttactggggtggccaacgcggctcgaacgcgcgaccttctgaaccacaatcagatgctctaccaactgagctatggccaccatagtgtcgtattcagcaagctgaattcgcacaacaggtgaatactatacacaactttgcggatgtgtgctcatcggtgtgtcgcgatggaatcaag

SEQ ID NO: 1916 - DNA, 41630 bp, Unknown
  R17_18m  MAG No. k141_1470
ccagacgcgggtcgagacgcagcacggtgcgcttgtcgacgccgcccttggtgttcggggcctcgtccacatcgtaggcgtccacgaggaagcacatcagggaacgggtcagaccggcggccggctcgatgacatacggcacgtacttctcgccggtggcctggttgaagtagctcagatcctcgccggagtgcttggagtgggccgacagatcgaagtcggtgcggttggcgatgccttcgagctcgccccagtcggaaccctggaagccgaacttgtattcgatgtccacggtgcgcttggagtagtgggagagcttctccttcgggtgctcgtagtggcgcaggttctccggcttgacgccgaggtcgatgtaccagcgggtacgggcgtcgatccagtactggtgccattcctcatcggtgccgggcgtgacgaagaactccatctccatctgctcgaactcacgggtgcggaagatgaagttgcccggggtgatctcgttacggaaggacttacccatgttggcgatgccgaacggcggcttggaacgggaggaggtcatcacgttcttgaagtcgacgaagatgccctgtgcggtctccggacgcaggtagtgcaggctgttctcgtcctcgaccgggccgaggtgggtgcgcagcatcatgttgaagtcgcgcggttcggtccactggccacgggtgccgcagttcgggcagacgatgtccttcatgccgttttccggcatcttgtcgccgtgcttctcggcgtaggattcctcgagcttgtcggcgcggttgcgcttgtggcagttgaggcactcgacgagcggatcgttgaacacgctcacgtggccggacgccacccacacttcgggcggcagaatgatggaggtgtcgacaccgacgacatcaggacgggtgacgaccatggagcgccaccattcacgcttgatattgtccttgagagcgacgccgagggggccgtaatcccaagcggaacgggtgccgccgtaaatttcgccggcggggaacacgaagccgcgacgcttcgcaagggatacgacttcatcgagtttggactgagccacaatgcaccttctggtttgaacggtttggggtctaataacaaccgcttcaggatagccgtatacggtgacaggtcaggcggcattgtccggtatatgttccgcgtctcacgagcggccgttcgcagcgattcctatatcgcaacacctccatattgttcctgttgttttgcccttccccaatttgtaccactgacatcgcgtcagcgtcacaaattcgggagatgttgctcggcggaggcgtccacatatcacgaatggacgggacgcgccagacctgacgacacgtatcgaacaaatccgtcacgataatgtccatgttggcgcatagcgtcggcactgtagtgcagggggactcgcatgtggttcgcgagttgagaaaggcctgagcctgacccttagaacctgttggttaagaccatcgtagggagcagtaaatgagcaatagtgcatcatcgtttgccgatgtgtccagcggttgtaccgccgggactccggttccagccgattcacccatccgcgacaatatcgccgatgccgttcgccgcgtacgcgagacgactccattggcccagtcattcaccaattttgtgaccatcaatttggtcgccaacgcgcaactggcggccggcggcactgcggccatgagtttcctgccggacgacgtgatcgaaaccgcgaaaatcgcgggcgcgaactacatcaacgtgggcacgctgctgccgttctataaggatgcgctgcccgaaatcgcccagcgactcaactacttggacaagccgtgggtgctcgacccggtggccgccggcatcggccacacccgcaccgccattcttcagaccttcaaggccgctcccccgaccatgattcgcgcgaacgcctccgaggtaatcgcgctggcgaacatgtgggggctcaataccgaaaccgtgggggacgcttccgagcaccgccccgccggagtggaatccgtcgacgacgtggagtccgcaaccggtgcggcggtggcgctggcacagtatctgaccgaacagcacgccaagcattcctcccatgacgcttccacccgctgtgcagtggctgtgtccggcatcgccgatctggtgaccgacggcgaaaccgtgtaccgactgccgggcggcagcgcgatgatgaccaagatcatcggtgcaggctgctcgctgggcggcgtggctgccacatatctggcggtttccgatccgttgaccgccgctctgtccgcatctctgctgtacaaccgcgcggcagagatagccgatacgacttcgcacgggccgggctcgttccaggtcgcgttccttgacgcgctgtggaatgttaccgccgaacaggtggcggaatccgagattttggtgcagtagtttcagttccctctgatgagggagctcataacagtttttcccaataagacttccacaagaaacaacaaaggtaggaataataatgagtaatgaatacccatacgcctccatgcgagacaacttcgacttgtccgcgtacttcgtggtggggccggaggactgcaaaggccgtccgctgaccgacgtggtggatcaggctctgcgcggcggcgcaaccttcatccaactgcgcgccaaggaggccgatgcctctgagctgaccgacatggcccgcgacatcgcgcagatcatcgaggacaatgagaagtccgattccgtggcctttgtgatcgacgaccgtgccgacgtggtgtggcaggcccgccgcaagggcatcaaggtggacggtgtgcatatcggccagaccgacatggagccgcgagaagcccgcgccctgctcggcgacgaggccatcgtgggtctgtcggctgagaccgaaagcctcgttcagctcatcaacgagctgcccgacggctgcatcgactacattggcgccggccctctgcacgtctccaccaccaagcccgaggcttccgtgggcggcaacgacggctccggcaagacactggacgccgcccagatcaacaccatctgcgctgccagcgaattcccggtggtcgtgggcggcggcgtgaccgcagccgatatggccatgctcgccggcaccaaggccgccggctggttcgcggtctccgccatcgcgggtgccgagaacccggaagaggccgcgcgcaccatggtcgaaggctggaaggccgtccgcggcgacaagaagcacggctacgcgccgcgcgtcgtagcccacacccccgctgctgatactcaggctgctcaggaaggggccgcaaagcctggctccgaggccactgagaagaagttcaccaacgccaaggacgccaaggatgcccagaagctcgccaagcagcagcgcgtggacatcgccgcccgtggttccaagcagcgcgacaaggcgcacatccgcaagaccaagtccgtaccgttcacctatcagtatggttcctacgacctggaagtgccgtacaccgaaatcaagctgagcgacacgcccggcgtgggcccgaacccgccgttccacgactacaacaccgaaggccccaagtgcgacccgaaggaaggtttgaagcccctgcgtctcgactggatccgcgaccgcggcgacatcgaagactacgagggccgccgccgcaaccttgaggatgatggtaagcgcgccatcaagcgcggccgcgccaccaaggaatggcgtggacgcaagcatgagccgatgcgcgccaaggaccacccgatcacccagatgtggtacgcccgccacggcatcatcaccccggagatgcagtacgtggccacccgcgagaactgcgatgtggagctcgtgcgctccgagctggccgccggccgcgcggtgatgccctgcaacatcaaccaccccgaggccgagccgatgattatcggatccgccttcctgaccaagctcaacgccaacatgggcaactcggccgtcacctcctccatcgacgaggaagtggagaagctgacgtgggccaccaagtggggcgccgataccgtgatggacctgtccaccggtaacgacatccacaccacccgtgagtggattcttcgcaactcccccgtgccgatcggcaccgtgccgatgtaccaggccctcgaaaaggtcgaggatgatgcctccaagctgagctgggagctgttccgcgacaccgtgatcgaacagtgcgagcagggtgtggattacatgaccatccacgccggtgtgctgctgcgttacgtgccgctgaccgccaaccgcgtgaccggcatcgtctcccgcggtggctccatcatggccgactggtgcctgcgccaccaccaggagagcttcctgtacacgcacttcgacgagctgtgcgacatcttcgccaagtacgacgtggcgttctctctgggcgatggcctgcgccccggctccctggccgacgcgaacgacgccgcgcagctttccgagctcatgactctgggcgagctgaccgagcgcgcctgggccaaggacgtgcaggtgatgatcgagggcccgggccacgtgccgttcgacaccgtgcgtatgaacatcgagctggagaaggccgtgtgccacaacgccccgttctacaccctcggaccgctgaccaccgataccgctccgggttacgaccacatcacctccgccatcggcgccaccgagatcggtcgttacggcaccgctatgctgtgctacgtgaccccgaaggaacacctcggcctgccgaacaaggatgatgtgaagcagggcgtgatcgcctacaagatcgcctgccacgccgcagacatcgccaagcaccacccgcacgcgatggatcgtgacaatgcgatttccaaggctcgcttcgagttccgttggctcgaccagttcaatctgtcctacgatccggacaccgccatcgccttccacgatgacaccctgcccgccgagccggccaagatggcgcacttctgctcgatgtgcggcccgaagttctgctcgatggccatctcccagaacatccgcaaggcattcggtggcgaggccgctcagcagcaaatcgtgaaggaggctgctgctggcatcgactccgaggcactggctaaggccaaggccaatgtcgataacgacgtggtgtccgccaacgtgctcagccccgaagaaatcctcgccggcatggatgcgatgagcgaaaagtacaccgcccaaggcggcaagctctactccaccgcccaggagtaaacctctctggctcccctctctgaggggagccaattattatgcccggtggtgtcttaattcgggacgacgctcgactcgctcgaaggcggtgacgaggtcggcagcacggatcgcgccgcggcggtccttggcggccaccagagcggcctcggtccagatggcgcacacttcggcgccgctccagccttcggtccgctgtgcgatatccaccaacggcagttcgccctcgattgacaacgaacgggcctgcacctgcagaatgcccaaacggtcgcgctcagacggcatcgggaaaggaatctgccagtcgaaacggcccggacgcaacaaagcgggatccacgtcctcaatacgattggtcgcagcgaccaccacaacattgcccttggactcgaaaccatccatcaacgtcagcaactgcgccaccaagcgcttgccgacgccattggtatcgttctcgcgcgaggacgcaatcgaatcgatctcatcaaagaagatgatggcgcgcttgtccgcctgcgcggcggcgaaaatcatgcgcagcgtttcctcactatcgcccacatacttgctcacgatggtcgggccggacaccagatagaactgcgcgtccgccacattggcgatgatgcgggccagatgcgttttgccggtgcccggagcaccggtgaagatcacgcccttgatgggcttggcaccgatcgcacgcatctgcgcactgttgcccagctgcgtttcgataagctccttggcgcgcgtgatcacctgctcataaccgccgaacgaatcgaaggtaagcgacggatcgctgcccggcgtgatgcggtactgcttgatgtcgtcatcgtgatcggattcgcctgggcggatggccgtgggccacagcactcgttcgatgccgaacaggtcggtgaactgcacggtgttgccgggcatgatcgaattcgggtaatcgccttcaagcagttcgaggccgtcggaagtctccaggaccacgccttcgttgagcgcacggcgcacgatgcccacacggggcttcaacggccacacatcatgcggcactttacgatagaaatccgtgccgacgagcaacacgtcgcccacatcgaacacctcctgacgcggaaatgtgagctgtgtggtgtgcccattaggcattacgccaaaatatgcggtgcgttcatcgtcaaaaccggtgatgcgcaccaagacgccgtcacggcgcagtacatcgttatcagccatgtcccctcccgaacatttcatgaatcaatcgcaatcagcaaaccctccccatctcaccacaggagcggcaaaacatcaaggaaaaccgctccgaaaaacatcatgggccccacttagaatgaacactatggcacaaattgcaacatctacactgcccgctgttctcgcgatctccggctccgactcgtccggcggtgccggcatgcaggccgatctgaagaccatgctggcttgcggcgtgttcggcatgagcgccatcaccgcgctcaccgcacagaacaccaccggcgtgcgttccattcaggacaccaaaccggacattctcgccgaccagatcaacatggtgtttgaggatattccgccggtcgcggtgaaaatcggcatggtgtctgccactgacatcatcgacgtcattgctgaacgactcaccttccatcacgccacgaacatcgtgctcgacccggttatggtggccacttccggtgccaagctcatcagtgacgatgccattgcggccttgaccggcaagctgttcccgatggctacggtcgtgactccgaacattcccgaggccgaagtactgaccgatacgctgattcgcgatcaggaggatatggaggccgccgcccaccgcatcgtggagcgttacggctgtgccgcgctggtcaagggtggtcatggcaccgaggatgccaacgatgtgcttgccgagacggatggaaccgtgacctggtttgatggcgcgcgtatcaataatccgaacacgcacggcaccggatgcacgctgagctccgccatcgcctcgtatctggcgcttggcgacacgctgtccaaagccatcaagcatgcgaagaagtatctgaccggtgcgctgaagacccagctgaatctcggccacggctccggcccgatggatcatttctggaagtatcgctgacataagtgtggctgttaagctccctttgccaggggagcttaacactactgaaaaaggagaatcatggttcttgaccgtaatgccgttactcaggaagtgccgatcgacccggaaaccggcaaaccgtacctcaacaccgtggcagccatccaggtgtcggccaatggcgtgggctccgaggtttcaccatacgtggctcaggccgtcgaagtgattcgcgaatccgccctgccgcaggaaaccaacgccctgttcaccaacgtggaaggcaatctggacgacgtgctcaaggtggccggtgaggccgccaagaagctcgccgagcagggctaccgcacttctctggtgctgcacatggatatccgtcccggcttcaccggccagctgaccgaaaagcccaagctggtggatgagatcctcgccgacaagcaggcgaaatagcaaagcatcgcttccaccagcaagggcatgctttgttattacacgtttcatggggcggtaactcacccatagggcggtaaatatctcatggggcggtaaaaccctcatggggcggtaggcgaaaacggctctattctgcggaaaggcaaaatccgctaaccgccccatgggccaaataccgccccatgagtgttttaccgccccatgggaatcacggttttgccttctttcaacggggtaagagcgtaagtggggcatatataggagcgttacaaactctgttatcgttcacaatgtgaccgcaacgcggcgtgccacaagatcgaacctatagttaagccccatgtagtgagctatctcacaacgattggctcgctacgtggaattcaagacttggactgcaaacgtcgttcatcccacacaatgggagggcgaacggaacacgcagtccaatcaagagttcgctcgccgcaacatcattgagcagttgcacgcgggcaggtttgcaagaagagggctcaaatatgactgctgctgaacagcagatttccggcaatcccgcggctatggaaagcgcacaagcacgtaccaccgtgacggatcaagccatggttcaggatattatctcgcgcgtggatcgcgcacatgaaaccccgatgttccatcgcatcgtggcgctggtcgccgctggcatgctgatggacagcatcgacgtatatattggcagcgccgttgcctccagcgcgttggccacacactggtccaccgttgcgcaaaattccacctttatgtccgcaggcttcctgggtctgctggtcggttcgctgctggccggcttcgtcggtgacctgaagggccgccgcgtggcttaccaaatcaacctgctgctgtttggcggcttcaccttcctcggcgcattcgccccgaacatggccgtgctgtccctgtgccgtctgggtgccggcctgggcctcggcgctgaaatcgtcaccggcttcgccatggtcaacgagttcgcaccgatgaaccgccgtggccactggtgcgcgattgtctcgctcgtggccaactgcggtgtgccgatcgctatgctgctgtgtgcatggatcatcccccgctggtcctggcgtccgctgttcgtggccatcggtctgggggccgccatcatctggtggctgcgccgcgacatccccgaatccccgcgttggctcgccgtgcacggccgttacgatgaggccgacgccatcgtcaagcagcttgaggccaacggctccgaactgatcgacgcagccgccaaggccgacaccagcgacacccgcaacgccggcggccgttcgctcggcatctgcctgcttgtggctgtggttgctgtggccgccacgaacgtgtgctcctacgccttcacttcttgggttccgacgattctggtcaagcgtggtattaacctgtccagctcgctgctcacctccacggcgatgatgctcggtgccccggtcggctgtctgattggctctctgcttatcgaccgcatcggccgcaagcgcacgattgtgccggccttcctgttcactggcgtgttcggtttgatgtatgccttccagacctctaccgtgagcgcaattatcgttggcttcctgctcatgatgtgcctgtacgtgcttatggcttccgtggtggctgtgtacgctccggaactgttcgccaccaaggttcgcttccgttgcgtcggcttcgcgaacgccgtggccaagctgctcaatgtgttgatgcctatagtggtgggttggatgcttacctcgcttggtgccacgtccatctttgtggccatcagcgcgattgctattgcatcgatgctgattgtcggcttctttggcgcggagactgcgcagaagtcggttgggtgatcggtttcctcacagtggaataactgctgataatgtccattcggcgtcttgcgtggtgatatgcagggcgccgttttgttgttctagtaattgtcggtaacggttgagaccggtaccggtggataggtccgcactgccatccgcatccgaatccgatgacgtgcgggccgtgtcgatgcaggcgatgcggacggtgtccagtccgatgccaatcgtcattacatagcccgcttccgggtcggcatgtttggcgatgttgccgtacagttcctccagcagcccggcgatcaggccactccgaccggctgcgccatgagcaccggaaataatcgtctgaccttcaaagccaagctctgataatcggcggtcaccattgctcgcaacatcacgaatttgctcggctagcgggcaatcagcgtctgtgatgccacatgcaatgccagaagcggcatcaacggtcgaatcatgcggagtcactgcactgtgcgccgcttctcccctgccttcaataacatcaatgacctgatgcgtgcgatccaatgcgcccatagccacgctacgcagttcgcgtaattcttcttcagaaggggtcttgccatcggcaatatccttgtcgaatcgcaaaatcaggtatgccaaatcattggatacgtaatcgtgaatgtcctgagctgtgcgttcctgctgacggcggtgagccaactccgctcgagccaagctgcgttcgtgattccatcgcgccgccatgccaccaagcatgaagccaataaacaacacggccactggcatcacaccatagagggcaatcgcaccaagaatcacttgcccagtgcgatgctcggcagaagaaccgctcgattcataggcgcttccggtgaagtcgcttcccgactgccctgcgctgtcagacccactggatgaagagccaccatcagcagcgccaccatcagcaacactaccgtttagggcactactactcgccgcgccatccgcagaaccgctcatcgtgtctgagccgccatcaagccaaggaatggccacgccaccacgcgacaacatccacaccacaacggcaatgccggcaaccgccagcgccaatcgcttatcggcgtatccggcaatacccaccgccaataacacggcgagcattgcacccgacggcatccagatcggactcatgcacaacactatccaagccaccgctaccgccacgcatccggtgaccggacgaaacgccatccaccccacaatggcaacgaatatgaactccgcaaggcagtccgccgccgagacactgtcagcagccaagcccgccatggtttccatcgtgcatatcaaggcaacaaccagtatggcaatcaacagccatgcattgcgaacaccgctatccagctcggccaatcggtgtcgtaacgctttcatagcagttcctttcctaccatccatgccgttgcacataccgcccatgccaactcttaaatctcatgccgtttcacgcagattgatatggcatgagcgcgactgcgagcgccgagtttggcgagtgcgcggcgttcaaaagtcgccacagtggccacgctgatgcccaatcgctcggcgatttccttggtggtcgacccatccgcatacatacgcagggtgtcgcgttctttgccggaaagcgcgccacggtgcgcgtatgacgtatcttcgagcaccgcgtaggcggttgcggcatccatgaaggacagcgaattaccgctcccctcatctcccagtaccagctcattggtcgacaatccttgggctgcattgcgaatagcgagcgcaatgccgttcaaatcggttttaccaaccaaggcctgcgccccgcagcgagccgcctcgtcgtgaaatgacgcgagcgcgtatgaggtgacacccaccagcccaacctcgggtgttttggtacgaatcgcacgacagacttcggtaccgggcacgtcgcccatagacatatccgtaaccagcacgtcaggccgcttggtggggctcaggcatcggctgatggccacggcacccaaatcgcaggtccatatcacggcaaaatcgctggacatgcgctcgattagcgcgccgaacactttcagcgcatacgggtcattgtccacaatgccgatgcgtatgttgcggttgcgcgcttctcccattacattcaccccttcagtgtgcccgacgccgaactgctccgtcctgacatgtcatggtcactatgacaactatcattccacatttcctgcgcgatttacgatggaatcatcatcaatccttgacaaggcggtaaaggaggactgcaatgaaccgtgcacaagcactcagcaagctcaacaggagcgatatgcgcaatgccgccgccgagcgcgggacgcaacgaatattcgcgtggaaccgcgcgcattggattggcatggttgtactgatagcggtgttgttgctgctgcagtggagctcatcaatgtatctcatgcccgacgaggtccttgacagggctgccaaaaacctgttcgtatggttccccggtatggttctgcactggccattggtgttgggaatcaccaacctgatactcggttcgatacgatccggcagtctgtctttcccattggcgagcgcaatcatcggaccgctggcattcggctgtaccaatcttcgcttacggccggggttcccataccgttcctgggctcagtggtggaagctaatgcacgctgaaagcggccatcagctattggttcattcgttgatcggctcggccatgctgttgatctgttatacggccgttgcgttcatctgctatgcaatcggacgctacggtctgcgcgaattgtttgtggatccgaatccgcagacggcgagcggacgactgctcacatggattcgtcaggatgcgattcgcttcggctgctggctggcgacggcaatcatgtacggcttgctattggcgctgaccttacggggcggcatggctgcgatggccgccgcgttgctaatcaattttgtgattccgcccgccttgctggtcatcaacggcatctacgcgctacgcccggcctcactgacgtatccgtggaaaagcctgctgttcccgttggcgtgcacactggtacctgcgccgatgctcatggcgctcatcacggtgtatgaagacacgtgcccgataggaagtacctgcacgctgatcggcgaccgatacctctcctggggctcgatggatcaggtcttgcatttcgtcatcgtgttcgccgtggcgagcttcctcggattcggcgtggtgtgggccgtgcggtggattgtggctcgtcgcacaaaataagagagaccaaaatatactggaatcaggggcttcgtgcaatgatgcacgagccgatccaagcaaaggggctgaccatgagcgagaaactgatggaacagtaccggttgcgcaaacaacgcaaacgccgtaacgcttgtatcgccgccatcgtgacagtagtgcttgtccttgccgtcgccggcggcgtatggtggacggccggcgatggcagcgtactggttcgcaatatgttcaagccgaaggccacgcctgccacacagccggtagtcgacagcaccgcagccttcgcctaccgcaccgcaccggaattcctggcgatggaaaccggcgaccgagacaccggcaatgtgaactactcccctgcttcgatgtggatggcgttggccatcgccgcgcagggcgccaatggcacgacccgctcgcaactgaatgagctgctgggctccggttcgctggccgacagcgactaccaatcgctgctgagttcgatcaacgggcaatattcgggggcgaaatccgagatgagcgccgcgaactcgctgtggatcgataacgactactctcttgccagcgattaccaatccaccgtcaagaagatattcgaggccgaagtcaccacgctaccgttcgacgatcaggccgccgccaagatgtccgattggattgccaaacatacgaatggttcgctcaagccgaagatcacgctgcgtgaccgtgaagtcctgtccatcatcaacactgtctatgcggatggccgctggaaggatccgttcgaagagcagtccaccggcgacggcaccttccacggcgaagccggagatgctcaggtgccgatgatgcaccggaccttcagccaaatgacttacagccatgatgagtacaacacttggcagcgggtggagattccattcgacaacagcggcaatctggccatcgtgctgccggccaaagggcatttcgacgagctggccggcaatgccgagaaactcggatgggcgttcggcacgtgttcgtcggcatcccctggcgaggacgcaatgggttgcaccgcggacagtttgcccggatggggcgtctccgtcaactcggccacggtgaacgtctcgctgccacgattcaccgtcgacagcatgttcgactcggaagccaccatcaaggcattcgaaaaactgggggtgaccgatgcgttcagtgcaggcgacgccgacttcaccaagatggtcgacaccgattcgcacggcgagaatctgtatatcggttcgattctgcaaggcacgcgcatcgaggtgaacgaggccggcgccaaggccatgtccttcaccaaagccggcgcagacttcactagcgcgccggtggacaacatcgagttcacggtggatcgcccattcctgtattcgtacgtcaccccggacggcataccattattcatcggtgcggtgcgcaacctcggcggagtcggtggagaacactgatactttcccgacagtccgtcaattagggtgtatcgtttgacgcatggctacgatgaaggaaatcgcgaacaaggcgggggtttccgtctctacggtgtcgctggtgctcaacggacgcgacgaggggcgcgtaaagtccgaaattgcggacaatgtgcgcgccatcgccaccaagctcggctaccggtcgaatccgctggccagttcgctgcgtacaggcaagacgcacatcctcggtttcatcagtgaggaggtggccaccaccccgtacgccggcggtatgattctgggcgcgcagaccgccgcaagccagttcggctatatgctcatcaccgtgagcaccgacggtgagaacagcgagagcgaggaaatcgccgcactcaagcgatacggcaccgacggtttcctgtacgccaagatgtcgaaccgcatcacccatgcgccttcttcgctggccaagacgccactggtgttggtggatgccaccgactcgcttggcaaaatcccgagcgtggaaccggacgagttccgaatcggctacgacgccaccaccagattggttaaggccggatgcgcacgtatcgcctatgtgggttgctcggaaccgatgattgcgcaggatggtcgtttggaaggctatcaggcggcgctcagggacgcctgcctcgactatgacgatcgtctggtcgtcaatgtgctcaataacgggccggcactgaccgcagtcagcgatttgttcgacgccgagcatccggacggattcttctgcttcaacgatgcccgcgcctggtatgtgtacgaatgcgccgcacgccgaggactcacggtcggcaaggacatctccgtgatcggcgtggacaaccatcgcgtgttcgccgaaacgctggaaccgatgctcaccactgtggaactgccgcatttcgagatgggctactgggccgtggccaagctggtgtcaattatcgaaggacgctcgatggacgacgtctcacggccagcgaccaccgctcccctgccgccgatcgacgcgccgattccggcgaagatccactgcacgctgatcgaaaaggcctcggtgaagtaaccgaggcccacgcgatttctcaaggcctccgttcagcgcggaggcctttttgcatgtcgaacgggtacgacacgccgatgacgtcaatcgattgacgtaaatcgattgacgtcgcatagtaattactacacaacaacttctacaaaggcacagccgcccgagcaggagcgtcacataaccaataaccaaccaagtagtaatcaaaggatgattatggcaagtgcaaccaaatccgcatggaagaatccttcctatctgcagagctctttcggcatcttcatgttcttctgctcctggggcatctggtggtccttcctctcccgctggctcaccgacccgacccacggtctgggcatgacctccgcagagcagggccagatctactccatcaactccttggcaaccctggtcatcatgttcgcctacggcgccatccaagatcagctgggcatcaaacgtaagctcgtgatcttcgtctccgccatcgcagcgctcgtcggcccgttcgtacagttcgtgtatgccccgatgctgactgccggcggcaccacccgtttcatcggcgtgctcatcggctccatcgtgctctcctcaggcttcatggccggctgctccctgttcgaagcgctcaccgaacgctactcccgtaagttcggcttcgaatacggccagtcccgcgcttggggctccttcggctacgccatcgtggcactgtgcgcaggtttcctgttcaatatcaacccgctgctgaacttctgggtcggctccatctgcggccttggcatgctgtgcgtctacgctttctgggttccggccaagcaaaaggaagagctcaagaaagaagccgatccgaacgcggctccaaccaacccatccttcaaagagatgatctccgttctgaagatgccgactctgtgggtgctcatcgtcttcatgctgttcaccaacaccttctacaccgtgttcgaccagcagatgttccctaactactacgcttccctcttcccgaccaccgaaatcggcaacgccacctacggcaccctgaactccttccaggtgttcctcgagtccgccatgatgggcgtcgttccgattatcatgaagaagatcggcgttcgtaactccctgctgctcggcgcaaccgtgatgttcctgcgtatcggcctgtgcggcgtgttccacgatccggtcagtgtctccatcgtcaaactgttccactccatcgaggttccgctgttctgcctaccggcattccgctacttcaccctgcacttcgacaccaaactgtcggcaaccctgtacatggtgggcttccagatcgcttcccaaatcggacaggtgatcttctccaccccgatgggcgccctgcatgacgccatgggcgaccgtccgaccttcttcaccatctccggcatcgtgctggccgccctaatctacggcttcttcgtgatcaagaaggacgaccaggaagtcggcggtgatccgttctacaccgataagcagctcaaggcccaagccgcagctaaagcaaacgcctgagcgcaaccgccaaaatcggcaagaacacaactaaatcgtgctgcccgaagcgtttcccctttttccgtttcgggcagcattcttaaaacttttatctaaaaactcaataagcaacaattcaacaatcgcaagattaaacaatcatcaagaaaggctattcaacgatgactggcttcactccggatgcacccgtcctccacgaaatcaagaaccacagcgaagctctggcacaggcggaagcaggcgttgcagccatggccgccgaacgcaacaaccgctggtacccgaagttccacatcgcatccaacggcggttggatcaacgatccgaacggcctgtgcttctataagggacgctggcacgtgttctaccagctgcacccgtacggcacccagtggggtccgatgcactggggacacgtctcctccaccgacatgctcaactggaagcgtgagccaatcatgttcgccccgacccttgaagaggagaaggacggcgtattctccggttccgcagtaatcggcgacgatggcaagctcaagttctactacaccggccaccgttgggccaacggccacgacaacaccggcggcgactggcaggtgcagatgctcgcgctgccggacaatgacgagctcacctccgccaccaagcgcggcatgatcatcgactgcccgaccgacaaggtggatcaccactaccgcgacccgaaggtctggaagaccggcgacacctggtacatgaccttcggtgtctcctctgaggacaagcgcggccagatgtggctgttctcctccaaggacatggtccgctgggaatacgagcgcgtgctcttccagcacccggatccggatgtgttcatgctcgaatgccccgacttcttccccatcaaagacaaggacggcaacgagaagtgggtcattggcttctccgccatggggtccaagcccagcggcttcatgaaccgcaacgtcaacaacgccggctacatgattggcacgtgggagccgggcggcgaattcaagccggaaaccgagttccgcctgtgggattgcggccacaactactacgccccacagtccttcaacgtggacggccgtcagatcgtctatggctggatgagcccgttcgtgcagccgattcccatggaggatgacggctggtgtggccagctcaccctgccgcgcgagatcacccttgacgatgacggcgacgtggtcaccgcgccggtcgccgaaatggaaggcctgcgcgaggataccctcgaccatggttcgatcacgctcgatatggatggggagcaggtcatcgccgatgacgccaaggccgtggaaatcgaaatgaccatcgacttggctgcctccactgccgagcgtgcgggcctgaagattcatgccactgaggacggtgcctacacctacgtggcttatgacgaccagatcggccgcgtggtggtggatcgccaggccatggccaacggcgatcacggctaccgcgccgccccactgaccgacgccgaactggcctccggcaagctggacctgcgcgtgttcgtggatcgcggctccgtggaggtctacgtcaacggtggccaccaagtgctgagctcctactcctacgcctccgaaggaccgcgtgccatcaagctcgtcgccgagtccggctccctcaaggtggattccctgaagctccaccacatgaagtccatcggactggagtagctctctcacctccctcacagagggaggttttttgtgtgcccctgtcgttcgccttcgcctatactgatggacggcatataacacaatccatcacacgaccggcaggcgcgcaggctcctcaccttactgttccacgccccggccgcaagcgccaccagcaaaccggactggcgcggaaagcaaggtgacatcccatgtccatcgccaagcgcctcaagcgccgcatgcccaccgtcatcgccgtcatcgtattgctggcagtctgggaaacgtgggtggatctaggacatgtctcccccacgatgatctccgcgccaagcgagattttcgccgccaccatcgaaacgtggaacacgctcggcccggccgcggcgatcaccggctatgagggcgtggtcggcttcctgttcgccgtgttcttcggcattatgatcggcatcgcactgtactgctcgcacacgttcaacgcggcgttctatccgctgcttgccgccgcacaaaccatgccgctgatttccatcgccccgttgttcctgatttggttcggctttgagatttccggcaaaatcgtaatcgtggcggtattcggcctcttccccatcgccgtgcagaccgtgcgcggactagaagcggtgccccagttctattccgacgtcgcattgacctgcggcgcgaccccggtctggacgctctggcacgtgaagctgcgcgttgccgcacgtcagatctatggcggtatccgcgtatctgccgcatacatcttcgccacggcatccaccgctgaatatcttggcgcgcgcaagggcctcggcatctggctgcaggctgcttacaattcgttccgcacgccgctgatcttctccgccaccatcgtcattatcctgatgacatgcgtactgatgctggcggtgaacgccagcgagcgcatcctgctcggcccggccggcgatgacgaagaccccgacgcggaccagtagttctttttaccgtcaaagacacaagccggcggccagaaccgactgaacggggcggcttctcatgaggtctccagccctgtctctataatggaacagctttaccagcgtgtggcaaaccggctttcttgagctttcatagggaatgtcgggggcgctggtcgaacggaaatcaaggccctccatatcgttttctgccgacttccgttcgaagcaatcccagagaacgatagagagacaacgaattagggaaccatcattatgaagaaaagccttgtatccaaggccgctgccctcgtgggcgcccttgctatgactttcggtttcgccgcatgtggtcagaccaacaccgccgactcctccaactccaacacctccgacctcaagaaggtcactttcatgctttcctgggcgcccgataccaaccacatcggcgtgtacgtggccaagaacaagggctacttcaaggacgccggtcttgacgtggatatcgtggccgtggcccaggccggtgccgaacaggccgtgaacaacggtgtggccgacttcgccctgtccaacctgaccaacgtgggcatctacacgctgaagggcgctcacatcaagcaggtgctgcaggtgcagcagaagccgagcgccatttggtgcgcactggcgtccaacaccgccatcaagtcccctaaggatttggatggcaagaccttcgccaccttcggctccaacgagtccgacgccgtggtgcgccgcatgatccagaccgacggcggcaagggcgagttcgacaaggtgaccgtcggcacctccaccttccagaccatggaatccggcaaggccgatttcggcggcttctacgccacgtgggaaggcgtgcaggccgacatgtacggcccgaagctcaactgcttcaccgagcctgactacggcgtgcccggcaacgccgacgccatcggcatcatcaccaatgacaagaccatcaagaacaatcccgacctggtcaagaagttcactcaggccactcagaagggttacgagtacgcgtacgccaacccggatgacgccgcgcagattctcgtggacgaagcccctgacgccaacctcaagcccgaattcgtcaagaagagcatgcaggttatcgtcgacggccagtactggggcgatccggccaagatcaaggacggctctttcgtgctcggcaccaacgacttcaagggcactcaggaatacttcgacttcctggctgaagaagacgcctacactgacagtcatgacaaggtgattcatgaggccccgcaggccaaggaccttggcaccgacgaattcctcggcaagtaatttccgatattccgagtttgaatctacgcaaaaatgcgtccttcccatgaggaaaggacgcatttttgcgtatcggccgataaggttattcatagcgaatcatgctaacaaggaggcgattccatggcccaacgtcctgaccgcattattgccagcatggataccggtgttgatgatgcgttggcgttggcatatttgttggggtcggcggatgagtgcgagctgagcggtgtgatcgccagttatggcaatgtggatgcgaacacggcttatgccaatacttgcgcggtgcttgatttgtttggccgggcggatattccggtgtttttgggctccgagcatccttcttgggctgatgcgtttattcccgatgcagggtgtgcccagtttcatgggaaggatggactggggaatacttggctggcaggggccggggctctggctgatggagctggtgtgcctggtgatgatatgtctggggatgacatgtctgaggatgtgcccgatggggttgtttctgttggcgggtatttggtaggggacgctcatgctcatccggcgtcggggtcttgttctcgtgtgggtcgctctcggcctgtggaccgtccccagtcggctacatcgacagctctcgccagctggggcaaaaggaggcgctccgttgatgctgcggatgggattgagtatctgattgagcaggttcgtgagtttggccgagacgttaccgtgctggctaccgggccgttgacggatgtggatgcggctattactcgggcaccggatattgcgtcgaaactcaggctggtgatgatgggcggtacgcttacccaacccggcaattgttgggatgcggtggccgagacgaatatcatccaagaccctgaggccgcgaatcgtgtatttcattccggcgcagacatcacaatggtgggacttgatgtgactcaccagtgtttgctaccgcgatcggcggccgaccggtggcgtgcgacggggaccaagcgcgggcggttcttggctgatctcgcggacttttccatcaaggcaaatttggaagccgaccccgcactgttctctggcggcatgccgttgcatgatccgttggcggcggcggttgcacttgattcttcactggtcgattgttttgatcttgcgttgcgcgcggagaccaataccggtgatttcaatggagtacgaggccggaccaccggagacccggttgggctggtgaatcattccatgccgcatgtgcatgtggcacttggtgcggattcgggacgttttttggatgagtttgcagagaggatggctgaggtgtgccggtaactcccctcagtccgctacacggacagctcgaccgcaattacggacaagctgccgctcgcattcttctggctcgactctcgtctcgccttcgcctacaaacagcccatcgggctgttctttatttcacgccgccaaatcgtcgatcgcggtggatgtaatggtcgatggagcgccatagcacgtcacggccgcagtccgggaagagttcgggcacgaagtcgagctcggcgtaggcggcctcccacggcaggaagttggaggtgcgctgttcgccggaagtacggatcaccaagtcgcaatcgggaacgtccggattgtacagatggtcggcaatcatcttttcagtcacacggtcgccggaaatcttgccatcacgcacttcgcgagcgatggcggcgcaggcgtcggcgatttcagcacggccaccatagttgatgcagaacaccacatcgatgaccttgttgttcttggtacgctcctcggcggcctcaagctcgtcgatcaccgacttccacagcttggggcgacggccggaccaacgcacgcgcacaccccactcgtccatctgttccacgcggcggtggatgatttcacgcgagaagcccatgaggaagcgcacttcctggggcgaacgcttccagttttcagtggagaacgtgtacaggctcaaataccgcacaccggcttcgatggcaccggcgatagtgtcgaacaccaccggttcggcggcctgatgaccattggtgcggaccatgccgcgctgcttggcccaacgaccattaccgtccataatcacaccgatatggcggggtaccttgttcttggggaagtcgggaatacgggcagggtcgctgaacggagctgcgggaatgtccaacgacgtgtaatcaacgttctcaaaagccatactcatgaatctatcaagcgcagcgaacgaatcgggcgttcgaggtaatactccccccaatcttcaaccaactcctgcacaacccgctccacaggcgcggcatcaagcaccgaccaatcgccacgaatcagtgcatcgaactggtttaacacgaacggcgcgatacggcgcgcatcggtagtgtggtcggcttcgcacatcacgccgccggacgcgatggacaggtacgccggctccgccttgccgcataccacgcaagtacccaatcgtggcgtccaaccggccaaggccaaggcgcgcatcacataggagtcgcctatggcttgcggggcgtgggattgtttggcgagcgcgttcaacgcgccgatgagcagccgatattggttcgtcagctgctcgtgttcggtgctggcgagtttatcgatggtctcgacgatgacgttggcggcctcatacgccgcataatccgccgcgatcggagcaccgtaagcggcgaccgcttcagcctgggagaccacgtcaagcgagcggccttcagcgataagcacatcgactcgcatgaacggctcgagcctggcaccaaagcgtgatttggtgcgacgcacgcctttggcgaccgcccgaatcttgccatgcccacgcgtcaggatggtgatgatacgatcggcttcgcccagtttggaggtgcgcaacaccacaccttcgtctcggtacagcgacatctcatctcctttccccgcgacgcccggcagactctactcaatgaagtagtcagtaaataaacaggccccagaaggcgaacaccaacagtatgtacagcatggtgaaggccaccagccagaacaggactcggcccagacgggtggaggcgagtaccgggtcggcaccggtgacgatgtctcgaacggattcacgacgagggggtatctgaatcagtccgcgggcggaagcgacctctatcagatgcataaagacgcgggaccaagcccatagcaccagcacggacaccacttggatgaccggccagctccaatacatgacgcccggcgtctcggtaggagcgctgccccatgcaagtttgaccacacccataatcacctgtccaagtccggcaaagaagatgagcagtgtggcaagagtggtgagggtcaaagtcagcaacgcgttgccgaaaccatgtgcgaaaccgagtatcacaggccgttccggtatcagcatgcccgcacgtttggcctcgcgtttctcgcgccgccatcgggcatccgccgcgattttgcggcccagcgccaccagtgccagcacgatggatgcgagcagcagcagtaccaccgtgacgtgcaggatcacaccatatatggtgccgacgcgtcttgccttcaaagcgcccggcagaccgattgattggtacagattggtgccggccaccttttcgctggtctgcgtgagtccggcggaagtgccgacggcccaatcgatgagatcgtccacataggcgtccgcaaacggggtgcccgcttcggactcatcccccaaacgcagcacatggttggcgaccggatagctgcgcacggtcacgttccagttatcggctttgtgggcgttgtagagaatcgcacgcacgccgtcgacctgcgccgtcatcacgtcttttgaaccgtaagccacataggtgggtacggcgtaagcggcgggtttgagcgtggcgaggtcggaattgttcagtccgaacaggccggtgtccgcgctgaacacgcgttggacgatggatcgatagccttcgttcgcgccgacaagagtgaagtcctgggtgacgaaaaatcccagtgattggcgtgggctgaacaccatcgggctcagaagaatctggaaggcgacgtccggatcgtcctcgagcagatatgaggagatccatgtcgattcggaggtggcatagatgccgaccttggcggcgtctacatcgctttgggctcgtaggtattcgatgacctgatcatatgccttggctgaggccggataatcgcggttgatgtcggtggtgctccagacgggtttgtcgagcactgcggtcacaaagccggccgaagccatatcggaggccacatcgccaaaggagttgtcacaggtgccgtatccggcaccgtgcatgaacaccacgccggggcgcttgcctgatgcgttctgaggttcccgaatcaataccttgatggcttggacgccgtccgcattggccttgccccgatcaccaggctccttggtcagattgccgtcgctggtcatgttcagcgtgatgtatcgctcggtgacctcatacgtgcctttcgccggcagcgtttctccggacgggttatcgaaggtgacttcggtatcgtcggtgagcgtggccatcgactggccggtgggttcgatgttccaaggcaccgtggtcaggttggaaatggagaccagcacgccgatcaggataatgaagatgggcaggctgaccatcagccggtgggtgctggtccacggcttggatcgaacagtcaggcgatgctcttcttcttgcgacacgtgcgctattgtaatctgaccgcgatatttacgccgagggcctattcggccgaatcagtgaccgggatgctggattgggaccacgaccgggccggtggaattgacgggcacttggccgtcggcctccatttgggcggcgatatcgttcgctatggtgagcagcgtgtcgacgatctggtcttcgggcacggtcttgatgaccttgcccttgatgaagatctggcccttgccattgccggaggccacgccgaggtcggcttcgcgtgcctcgcccggaccgttgacgatgcagcccatgacggctacacggatcggcgcggtcacgtccttcaggccttcggtgacggcggatgcgagctggatcacatccacttgggcgcggccgcagctcgggcaggagatgatgtcgaacttgcgggggcgcaatcccatgtattccaggagtttgcaccccaccttgacctcttcgaccggcggcgcggaaagggacacgcgaatcgtgtcgccaatgccctcggccaagagcgcaccgaacgccaggcaggatttgatggtgccttgccaggcggggccggcctcggtaacgccgaggtgcaacggccaatcgcccttggatgcgagcagtcggtacgtttcgaccatggtgatgacgtcatggtgtttgacggagatcttgaaatcgtggaagccgacgtcctcgaacatgtgcgcttccttcaaggcggaggccaccagcgcttccggagtcgggccaccgtatttggcgtagagttccttgtccagcgagccggcgttcacgccgatacgcagcgagatgcccgcgtcggtggcggccttgcagatgtccgggccgacttcgtcgaacttacggatgttgccggggttcacacgcacggccgcgcagccggcgtcgatggcttggaacacgtatttggactggaagtggatatcggcgatgaccggaatcggcgatttgcggcagatttccggcagtgcgtcagcatcgtcctgactcggcacggccacgcgcacgatgtcgcagccggcggcggtcagttcggcgatctgctgcaacgtggcaggtacgttggccgtgagcgtgttggtcatcgactgcacggagatgggcgctccccctcccaccggcaccgggcccaccatgatgcggcgggacttgcggcgcgggtgcaagggcgattcgctggtcaggtcgaccggatcaccggttttgcggaacggcttttcgatgggattttccgtattcaaggtattcatcattgcttgtttatcaggttgtcggcgcgtcggcgggcttcaagctcaagctggttcatttcctccacgtccgtgaacagcgggttaccacgaagctcggcgtccatctggtccagcacggctttgaccgtgtccacgatgccgaggtacggcagccgatgatcaagaaacgcatgcacggcctgttcattggctgcattgagcaccgccgtatgcttctcggaggcggccaggcagtggcgggccagttgcacggcggggaacgcctcatcgtccaacggctcaaaggtccaagttgcggcttgcgtccagtcgcacgcggcggccacattggtcatgcggtccggcgcggacaggcccagcgcgataggcagacgcatgtccggcggcgaagcctggcaaatcgtggcgccgtccacaaattcgaccatggaatggacgatggactgcgggtgcacggtcacgtcgatgcgttcaggcgacacattgaacaagcgggacgcctcgatgacttcgaggcccttgttcatcagtgtggaggagttgatggtgacaaccggccccatgttccacgtcggatgatgcagcgcctgctcgggagtgatgttctccatgtcgacacgtttccagccgcggaatgggccgccggaggcggtgaccacaagcttggcgacttcggcgtgggttccggagcgcagggattgccagatggcggaatgctcggaatcgaccgggttgatctggttctcgcgcacttgcgcgctgaacagcagatgaccgcccgcgactacggactccttgttagccaatgccagctgggaaccggccttgagcgccgcgatcgatggttcgaggccgatcgagccggtgatgccgttcaatacgacattcgcaccgaatccggccatggcgatgaccgaatccggaccgccggtcacacggacaccttgtgcgccggcctgtgcgagagccgcttgcagtgctggaaccttggtctcatcaaacaccgcgacttcgggcacatggaactgtgcggcctgttgcgccagcagctcgatatgtgctccgcccgccgccagaccggtgacggtaaatcgttcagggtgacgcgagatgacgtcaagtccttgggtgccgatggatccggtggatccgagaatgatgacggtggagttggaggctatgctcacttttccttcttcgtatcgtcattgttcagtgtggggaacgacaggtcggggatatccgaatcgaagttaccgccaagcgggaacagcagcgggaacgaatcgttggaatcgtgcttatcctgtgacggctgagctgcttccgtgtcgtgggaggcggcaacgtattcagatgattccacagccggacgggagaccgtgctgtctgcaggctgactatcggatacgcgaaccggaatggagttcgtgttacaatccggcttgctggtgggagcaaaggagaccggcatggcagcggacgcagcctcgtcggcagtgctattcacaggttgcgctgccggggcggagggcgccggggatgaaaccgaacccggtacctcattcaatttcagcgcattcggtgtatcaaggctgggcatcttgggagcgaaggacggcgcatccaccgccggaagttcctgagaaaccgcagccatgtgggcgagagcggccagagaggaaccgtcctgcaccatatccacgggctgttccgcgaacaccgacggggtcgatgacggagctgcggattcgtatgacgactgtgccggagcaaacgagggggcgctgccagcggtcacaccggaaaccggtgcggacggggcactggcgggaggctcagccgcaacagctgcggtaggagccacggaaggcgtctcggagacgggcttcgccgcagactcgttggacgtatgcaccgggtatgctgcgggagcaaaggaaaccggctgttccgcattggtgttattggtgcttgtggaagcatcgaacgatgcaggagccggcgcataggcgatcggtgccgccgcggccggcgccgcgggagcaaccggagccggagcagtgaacaagctctgctcggcctgatgcagggcatcgaatgattcgtcatgagcagcggcagacggcgcaaaacgttcgtcagttgccgggcgctgcgttccggaagcgaacaatggcgagacgccgttcgcttgaacggtcacgttcgtggcggtctgggcaggagccgtgggctcgccggacacgaaatcggccacacgtgcataggattccaagcgactcagcaactgcacgcaggcgttcaggaagtaatcgacctgtcgctcgtcatagcctttcttgcccttgcgctgggtgaagatcacattgttgaccgtattcgcattgagatcggccaaagaccgtacatcgtcttcggtcacgccgtcaacgcccaatgcggccgccgccttgtccacaatctggtcgaccagacgatccacctgcttcttatcgtacgaaggctgcttgggcgctccggacttgaagcgttcgcgctcgtcacgctccgcatggttctggacttcgtgatacagcttctcggtcttcgccttccacgtcacacgcccgtgctgtgcgatctcccatgtggtctgcttatcgaccacggcacgttccagacgtccaagcgcggcgtcaacctgtgcgatcacatagccgttcttgcgcaaatcaaaggacacgttctgaatgtcatgctgggtgagattcatgccctcgctgtcatacagagcatgggcgcgctccaagaaagcgtccacctgagcggggtcatacccccacttgcgcttgcccgcacgtgcgatgcccgacttgccgtccccttcacgaagttcctgcgccatcggctattcgacctcctgctggatataaacactctgccacaactttacgtgactattgagacgcatctgaccaagaagaccgaaattcacgattttgtagcagtactgccggtttccttctgcgcgcatctcactgagatttcagaaccccttgccgaagactgtcagggaatatcgtcacagcccatgtctgtggaatgaggggattgcacgaagtgatgaaaaatgaaagtgggcaatgagggactcgaacccccgacatccaccgtgtaaaggtggcgctctaaccaactgagctaattgcccgcaaatgacaacaatagcgtatggccggcactgcgcgacacgtggtgtcgcatacgcgtgccgtagcgctcaatcgcgatgacattcagtcacgcccagcagcactacgcagcacgcgacgccagtcaacacgcttaaagtcaagcgtattgattgaggcttatcagcggcccctgccgaatgcgcgcaggcggatgccgttccagtccgagctgacggtcagcggggtggcggcgttcataccggcggtctgtgcggcggactgcacggtggaggagctggcggcacccgggcggccgggcttgggagtcagtatccacagcgggccgtcattgcccagtaccgcgtaggcgtcaacgatcgtatcggacaattcgtcctcatcatcgccgtcgcgccaccatacgatgacgccgtccacagcggagtcgtagtcctcgtccacgagatcctcgcccgtgagctcttcaatctgggcacgaatggaatcgtccacatcgtcgtcccagagccactcctgaacgatatcgccgggctcgaaaccaaattcttcagcgttctgtgatgccgtttgattcacaggggacacattagcaagtcttcgcgaacaaatgcgttaacgcggccgaaaatcgccgcattgtgggcagacccatgcgagtcgtctcaccagaaacaacgactggccgcgcgtgtcatgcctcgcaatgaggcaaatcgtcggcctgccccttgccgatggccaccaacgcctgatacgcctcgtccagcgtggcgaccttgacgtcgcgcagaccatccggcacgcggccggccaaatccgaacaattcgatgcgggagccaggaaccatgtggcgccatcgcgcttggcgccaagcatcttcagctctatgccgccgattctgccgactttgccgtccttgtctatggtgccggtgccggcgatggtcttgccgccgctctcgttggcgggggtgagtttgtcgatgagaccgagcgtgtacatcatgcctgcggacggtccgccgatgctgtccacgtgcatcgtcaccttggcgtgttgcaatgcactggcgtcaatgcccagttcgtccgcatgggctttggcatacgccagaccgacggcactggccgaatcctgggaaccggccatgtcctgttcgactttcttctgatactggtccgcactctggcccaccggtaccgtggcctcacgcggcatgacctccacctgcggattggcccaaccccagacggcctgcgcgttgacgatcgggtacccaggcacgccggacgcgttcaccgtggtcagcagcagcttgccggaatccttatacgtcgtcacgccggtaccggtgatgtcgataaccgcaccatcctcgaccttgcccagcacgtcttgggtgggtccgggcatctcgatgacgtacgggctgggcagcagcagaatcaccacaccaagcaacacggcgaatgcaccgacgaaatggcgtttcggacgagcggccgcataggcccgagcacggctgattccacgagataggcgcgaatcatgcttcacttcgaacgatggcatgcgcccatcccccgcttccgaatccgcagtcgggctcttctgctcctggacgaagtctggttcctgattcctgtggcgtgcaaacataccctacagtgtaagcggagggccgaaatcagccgaaaacgaacataaaccgaaaatattgctcggccacgagcgaacaggcccgggcagaccctacacttggggtaacacaccgcggcaaagaaggatacgcatggacgacaacgcgattcacgagtggctgatcaaatgcttcggccccattcagggcgagatggcctggcagcagatcagccagttgcctgaggagatccgtgaacagctgatgagtcaggaccccagccgactgcccaatccatccgaagtccagcagatgatggccgcgttcagcgccggcggactcaacacgatgggcgatatgcagcgcactgtcgaggaagggccgatcaacgtcaagctcgccaagtcgattgccttgcagcaggccaacgcctccggttccgcgtccagcgtgtccgccgtggatggcgaggcggctcgccgcgcgatgagtgaggcgaacctgtggctggataccgcctgcgagttcaatcccgcgcccggcgatccggatgtgctgacccgcgccggctgggtggaaggcaccatcgaccagtgggcgaagttcgcagctcctgtggccgagtcgatgaacgacgctttggcttcggtgatttcggagcgtcttggcggcgcgttcggcgatggcgagatcgccggcatgttcgccggaccggtgccgattccgattcccgacggcatgaaagatccagcccagctgatgaagctgctgggcaacacgtcctttgccatgcagttggggcatgcggccggcaatctgagccatgaagtgcatggcagtttcgatcagggcatcgcattgctgaagaatccggctggtggactgattgcccagaacgccaccgaatacgcgaagatgctgaacggtgagactcctgcgcccgaggccgatacggccggcacttcaaccgactcggtcaatccgttctccacatccaccgacgcttccgccaatcccattggcttcacttcggccggcaacagcgatactccggcaactgacggtaccgcccaagtctccggctccgatgcctccgccgacgccgccgcgttcgaggctgcgctctccggattcgagaccaccgagaaaattcccgaatccgaagtgctttccttcctggccctgcaggaaatggctcacgcccgcctgtatgcctcggtaccgtggctgatgccgcgtttcgaggcgctcatcggcaagtacgcacgcggcatctccatcgatctggatgcgatggaggaacagctgcgtgacgccacgtcgatggatccggagtcgatttccggcgcggtgaatctcaccaaggtcggcatccccgacactcccgaacagcgcgaggcgctggcttcgctggaatcgctgctggcgatggtcgagggctgggtggattgcgtggtgtggcgcgccggtatggcccatctgcctcatatcgaacagttgcgtgagatgatgcgccgcgagcgcgcgatgggtggccccgccgagcgtacgttcgaaagtctgctcggtttgcagctgcgccccaagcgcatgcgcgaggccgccggattgtgggagatgatcaccgccgccgaaggccctgaaggccgtgacgccaagtggtcgcatcccgatctgctgccttcgctgcctagcgacaagcccgcagatggcgcgtctccgtcatccgacgccccttcaggctcctcttccgatgccaatggttccgcctcccaccctgccgcagatggcaagaccggcgatatcgattgggatgccgaactgtccaagcttctcggcgaagacggagaagatggcggcaacggcaactcggaggatacgcaggcatagtcaaccgtccttcagccaattcccgttcctgaacgttcaggaacattcacattcattaccgacgcccgtcacaaaaatcgtgatgggcgtctgtgttgcgctccataaccatccttggtccgcgcatacgacaaatgcagcgaatcctcagctcgggtgatgcccacatacataagccggcgttcctcttccagcgcatcccccgtttccggcgaaccgtacggcaagagtccttccgaacagccgatcagaaacacgtgcttgaattccagacccttggatgcgtggatcgtggaaatcgtaacgccgggatcgtcgtttgcggcaagtccggtggcgtccaaacccatcgcctccaatagcgcacgtttggacgcggcatcgtcggcgagcgcggatgattgccatcccgaatccttacgaacgcggtatttcagtcttgcagcgcgcaaagcggcaccgaataccggctgttgggcgttgatgcgggtgagaatcgcgcaatcggacggcttggctccgttggcgaccaaccgggcgatgcgtgccgccacgccctgcgcctcttccatatcgctctcataagcggttcgggtaacgcgcgggccggattcgcgggcggaaaccagtttcaggtaatcctcacggttcggcgcggccgcaagcacccggttggcgagattcacgacttccggcgtcgaacgatagtcggtgttgagattgacatcggcggcgagcggcccgaattcatcggcgaaacgcagcagatcccagctggaagcaccggcaaacgagtagatggtctgggccggatcgcccacgacgcatacgttgcggttcatcgcgctcttgccgtcaggtcctcccccgcccagccacagggtcagcagcctgtgttgcaggggcgagacgtcctgatactcgtcgacggtgagccagccgatggtggaacgaatttgggcggcggcttcgggaaaatcatccatgatatggcatacgagcagcagaatatcgtcaaaatcgatttcgccacgcgaggtcttttcctgctcgtaggcgctgtagacgtcggcgaaccgagcggtgtcgagtccggcgggcggttgcctatgggcgatggcacaggcccgggcataatcttccaccgccaccaacgagattttggcccaattgatttcggcgagcacatcgcgaacggtcagcggatcggcatcggtacgtgcggtggcgcggatgatcgcgcgggagacgacgtcacgctgatcttcgatcacatgcgggaatggagcctcgcatatgtccgcccagacgctgttgagctgatgcaatgccgctgagtggaaggtcgcggccgtgactccggcagttcccgcacccgaaccggaacgtccggcaccttcccctacgccgagctggcccaaccgtgcgcgcatttccgccgccgcttttaccgaaaaggtgacggcaagcacccgctccggcttccatgccccggtggcgcaggcataggcgatccgccgcgtgaccgtgcgggttttaccggcacctgcgccggcgatgatgcgcaccggcccttgcaacgtagtcgcggcggtacgctgccgctcatcgagcccctcaagaatcccctgcgcctgttccatgcgtccattgtggcacgattcgcgctcacggcacgactcacgcctatggctgaatcgggctcacgacaaaacatcgccagaatcatgcgttttgcgtgtcattctgcggtgcgaatcgccacggatgtattagtgtggaagggtgatgaaacgtagcgattatatgttggcggcactcgcctcagccgtcctgccgaatctgggggtggccggcgtacgcgagaacgtgcaggccagcgcaaccgacgaggccaaaggcatcgatcagaccgtgatccaagatgcctcgggcaagttgtacgacgtatacgccactgacagcaaggaagggcgtacacgtctgatccgccgtgtgaaagcggcgcagacactggcagccgcgcgcgagcttggtggcctcggcttcgatatggaccgtgtggtcgcattcgtcccgggagacgtttcccaacccggccagacggccaccgcacaggccgtggggcagcaggcccaggcggagtccacaccgctgaccccgcgcaagcccggtcccacaggcgagacgaccgtgatgatcgccgtccaccgtgatggtcaggcacgtcctctcgacctgttgacattggatgactgcgcggccgtcggcacctccatcggagccattcatcgtctgccttcgacttttctggccaatgccaaatatccggtagtcaccaccggtcagattcgttcgcagctgaccgcctggattcgccgcttacgctccgccggccatgttccccaagaaatcaccgacagctgggcgcgcatcatggacaccgagggattgtggtcgttctccacctgcacggttcacggcggattctccgacggcgacttcctgttctccggttccaccatcaccacggtgaccaactggcaggatatgcaggtcaacgatccggcacgagaccttgcctggattttcggcaagctcgacgaatcccatcgcaacgccgtgctttccgcatacggccgcatgatgggctctcgacttgacgatctcatcatgctcagggccaacctgtggctgcagatggaacaggtgggcgaattcattcaggcgttgaaccatgcggacaacaatcgcatcatgcagttcaaggcacaggtcgaacgactcgcacaccagttgggcgtgatcaagcacactccggcatcggccccagccgcagggtcggccgccgccgcgtcgacggatcccggttccccctccacaatcaccgtcggcacattgttgcaggacgaccgtcatcaggcacccgccacgcaggtacccgcacaaccgcagcagtccgaaaccggtaccgcggcggccgaggtctcggacgacacgcccgatccagatcgcaccggttccgctgacatcgtggccgctggcgacgtggatcttaccccggaagtcgaacccgatgctgaccggaccgccaatcacccgcaagcgagtgtctccggcaccgcaaccggtacgggatcgaccaaaccgcagccctcacatggcgcttcccattcttcggtgacgatcacgctgaaggagctcctcagtatgaacgggcatagcggcacgacgtcaaccgacgcttcccctgcatctcaatccgccgccccgaccgacgatgcggtgaatgacgatactccggacagtttcgttcagcacggagcctcgagtgcccaaaccacggtgattccgctgttggagcgggaagaacgcgctctgcgcgatgcccgtgccgggttggacgggtatgacagcgagggcaatccgctggccgaatcatccacatcatccaaataatgtcgtgtgcggtgttccgcgccacgccgagcgcgtaacaccgcacatgacgacgcagacacgcggcacaatagagtacagaacctcggccggtgacggttacttaccatgatgtccgtcacaaagacggcagaacaaggagccttatatggatatcgaactgggcattcagaacgtggcacgaccggtgaacttcagcaccgacgaatcagccgataatgtgagccaggccatcgcgcaggccgtggccgacaacgcgacgatcgatatgaccgatgacaagggccgtcgcatcatcgtgcccgccaaggcactcggttacgcgatcatcggctccgaaaccaagcacgccgtcggtttcggcacgctgtgaccgtgaatcgcgcataagcggccttgggcatcatctcaaggccgctttgtattgccgcgaatcaccgatataacgggagcacgccgcgatgaacgatctcttcgacagtggcctcgtcggtgaggttctcccccagtttgttcggtttgcctttgccatgccagtcagatccgccggtgaccagcagctggtgccggcggcagatggtgagcagccgttctcgttgctccggtgaattgcctcggtgccatacctccagcccgtccaatccctcgctgatcaacgcttcgatctggtcatcggacagcagtctgcggttacggctcacatcaccggcatgggcgatcagaatcacaccacctgcccctttgacggcggccaccacttcatgagaggtcggcgagggcgtgggaatatagtatttggatgaggcgctgaccgcattcgcaaacgcttccgaacgagtccgatatacgccggcactcaccaaagcatcagcgatgtgaggccgcccaatggtggttttgtcaccctccttgacttgggcgagcacggattgccaggtaatcggataatcacgagacaacaattcgaccatgcgctgcgtgcgttgcaaccgtgcggctcgagtatcggcgaacaagtccgtgatgtgctgattcgtgggatcatactggtagccgagcatgtgtacggagacgttctcatccgtggcggtgatttcggtgccgcggagcaacggcaaaccgaccctatgggatgcggcttcggcctccggccagccggcggtggtgtcatgatcggaaatggccacgcccttgagtcccaatgccttggattgttcggccaatgtggccggcgtttccgtgccatccgagaagacggtatggcaatggatgtcccacccgacggcgggcggctccaaaggcatcacatatccagtcataccttccatcgtaacctcatctcagcattcccacgcaaggcgcagacaggtcgtcaccttctgccaacggccaagaccagacatccggcactcagctgacaaccgcagaggctaatctggagcgcagcgctatcgaaaggggcatgatgactcgtaacaccgcaaccgacacatcatccagcaccacgaacaccacgccgcttggcttggcggaggcgcgaccgttgattggatggcgccacagtgccacttggacatatctcatcatgctgatcgcctcggcagtggcattgggggcctcgctcattctgtccgccgagactttgcagttggctaggcatccggagtccgcgctcggctgcgatctgaactcggtggtgtcctgttcggcggtggcccagtcctggcaggcggaaatcgtgaagttcggcgggctgagctatccgaacgcgttcttcggcatcgccgccgaatcggtgttcattaccatcgcggtgatcggtttggcgcgtgtgaaggtgccgcgttggttcgcgacctgcacgtggctgggcggactggccgctttggcctactcgtactggctgagcacgcagtcactgttcgtgattcacgcgctgtgcccgtggtgcctgaccctgatgttctccaccaccatccagttcatggcgttgagccatgcgaccgtggctgtgcagggattgccgtcacgtaaggctgtggctgctgatgatggcgacagcgaggccgaggtcgcggcggtgccggccggactcaataagtattaccgcctcaacatcgacctcatggtcgacatactgtggatcgtggcgatcgtggtactcatcatcgtcaccgaaggcgcggccctgttcgctgcctgattcctttacaacaaatcgatatcggcgaccagcgtggctgctccggtcagtttcacgtcgctgtcggtgacgtccacgcgcagggtaccgccacgtacggtgatgtcccagtggctgatgccggtcttggcccgcagcacaacgcctgtggcgcataggccggtgccgcaggacagggtttcgccgcagccgcgttcgttgacgcgcatcgtggcttcacccacgccggtgttctgatcgatgtcgtcgacccgcacgaattccacgttctggtcggactcgatgaccggagccaccactggtttggtgaccaaatccagtgattcaaccactggcagggacgcgaaggcatcctcgatcaccgtgaccacgtgcgggttgcccatatccacgaacgtgccgcgcgccgagccctcagtgccggggatggtgacctcgtaggcgtcggtttcgccgatcttccactcccccatttcgacttggaacacgttggctccgtacggcctcatattgccgcgtggcgtcagaatcttgacgccggcacgggtgccgaggcggaacggctcggtggagtcggccacgccctcgcgctgagcgaacaaggtgatggcgcgcgtaccgttgccgcacatctccgccaacgatccatccgcattgcgatagtccatgaaccatttcgcgcccccggccagtacgtccgaaagctgatcatcgcttaaatcagacacgaaatcaggccgtgtcaggcgaatcaggccgtcaccgccaatgccgaagtgacggtcgcacaggaatcggacctcatcggcggtgggctcgaatttgccggacttgtcgaggtacaccacgaaatcattgccggttgcgtgtgtcttggttactcgttgcggaagactcatggctttcagagtactctagggagcgaaacaacaccgctgaaaatcggctttgtgtccggttcgcggcaacatacggttgcaggcatggctatagggaggattcaggcatgagctcttcggctccaatcggcgtattcgattcgggtcttggcggtatttccgtggctcgccaaatcgccaaggatatgccggccgagcatgtgttgtattttggcgattcggccaacgccccgtacggcgtcaagacgcctgagcaggtgagggccctgagtttcgatattgtcgaacggttcgtgcgtcaaggcgtcaaggccgtggtcatcgcatgcaacaccgccacttccgccgcggtgaacgatttgcgcgaacactacgatattccgatcatcggcatggagccggccctgaaagtggcgtgcgaccggggtgacgtgccttccgacccgcatcatattccccagagggtgattgtggcggccactcccctgaccttgcgtgagcggaagttcgccaaactgatggatcgattcgattccaacaacacgattttcaaggagccttgccccgacttggtggagattgtggaatccgggcggctcggcgaccatgacctggtgatgcgcacgctgcatggctacttcgaccagtacgacatggagcacatcgattcagtggtgctgggctgcacgcatttcgtgttctaccgcgactacttccgcgagctgctgcccgaacgggctgctgtcatcgacggcaatgagggcaccgtgcgccatctgggcgtggtgctggagtccctgggcaaactggcgcccgaagacgcgaccggcggcgtggaactcgccaattccgatttgtccgaacgtgttacacggctttcacgcgacctgctgaatgcgtgatcggatgcatgatgatgaataggaggctgatatggcactgaagaccgcgatgattgatgtgggcggcgggttccgcgcgattttcggctgcggc

SEQ ID NO: 1917 - DNA, 2873 bp, Unknown
  R17_18m  MAG No. k141_1666
catcggttgagtcgttatgcatggcagcgaaccatactcccagccccaaagccacagccaaagcgacaacgaacgccacaatcaatgcgatgtgattgccgttcgacgacattgaacgatgctgcccttgaccgctgatatggctcatagcttccccattccgcgactctctgtactcactatcagagtaccgtccaagggcggcattgcttcaatattcgggaaaaaccttgtcatatgccgtattctttatgacgcgccgctccccaaatgccggtagaatggctcacggaggcggacggacaatggcgtacctccggctccgctactctgatggcggcatcccacggttcgcgttcatgtgctttgttcaacacatcatcaacggccatctcttaataacaaaacccggaatcatcagtttcccaatgatgtccgggtctacttgcggagtcagagggattcgaaccctcgagccgtttacacgactaacaccttagcagggtgcccctatcggccactcaggcatgactccacgttacgcaataatgcgcaacagcaaattactgtaccacgtcctgcggatacggcgtgccgaacgacacattattgaccgtccgcgggcgcggcatcgccggagaacgtaacgataaccgcgcaaatcaccaacgccacaccgatgatttcaccaacgccgggaatctcgccaaacgccagtcccacggccaccgccatggcgggattgatggattgcattaccgaaaatgcgccggatgtggtgcgtcgcagcgtgatctgctccaccacatagggaatgaacgaggccatcagggaaatcacaaacagcagagccagcagcttcagcgagccgccgggctcaagcgcccacgtggcatcggccttggggtgaaccacatgagccacagccggcacgccaaggaacagggactggaccagccagccgatggtcacggcgatgcacagattatccagcgaattgccgccagccgccacgcgccggccggtgatgatgtacatgccccacatcgacccgccgatcaaaatcgcaatcagaccatacaaaaacgtgccattgccggacggattggccaatgatatgccggccaacagcaccacaccgaccgccgcgatgccgataccgacccgctcacgccagcttttgccggtaatcaccgccaccgaaagcggtcccaaaaattcgatagacacggcaatgcccatatccatattgctgatggccacataaaacagggtattcatcagcaccagcgagcagccgagcagtacgaccagcccccagccgcgggcgtcgcggtgaaacagctgcgctcgcttagccttgctccagggcctgcaccacagcagcaacagcaccgccatgaatcccacgcggtaccacaccgaatacagcgggtcgagctgggtgaacgcaagtttggcgacggccgtagccaaataaatcaccagtgcctcaccaatcacgataagcaccacgggaacacggttgaggataccgaccactgccttcttcacgaggtttacgctactcggagagtcgggacagcgcgcagcgacttggaaggcgttacggacagtgacgcaatgtggacgattccgtggaatcgcacccaccatgcgaaacagccgcacagtgcgcaaacccttggaattccggcgatatttggcattacgacaatgagcgccgcgccatgcgcgccacatagtgagcatgacctcgttcggcattcctacaatggtggcatgagcaccgcaccgagacttgaggccgccaaacgcgattggggccacgacgagaccggatgcaccgtgctgcatatcgacatggatgccttctatgcctcattggaggtggcgcgcaaccccgggctcaaaggcaagccggtgatcatcggcaccgggccgcgcgcggtggtgtccgccgcgagctatgaagcccggaaatacggcatcaattcggcgatgccggccgcgcgcgcccatcagttgtgcccgaacggcgtctttctgccggtggatatggcgtattaccgcatgatgtcgcaccgaatcatgcacgaggtgtttttgaccgtcaccgaccggttcgagcaggtttcggtggacgagggctatatggatgtgtccgccgcactgctggagtgggggcggccgagcgcgatcggcgcgtggattcgcgctcaggtggctgagcgcttccacgtgacgtgttcggtgggcatcgcctgcaacaaactggtggccaaaatggcctcgaccaatgccaagccggacggcatgctgctgattccggcggcctgctcggctgagttcgtgcagatgatgccattgcgtggcattccgggcatcgggccgtctttggagaagcggcttaatgcttggggcgtgcattcggtggctgaattggctcagctggatgaggctgcattgactcgtgccactggctccccggctgcggcacgtggattatgggcggcctcgcacgggttggattcccgcaaaattaccacggtgcgcgaggagaaatccattgggtccgaggaaaccttggccgaggatacacgcgatatgcgcgtggtgtgtgggctactgcgttcggcctgcgacgaagtagccagcacgctgcggcgcaaggggctggtggcgcgcacgctgacggtgaagttgcggttcgccgacctgagctatcagacccggtcttttacgatggagcggccgaccgatacggccggcgtgctgtacccggaatgcgtgcggcagctgaaagtcatgctggggctaccggcctcggcggagtctgccactcccctgcccaaaactattcgcttggccgg

SEQ ID NO: 1918 - DNA, 16587 bp, Unknown
  R17_18m  MAG No. k141_1896
cgccgccgaacagacgaactcggtcgaaccggtcatgcacttcgcgcaaccggccgatggcgattccaccgtcaagaagactcctgaattcatcgcgaccatgaccggctggatcaacgaacagaacccggctggtctggcctggcgtcagcgcatgacctatggccggcccgaactgggggcggtgccggaaacgatcagcgcaccgagcctggtggtgtccggcgaactggacccctccagcaatccgagtgtgatgcgtccgctcgccgagcgaatcgccggcgccgaattcatcgacattccggactgtggccatttcagtgccgtcgaacatccggataccgtggcgcgagcactgctctcgctcgtcaggcgcgtgcagaacgcgcagaagaacgcataggagacctcgatgggcactgacattcatttttcgcccctggcgctgacccatgcgctgccgttcctgccgctcgcgcaaggtgacatcgactatcaggtggaccggcgcggtgaacccggtctgatcgacgagctgttggccgagccgaccaccaaagtcgtgcttacgcgcggcggacttgtcgccgtaccgcgcggccaaggcgagctcgtggactatgagaacgtgaaaatgcggctcgccacgttgccgggcgcctatgtgtccgccgaactggcacgctaccccgaaacggtcgccatgttcctcggctcctatgtcggggcgcgcggcgaatccgtggtcgccgtggatatcacgcgcgtgccggaagccggtgttcccggtgttggcgggattgctggtgtttccggtgctgccggcggcgtgctcggcacccaggattccggcaccgtggacggtgcgctgggcaagaacggcatcagcggaggtgctgccgccggaatacggcagccgggaaacgccaagggcaatggcggcgtagccgcagccaaaatcgccgggccgctcggtgtaccggattcggccggacaaggtgcggacgatgccttcgatgattcggtcggcgcgcccgtacagcccttggccccgaagcccacgctgctgcaacaggccgtgacccggttcgactgggtggacctgcgcggattcgcccctcacgccaacgcgcgcgaggctgggcaagccaccagtgccatcaccttaagcatctggcacagccgccagcggttctgccccacctgtggcgcggcggtccggccggcgctcgccggatgggcgcagcgatgcaccaacgaggcggacggcaaccgtgtgctgttcccgcgcgtggagccggcggtcatcaccgccatcgtggacgggcacgatcgtctgctgctgcaacacaacgcggcatggaaggattcgaggctgtattcggtgtccgccggatttgtggaggcgggggagaaccttgaacacgcctgccgccgcgaggccatggaagagaccggcatcaagctcggcgaggtacggtacctgggctcgcagccgtggccgttcccggcttcgctgatgatggcgttcaaggcacatgcgatcaccaccgacgtgcatgtggacggcgaggagaccatgaccgcgcgatgggtcacacgcgacgaatacacggccgagctcatcgccggccgtatggcggcgccgggccgcgccaccatcgcccgctacatgattgaggaatggctcggtcgcgagctgtgacggaccgcgaagataggttaggcttatgactatgagtgatgacaacgaaaacgaacagccgctgaacctcgacattcccgaccatctcgaatactccgaggagcatgcttgggtggaccgttcggtcgaccccgcaatcatcggcataaccgaatacgccgccgaccagcttggcgaacttgtgttcgtggatttgcctgagcctggcgcccgtgtggaggccggcgacgagatcgtggagcttgaatcctccaaggccgtccagccgttgatcagccccgtggcgggtacggtcaagtatgtgaaccgtgacgtggcggacgacccgtccgtggtcaacggcgatccgtacggcgaaggctggctgctgaaggtcgagcttgacgacgatgagccggagctgctgagcgccgacgaatacgcgaaggtcgtgcggtagttccacccatagctcccctccctgaggggagccagtatgtggcatcaaacctatatgcatcgtgcctcttatggagggaagccaagaaaatgaggcgtatggcctatattggtgtctatgagaagcccacgcgaggattttgaggcggcaggcaagcgactgccttgggatgctgctgctcgcaatgcagcgctgtccgccaccgcgccagtctctgacgtcaaggcatccgccaatggcgccgacaatgccagcaatgccagcaatgctgaacattccgatgacatgcccaccgtgccgattcccgcacgcaaggctgccacgacgttcgacaccccctccaagcgtgagcgcatcgaggtcaagccgccgatcacccgattcatacgtcgtgccatcacccgcgtgttcggcgtatggtcacacatctccactcaggtggtgcgccaatggggctggtatccgcgagtggaaccctatgtgggttatggcaccggcgattactcgcgcctgatctgccgcacggtatacgcccccaagcatgcgcaatccggcgaactgatccgcggcatccgcggcatgcttgccgtgcccgcgccgcgcacccacgtgcaggccagcattgatgacacgccgctcaacaccgtgcagatcggcgtctccgaggtctatgacaaggtggaccgcacgcgcgatctcggcagcgaatacgccatctccgattccgccggatacctcgacctcgtggccgagcatcgtctggtgcccggtatccatcgcgtctcctacagcgtggccaaccgcaaacccgtgagcgccaacctgtacaccatccccgccagtgccaaagtcggcatcatctccgatgtggacgacaccatcatgatcacacaggccccggtgccatggaaggccgcgtacaacctgctgttcctcgaccccaagaagaaagcctccgtgccgggcatgagcgtgctgttcacccgcatcgccgacttgttccccggcgcaccgttcttctatctttcgacatcgccctggaatgtggagagttcgattcgcaacttcatcactgaccatggttttcccgaaggcccgctgctgctgcgcgacctcgacccgaggcccaagaccttcgtgcccaccggcccccagcacaaacttgagtttgccgaacaacttatggccgacttcccggacatgaagttcattctggtgggcgatgacgggcagaaggacccgaccacgtacgccaccatcgcccgcagatatcccggacgtgtactggctatcgtcattcgtgagttgagcccgcgcgaatcaaccggattggcgtcggtgacgggactcacctcgacccagccgactccggtaaccgatgtaccagtattcaccggcaccaccggctcgaacattctgaagaccatgctgccgtatctgaagacggtgttgcgataagcgcggcgtgatgaacgccgaatgcgtcccggtgtggtgcctcgcctataatcgcgtggtatgactgacgagagcacaaacgccgcggccgcgatgccgccttacgccaagcgcgagccgaagcgccgcgaattccacggtgacgttttcgacgacgattacgagtggatgcgagacaaagactccgatgatgtgcgcagctacgtagctgccgaaaaccagtactgcgagcgtcgcatggcgcatctggcggatttccggcatacgttgtttgaagagctgaaatcgcatgtggaagagaccgatatgtctgttcccacgcgcatcaacgattactggtacttcacccgcacgcagcagggcaaacagtatggcgtgcaatgccgcatccccgtgcgcgatgccgatgactgggacccgccggtcgtggatccgcaaggcgcgcccggctccatgcccggtgaacaggtcgtttttgatgcgaacaaggaatccgaggggcatgacttcttccggctcggcggcttggatctgagcaaggacggccgttggatgctgtacggcgtggatgttgcgggagacgaacgatatgatttccgcattcgcgaccttgccgggctggagaccggggagccggtcagcgaactgcccgaacagttcaccggcattggcagcgcatgcttcacgccggacggccaatgggtgttctgggtggaattggacgattcctggcggccgctcgccgtgtggcggcatcgtgttggcacggcggtcgaatcggatgtgtgcgtgtaccgagaaaccgatgaacggttctgggtgggcgtcggcatcagttttgatgagcgcaatatcgtgatcggcaccggttccaaaaccaccaccgaagtgctgatgctgccggtggccacgcctgaaggcgaattccaagccttcattccacgtcagaacgatattgaatatgatgtgagctttgcctgttttgaaggcgcgggggagaacggtgcggatgtgccactcgccgtggtctaccacaacgccgccaatccgaatttcgaaatcgacgtcattgacatgcgtggccatgagccgccgtaccgactcggcgaaggcgtgtgcatcgccgccgggtcgccgtacggctgtgaacatggtgagccggataagccgattaccgaggcatacttcaacgccgccaatccggcgatattgcagggtgcccacggtctgggcatcgaaggcatcgcgttgcatcgcaactttgtgtccctgagctaccgtgccgacggccagccgcacgtggcatacatgaccaagagcgcggctgccgccgacttcctggccggacggccgtggcggtttacggaactgctgccgcctgccctggaggacgactgggacatggtcgccgccgatcgcgaaaacttcaccggcgatcatggcgaaatcttgtggaccgaagatgaggcccccacggatcacacgtcatcttccgatggtgccagcgacgaccacctgcccggtgagacccggcgcttgtacaccatcggcgtcggcggcaacccatcgtatgaggcgccgcgcatgcgctactcgttcgccagctacacccgcccgggcgagctgcacgaaatcgatcccgccaccggtgaagatgcgctgctgaagcgagccaccgtgttgggcgacttcaatccacgcgattacatggaacgccgtgtgtggattaccgcgcgcgacggcgaacgcattcctgtttccctcgtctggcaccgcgattgcccggcgcaggattcgccgatgttcattaccggatatggtgcatacgagatttcctccgatccggggttctcggtctctcgtctgagcatgttggatcgcggtgtgctgtacgccgtgccgcacattcgcggtggcggcgaaatgggacgcgcctggtatgaacaggggcgcagactgaacaagaagcattcctttgaggacttcgtggacgccacacgcgcgctgcagaaggcgcatttggctgatgcttggcgcaccgtggccaacggcggatccgctggcggcctgctgatgggcgcgattgccaatatggcgcccgaatgctacgccggtgttgaggcggatgtgccgttcgtggacgcgttgacctccattcttgacccggacttgccgttgaccgtcaccgaatgggacgaatggggagacccgttgcatgaccctgaggtgtatcagtacatgaagtcgtacacgccatacgagaatgtgccggtggccgtactcgagggcggcgacgacgaggctgccggtgacggcagtgctgatggggctgccgccggcgcggtcgccgccgcgcaattcccgagaatcttcattaccacctcgatgaacgacacccgcgtgctgtacgtcgagccgctcaaatggctggcccgtctgcagtccgccggcgtggacgcggtggccaagatcgaggtcgaggccggtcacggcggtctatccgggcgttacaaacaatgggaagaggtttcctatgagaacgcttggtgcatggatgtgatggggctcgctcattaggtcatttcgtcgttcattaggtcggtgtcctcttctatgtgagactgaaatgccgccatttcagtccctgaaatgaacccacgccgacctaatgaacactaaaatgacctaatgaatgtctcgacacgatacgcatgttggttgtgtccactagctgagcgggttcgggccggcaggtggtcgcgcgagtaggctccttgaactatggcaaagacatataaaatcgccgttattcccggcgacggtattggcaaggaagtcactccgtgggctcagaaggctttggaaaaggccgctgaaggcgtagctgacttcgagtatgagaacttcgacttgggtgccgagcgttatctgcgcgatggtgcgatcctgcccgaggacgaagaggagcgcatcaaggccaacgacgcgattctgctcggcgccgtgggcgatccgcgcatcaaggccggcattctggaacgcggcctgctgctcaagctgcgcttcgacctcgaccagtacgtgaacctgcgcccctccaagctgtacaagggcgtcacctcgccgctcgccaaccccggcgacatcgacttcgtggtggtgcgtgaaggcaccgaaggtctgtactgcggcgccggcggcgcggtgcgccgcaacaccccgcaggaggtggccaccgaggtgtccatcaacaccgcatacggtgtggagcgtgtggtgcgttacgccttcaagctcgctatgaagcgcaagaagcacgtcaccctggtgcacaagaagaacgtgctcgtcaacgccggtgatatgtggcaacgcatcgtcgacaaggtcggcgaggaataccctgaggtcacccacgactaccagcacatcgatgcggccaccatcttcctggtctccgacccgagccgtttcgatgtgattctcaccgacaacctcttcggcgacattctgaccgatgaggccggctccgtggtgggcggcgtgggctactccgcctccggctgcatcaacgcctccgacgagttcccgtccatgttcgagccgattcacggttccgctccggacatcgccggtcagaacaaggccaacccgaccgccgccatcctctccgccgccatgctgctcgagcatctcggctttgatgatgcggccaagaagattcacaccgccgtcgaagcggacatcgaggagctcggctccaccgtgcgctccaccgaccaggtcggcaaggacattctggcccgcatgtgatgtcccacttggctcccctccagaggggagccaagtttatactgagttgcatgcaaatgcgacatggggaatgcaaaaccgttggcggcaaactagtcgccgtgaccgtatccgtcgatgatgacggcaccgcacagtcatgccatatcagcggtgatttctttattgaatcagtttcggatgccgaatctcatgctttgttgcgtgacttggaacaggctctaattagtgatgattcattgcggtccgtattggacgctcaccctagttgccaaattatcggcacagatgaagttgccatcaaaaccgcatatagccgagccgtaagcagcaacttgcccccgctggtgggggctcccgcgcagcgggtgggggcggtcggccccgatgcgccgaacaccccggcatccatcaatacacaaaccaagcagcccgacaaaagctctgaataccgggagcgctggaacgccctcagacctcaactcaccgtgatccacgaccatccgcgtactccggacgagcaaatggccattgacgagacctgggcgcgtgaagtcgcagcaggaacacgacagccgaccatacggttctgggagtgggcgggcccggctgtggtcatcggccgtttccaatcggcccaggacgaggtgaatctggacattgccgagcagctcggtttcgacgtggtgcgccgttgcacgggtggtggcgcgatgtttatcgaaccgggcaacaccattacctattctctgtatgcaccgctcgatttcgttcagggcgtaagcatcgaagaatcctaccggctctgtgactggtggctggtcgaagcgctgcacgaacttggcttggatgtgcggttcgcgggcctcaatgatatcgcctcgcagtacggcaagatcgggggagcggcgcaacggcgcttccccgtaggctcaggcggcgcggtgttgcaccatgtgaccatggcgtatgacatcgatgcggccaagatgagccgtgtgctcaacaccagtcgcgagaagatgtcagacaaagcggtgaaatcagcagtcaaacgtgtggacccgatgaaaagccagacgggtctcagccgcgaacacatcgtcgaacaccttattgactggtttgcggcgtgatttcaccgatggccgtatacgattttgccggtggccgtgcgtggttttgtcatgggcgagcgcggtaaccgcgacagtgccgtttttcgcggtaacacattcgtcagcatgtcgtacggctatcggatcgcgccacacatgaagtgacgaatgatggcatgcttctgacgaaacctgtggggcgcgttacaatatgacggatggccgacgacggtcgtaggacaataaggatggtgcgatgagcttggaaacgccaaacgcttttgctgacgaggagaacatcctgctgcatacggcattgttcaagcaggtatcgccagccgaagccgaggagctgctgccgcatttgaagcgtgcgaccttcgataagggcgactatatcttctccgaaggcgataccgatcagcgcatgtatctactggagcaggggcgcgtcaagctgattcgcacttcttccgatgaccgtgtgcagctgctgtccatccacgcgccgggcgaagtgcttggcgagattccggtattcgaccctcatggtggcccgcgcaccgcgtccgcggtgtccatgagccatggcacgcgcgtggtctggctggagcatgatgccctgttcgcatggcttgatgagcatccgcgtgtggccatcgacatgttgcaggtcatggccaaccgccagcgcggcaacaacgaacgcatctccgacttggtattcatggatgtgccggcgcgtctggccaagacattgctcaacttgggctcacgtttcggcgagccggtggaacagggcctcaaagtgccgcatgacctgactcaggaagagctggcccaactggtgggctccagtcgtgagaccgtgaacaaggcgttgatggacttttccaaccgcggatggatcgcacgtgacggtcgatcgatcatcatcttccagccaggcatgctgattcgacgctcgcggcgctgaccgttcggctgacttccagccaatgttacgctagtgcggttcttgtgatgatatgttcacggaagctgaccgcgagcccggttggtagggcaccccatttagaatggggcccatgcccaaaaagaagtccctcactctccaacgtgtgcttgttctcctcttggcctatatcatgcttgccgtctgcggtggcgtggcggccagcgtgttgtttgtaccgggtgtggtcggtgccaataaagccgccaaagcggtgattccgtcgctcaaggtagaaaacgtggacttcgacgtgaccggtctgccccagaagtcgacgatgtacgcgcgagacggttccaccgttatcgcgacgttctacaaccaaaaccgtatcgtcgtgccgctgaagaagatttccaaaaccatgcagcaggcagtggtggcgcgcgaggaccgtcgattctggactcacgccggcgtcgacgtgcaaggcgtgatgcgtgcgttcgtgcagacctacctcgtcaaaggctcccagcagggtggttcgtcgctgacccagcagtacgtcaagaacgtgctgctcatgcaggcgatcgaggacgacgacccgatcgcccagtaccatgccaccgaagacaccgtcgcccgtaagattcgcgagatgctgatctccgtgcagatggagaagaagtattccaaggccgagattctgcagggctatctgaacatcgcccagttcggcaacaacctgtatggcgtggaaaccgcagcccagcgctacttcagcgtgtccgccgccgatttgaacgtggtgcagtccgccaccatcgcggctatcaccaagaacccgagccagtacgatccgctggtcgaggagaaccagaaggaaagcgagaaccagcgcaacatcgtgctcaagctgatgctgcaggaggggtacatcacccagaagcagtacaccgaagccgtgaacacgccgctgaaggacacgctgaaggtgcaggccgtgaacgtcggctgccaggacaccggcgactacgcatacttctgtgatttcgtggtgcatcgcatccagaactccgaagaattcggcaagactcgtgcggagcgtaacaagctgctgcaggagggtggcctgaagatcgtcaccacgttggatgtggaagcgaattccacgatgatggagaccgcgcgtaataccattccaccggacgatcccagcggcatggaaatagccatggccgcagtcaaaccgggaaccggcgaggtgctgagctttggcctgaatcgttactatgacgccactccggcagccgcgaacgatccgaccaagtcgggccagaactatgccgtcgatctggtggacggcggcggctccggttggaccattggttcgtcttggaagccgatcaacctgattgcgtggatggaggcgggtcattcgatcaacgacaacctacagaccaccacgacgtaccccacgaccgacttcgcctgcaacaactacaagggcggtgccgattcgtggaacgtgtcgaacgccatgggcgccggcacggtgaacccggaaagcccgttcctcggtctggtgcgatcgcacaacaccacccaggcctccatgggcgccatcctcaaactgtgcaaggtggcggacaccgcgaccaaactgggataccatgacgccgccacgggcgagaccatcgacaaaacccaggtgtatacaccatccatgatgatcggctcggtgaatgtgtccccgctgaccatggcgagcatcttcgccgtatacgcctcgaatggtgtgcaatgcaacccgattgccatcagcaaggtgaccgataaggacggcaacgatctcaaggttccatccgcgaactgccatcaggcggtggataaggacatcatccaaacactcgcttataccctgaaccaaggtacggtgcggccggatggtgccggttggtcattcagattggctgacgggcgtaagtcgtttggtaagaccggtaccagtgaggatcttgcggtgtccggtggatcgttcattcctaatcagattgcggcgttcgctgtggtcggcgatgcacagaacccgtacaccaaccgtatttccaacattgccatcaacggccggtacaacagctattgggatggttcgacaatcgcagctccggccgttaccaacttcttcaatagctacatttccaagaagaaaataccgattgacaacgattacggccagcccgtctcgaagtacaccacgactggcaagtatctgggcattggcggacgaacgttcagcgtgccgcagaccactacgaatggcaacagccaatcgcagacgaccaccaatggtcaatcccagtcgcagtctcagtcgcagaacactgggcaaaacaacacccaaacccagggcaccaattcagagcggtcgaatgatggccagtgattggtgattggcgtttgacatttggtgattgcaggccggctgagtctacgtaacatagtcgactgcgatacccaaattacgtagtttgcgggcgttacctgtttcaggtgacgcccgttttacaatacttaatgacaacgccagcgcgttcatcgaatattcgccatgaacgcgcattggaaaggggaacgatgagcaacgacgatctgacgcatgagaattttgattttcgtggattcgacgtgccggatctcaaagcggtgacgctggcttcgtcttcggacggcgaacagtccaagcagccgaagaccaagcacgaggatgcatcgaggaaccgtaggcacggtaagaagaagtcaaaatccgacgcacggtccaagaagcgggccggcgcgggcaagacgagcgaatcgtttgatgattatgaggattatgaggattatgagggaagggaagctgtgagcaaggcagataagaaagccagcaaggaccgtccgggactgtttgcgccaatgacgctgcgcgaagtgaccgtgcgtaatcgtatttggttgccgccgatgtgcacgtattcgtcgttcgcctgcgatggtaggcccacgccgttccactaccagcattacgtgtctcgtgcgttcggcggattcggcatggtgatcgtcgaatccaccgccgtggctcctgaagggcgtatcacgccgtgcgatctgggcctgtgggaagacgggcagattgatgcttggcgctggatcgtggacggtattcgcgaggcgggtgcggtgcctgccatccagctcaaccatgcggggcgtaaggcttcgaccggttgcttcgccgttggttacgacggtcagagtgtgccggaggaggcgggcggctggcccaccatggcaccgtctgaaatcgcgttcggcgggctgcgtacgccgcgcgcgctgtccgtggatgagattcatggtctggtcggtgcgttcgccgcggcggcgggccgtgcggtggccgccggcttccaggctattcagattcatgctgcgcatggctatctgatttctcagttccttgacccgctgagcaatgagcgtgatgacgaatatggtggcgatttgaccggtcgctctcgtttcctggtcgaggttgtggatgccgtgcgcggggccgtccccgagggcgtgccggttctggtgcgcatttcggccacggattgggccgctggcggttgggatttggatcagaccatcgcactatccaaggtgctgaaggagcatggcgtcgatgtgatggacgtgtccactggcggcatcatgtcgggagtgtcgattccggtcaagccgaactatcaggtgccgttcgccgagcaggtcaagtccaaggccgatattccggtgaccgcggtgggtcttatcaccaagccgaagcaggcggccaagattttggcccgtggcgaagccgatgccgtggaaattggccgcgccgcattgcgcgatccgtactggccgttgcgtgcggccaacaagctgggcataccgtccacagaggtcccctacgccccgcaatacgtggccggtgcgtactgaatcctcatggggcggtgactttcccatggggcggtaaaaccctcatggggcggtaaaaccctcatggggcggtaacccaaaacggcggtattctgcggaatgtgaaatttggctaaccgccccatgggacaatcaccgccccatgagggttttaccgccccatgggtaatagggcaatatgtgagttcactccacgtccacgccgacggcgtcggagacgtgctcgaatccgtcgcggcgcagcagctgggccagaccgcgcttcaacacggtgatctgctgcgggcctcggtacatcagcgagctgatgaacatgaccaggctggagccggaacgaatcttcgcataggcttgctcgggggtaaagacgccaccgatgccggcgatggcgaaccggtcgccatactccttatacaccttgcgaatcagctcggtgctggcgttggtgcacgggccgccggacaggccgccctcccaatcgcgcggaatctcgaggccggtgcggtccttctgcagattggcgatggacagcccctgcacattgtgctcggccagcacatcgagcagctccttgtactcgccccacggcttgttcaacggcatcttgaccagcgtgggctgcgggcggtcgatcttgtcgagcgccgtaaacagacggtcgagcgcttccggagtcgcggtgaacggttcgccgacgcgcgtgttcgggcaggagacgttgacctccaccatcgcggtgcggccggcggcgcggcgcatcgaaatgcagtaatcctcaatgccttcgtccaaatcgccgcactggtcgtcgttggtgcgggcgatcgacacagacagctgcatctggcgggcctgagtccaagccttctcggcgcgctcgatgaccttgtccgaaccgatgttggcgaggccgacgtgcaccatcatcgaatcgtattcaggcagacggtggaaccacggcttggcgttgcccgggcagggacgcgaggtggcggagcctacggtttcaaaaccgaagccggcatggtccagcaccacgggcatgtcgcagttcttgtcgaggccggcggacaggccgaacgggttggtgaaatcgacgcccatcacattcgtttccagaatggggtcggtgtagtcgagcatcagctgctcggcgagcagcagcggcgggacgttcttgacgacgtggcagaactcgatcatctgatcgtgtgcctcatcggggcggtggttgaacacgaagttcggtttgatgatgtgcttgtagccgaaggtgaacagatcggtggtggctttgttgacggcgtcgtgccagaagctttcagaaacgtaagtcataccgcctattgtctcacgcttgggctggtgcggctaggcgattcctgcctaggcgaattggggaaggggctaccgcgtgtcgaggcgcacgcaggcgtcggctcggcagaagatacatgaatcgggatgcaccaggtatcaggcgtgactcgccgctgagcaacgcgctcgggagagtcgtcggtcgtgagtcatcgcgctagtggtcgctgcgagaatatcggttcgcacaatgtgcgattttgcgcggttttgtggaaatgaacacctgaattgcccggaattttcgagagattgtccccaaaacgctcaagccggtttggtttgtgagcttttgtgtgcgataatgttcacatgatttcgtcacaacgtcagcacctcatcttgagcaggttgcgcacgcgcggggcagtgcgcattacggcgctatcgaaggaactgggtgtgtcagcgatgaccatccgccgcgatatcgccgaacttgccgacaagggactgctgaagcgcgtccatggcggcgcggtgactaccagtaccttgctcagcgaacccctgttctctgtcaagtcccagatggatctcggcctgaaggacgccatcgcccaggaagccatcaaatatgtggctcccggcgatgtgatcgccatcggcggcggcaccacggcctatgtcttcgcccagcatctgctcgaatcgcagcagtccagcggcatcaccatcctcaccaattcgattcccgtggccgaactggtccaggccctcgaatccaaggacgtggaggtgatcgtcaccggcggcgtgatcacccgatcgaactcgcttgtcggtccgatcgcggacaaggtcgtcgcctcgctgcgtgtcaacaccgtattcctcggcacccactcggtgtcgattccccgtggcttcctgatgccgaattcgctggaagccgcaaccgatatggcgatgatggacatcgccgatcgtaccatagttttgaccgatcacaccaagtggagctgcacatcgctgtcgctgtttgcgcgcttcgaccaggtggacacggtcattactgacgacgggctcgatcccgactccgccgccaaaaccaaggatttggtaaaggaactcgtgctggcccaccagagcgagatcattgaggaaagtgagtaaacccatggctgatttcgccaactacacccccggggagtatgcgaaggagcacatccgcatcacgccgacgacgcttgccgacggtcgtgacttcttctacctggacgacgaccccgagttcgtctccggtgccaagacccgcgagctcaaggatccgcgcccgctggactaccgttttgccccgcacctggacgccgacggcaacgaagtgccgtacgccgccccgcagatgcgccgcgacccgctgaccggcgactggatcccgatggccaccgcccgtatgaaccgcccgattaccgccggccccggcgctaccgccaagggcaacccgctggccgcccgcaagcccggtgacccgtaccaggacggcgaagtgccggacaccgactacaacgtcgtcgtgttcgagaaccgcttcccctccatggtgcgcgtgcccggcgtctccgaggacgtgacctacgttgacggcaacccgctgtgggagaagaagctcgccgccggccgctgcgaagtcatctgcttcgacccgaacgaggacggcctgccggccgatctgccggtctcccgc

SEQ ID NO: 1919 - DNA, 17770 bp, Unknown
  R17_18m  MAG No. k141_2185
gtgcgctgtggttcgccggtggtttcgccatgacctgcttcgaggcgttcgtcgccttcctgcaagcctacgtcttcgcgattctttccaccgtgtacatcaacctgagcttcccggaggagtgaggttcaaccccctctttcggaacccggcctcgcctaggtaggcaggaccgaacgaaataagatttataacgtcgccaagtacgttagaaaggaaacacaatggatatcatcaccctcgcagcggtcgccggcaacctgtccgtcatcggttacggtctcggtgcggttggccctggcatcggtctgggcatcctcttcggcaaggccatggaatccaccgctcgtcagcctgagatgtccggcaagattcagaccatcatgttcatcggcctggctctgatcgaggtgctggcactgatcggcttcgttaccgccctgatgttccactgatcgaacgttttctcagtcgaatacagaaggcaaaacgaatccaccagtgaaaggaggacttcataatgacgctcgcagaaggcggaattgatctgttcattcccgagacctatgacattgtgtggtccctgatcattcttgtcatcgttgcggtgttcttctacaagttcttcatgccgaagttcaatgcgatcttcgacgagcgcgccgccaagattcagggcaacatcgccaaggcggagcaggctaagaaggacgccgacgaggccaaggccaagtatgaggcccagctgagcaccgcccgtgtggacgccgccaagattcgcgacgacgcccgtgcggaagcgtcccacatcatcgccgacgctcgttcccgcgccgagtccgatgcggcccagatcaccgcatccgcacagcgctcgatcgaatcccagcaccagcaggccatcgtctcgctcaagggcgaggtcggcgcacttgccaccgccttggccggcaagatcctcggtgccaagctggaagacagcgacgtgcagtcctcgatgatcgattcgatgatcgacgacctgggcgccaagaagtgaccgtgaccatccgtaaccagaaagggaggtgaccatgcgaggagaggcatcacgtattgcagaccgcgagtcgcgtgattcgctggccccgaaactgcgcgacacccgtgaggacgcgtggcggatcggcaacgaactgttcacgatcaccaaggtgctcgatgacagcattcagctggaacgcgcactgaccgacccgtcccgcccggtcgccgacaaggtggccgtcctgaagggactgctcggtgacaacgcgcatcctatgaccatggagatcatgaccgacttggtctcccgccgttggagccgtgcgcgcgacatcgccaacgcggtggaggacttcggcgtggacgccatgatgtactacgctgacgccaccgacgccacgctgcaggtatccatcgagctgtccgagctgcattccgcactgctgaacctgccggtcgtccgctccaagctgtacgactgccaggccaccagcgaggcccgtgtgaagctgttccgcgaggtgttctccggcaagaccctgaacaaggtcaccatgaggctcgccgaacacgccacctgcaacctgcgccgccgccgctacttggagaccatccagtggctgatcaacaagttctcccgccacatgggcgagtcgatggtcaccgtgaccaccgccaccccgctgaagaaggagcagattgagcgactggtcgaggtctactccgccaaggtgggccgccaggtgcacatcaactcggtggtcgatccgaccgtactgggtggcatgcgcattcaggtgggcgacgaagtcacggacaacaccgtggtcgcacagctgcagaacctgcatcgcaaggtgcagacggaggcgactccggcctgaccggccgagccaatccgtccaacaccacacacaagcaaagacttgactgaacaataaccaatagaaggagtgatcatggcagaactgaccatcgatcccgcctcgattcgcaaggccctcgacgacttcgtgtcgtcgtacaagccgagcgacacccccacccaggaagtgggctatgtcgccacggccggtgacggcattgcgcacgtgacgggattgcctggttgcatggccaatgagctgctgacgttcgaagacggcacgctcggcctggcgttcaaccttgacgcccgtgagatcggcgtggtggtcctcggcgatttcgcaggaattgaggaaggccaggaagtgcgacgcaccggcgaagtgctctccgtgcccgtcggcgacggctatctcggccgtgtcgtggacccgctgggcaagccgatcgacggcctcggcgagatccagggcattgagggtcgtcgtatcctcgaagcccaggcccccgacgtgatgcaccgccacccggtcgacgagccgctgtccaccggcctcaaggccatcgacgcgatgaccccgatcggccgcggccagcgccagctcatcatcggcgaccgccagaccggtaagaccgccatcgcgatcgataccatcatcaaccagaaggccaactgggaatccggcgacccgaagaagcaggtccgctgcatctacgtggccatcggtcagaagggctccaccatcgcttcggtgaagcagagcctggaagacgccggcgccatggagtacaccaccatcgtggcctccccggcagctgattccgctggcttcaagtacattgccccgtacaccggctcggccatcggccagcactggatgtacaacggcaagcatgtgctcatcgtcttcgatgacttgtccaagcaggcagaggcctatcgttcgatttccctgctgctgcgccgcccgccggggcgtgaagcctacccgggtgatgtgttctacctgcactcccgcctgctcgaacgttgcgccaaggtctccgatgatctcggcggcggttcgatgacgggtctgccgatcgtcgagaccaaggcgaacgatgtgtccgcctacatcccgaccaacgtgatctccatcactgacggccagatcttcctgcagtccgatctgttcaacgccaaccagcgccccgccgtggacgtcggtatctccgtctctcgagtcggtggcgccgcacaaaccaaggctctgaagaaggtctccggtacgctgaagatctccctggcacagtaccgttcgctggaatccttcgccatgttcgcctccgatctggatgcggcttccaaggcccagctgacccgtggtgcccacctgaccgagctgttgaagcagccgcagttccacccgtactcgccggaacaggaagtcgtgtccgtatggaccggcacccacggcaagctcgacgacctcgacctgaaggacgtccttccgttcgagcagggactgctggactacatcgaccacaacaccgatatcctcaagaccattcgcgagaccgaggaattcaccgccgacaccgaggctgccctcgataaggccgtggacgagttccgttcgacgttcgtctcttccgccggcaagccgctggtcgagaagaagccggacgttgacaaggccgcgccggttgatcaggaaaagatcgtggcgggagaaaagtaagccatgggctcgcaactcgcattgaaatcacgcatccactccaccgagtcgttggcgaagatcttcaacgctcaggagatgatcgcgtcttcgcatatcgccaaggcccgtgatgtggccctgaacgcgaagccgtacaccgatgcgattttcgatgccgtgcaagcgttggtggcccacacccatatcacgcatccgatcgcggtgaaggacgagaagaacccgcgcgtggctgttctcgccctcacctcggatcgtggtatggccggcccgtacacctcttcgattatccgtgaaacggagtcgctgctgtcccgcctcgatgcggcaggcaagcagccggagctgttcgtgtacgggcgtcgcggttcgacgtactacaagtaccgtaatcgtgacatcgcggcgacgtgggaaggcgacaccgaccagcccggcgtggaaattgctgaaacgatctccaacactttgatggacgcctacatgaagccggctgagaaaggtggagtttccgaactctacatcgtctacaccgagttcatcaacatggtggtgcaaaaggtgcgcgtgctgcgcatgctgccggtcgaaatcgtgaaaaacgagaccaaggtgcccgatcctgatgaagaggcaccggctactgcggatgtcgctccgctgtacactttcgagcccagcctcgaaaaggtactggacgcgattctgccgaagtacattcagtcccgcatccacgagtgcctgctgaccgcggccgcgtcggaaaccgcaagccgccagaacgccatgcacacggcaaccgacaacgcacgaaacctgatcgacgaccttacgcgcaagctcaacgcttcccgccaggcctcgatcacccaggaacttaccgaaatcatcggcagcgctgacgcgctgaccaagaaggaagagtaggaacgcatatggctgacaaccagaccactgcggccgagcctaccaacggtcgcgtcacccgcgtccagggctcggttatcgacgttgaattcccggtgggtcatctgcccgacatctacaacgccctgaaagtaacgatcgtcaacaccggcgccaaggaagaaggcgaggcgaaggagaccgagatcaccctcgaggtcgaacagcacctcggtgattccacggtccgttgcgtcgctctgaagcccaccgacggcctggtccgtggtgcctccgtctccgacaccggcgccccgatctccgtgccggtcggcgacgtgaccaagggccacgtcttcgacgtgtccggtaacatcctcaacaagaagccggatgagaccatcaccgtctccgagcgttggcctatccaccgcaacccgccggccttcgatcagctggagtccaagacccagatgttcgaaacgggcatcaaggtcatcgacctgctgaccccgtacgtgcagggcggcaagatcggtctgttcggtggtgcaggtgtgggcaagaccgtgctgattcaggaaatgattcagcgcgtggctcagaaccacggtggcgtgtccgtgttcgcgggcgtcggcgagcgtacccgtgagggtaacgatctgatcggcgaaatggccgaggccggcgtgcttgagaagaccgcactggtcttcggccagatggatgagcagccgggtacccgtctgcgtgtcccgctgaccgcactgaccatggcagagtacttccgtgacgtgcagaaccaggacgtgctgctgttcatcgacaacatcttccgcttcacccaggccggttccgaggtgtccaccctgctgggtcgtatgccttccgccgtgggttaccagccgaacctggccgatgagatgggttccctccaggagcgcatcacctcgacccgtggtcactcgatcacctcgctgcaggccatctacgtgccggccgatgattacaccgacccggccccggccacgaccttcgcccacttggatgcaaccaccgagctgtctcgtgacattgcctccaagggtatctacccggctgtggacccgctgagctccacctcgcgaatcctcgatccgcgttacgtgggccaggctcactacgactgcgccaaccgcgtcaaggcgattctgcagcgtaacaaggagctgcaggacatcatcgccttgatcggtatcgacgagctcggcgaagaggacaagaccaccgtgaaccgcgctcgtaagatcgagcagttcctcggccagaacttctacgttgccgagaagttcaccggtcgccccggctcctacgtgccggccgacgagaccatcgaagccttcacccgcatctgcgacggcgtgtacgacgacgtcccggagcaggcgttctccggtatcggcggcatcgatgatctcgaagagaagtggcacaacatgcagaaggaactgggtgcgtgatggctgcggaaaaaaccacgatgaaggtcaacatcgtcgccgctgaccaccctgtgtggcacggcgaggcgacgagcgtgaccattcccgcctctgagggcggcatgggcatcctgcccgaccatgagcctgtgctcacggtgatcaagcagggtacgctcaccgtggttgagcccgatggcgatcgccacatgttcgaggtgaccgacggattcatctccttcgactcgaacaaactcaccgtggcggtcgagcgcggccacgacgtccagtactccggcaccgccgagtgatctgaaccaactcctcaaggggctctctggttttccagagagccccttttgctatgtatgccatgtgttgcgctacagtggtggcctatgcgagttattgttgccgactgttcggccgagtattcgggccgcctcaacgcctcactgcccctggccaagcgtgtattgctgatcaaggctgattccagcctgttgattttctccgaattgggctcctacaagccgctgaactggatgaccgcgccctgcacgattcgtgagatcgacccagccgccaaatccgcgcaacattcccgggaaagtgtcgctggtggggctgtggatggtgattccgcgacgcattccccggaaagtgtcgccgctggtgagccggaaaaggtgctacgtgtcagcgccgacaagggctctgacattcttgaagtgacgctgcaacacatctattccgaccaaacctatgatctgggcgaagatccgggtctcatcaaggatggcgtggaagaccatctgcaacgctatctggccgagcagatcgagcgtatcggcaagggagccaagctggtgcgtcgcgaataccctaccgccattggtccggtggatatcatggccgtgaatgccgagggcgagcatgtggctgtggaaatcaaacgtcacggcggcattgatggcgtcgagcagctgactcgctactgcgaactgctcaatcgcgatccgctgctggccccggtgcatggcatcttcgccgcacaaaccatcacgccgcaagcccaggtcttggccaaggaccgcggcttcacctgcctcatcctcgattacgacgatatgaaaggcaccgaggacgacagtctcaggctgttctgattgttcttggcttccctcttgaaggggagttttcgaacgtacatagagagactgaagggaggcctcacggtatattccgtgaggcctcccctcagtcagtttcgctgccagctcccctcttggggagagccatcgagattgtttagtacgcggcgagaatatcgattacgaagaccaacgtggagttggcgggaatcgaaccttgctccttatctccataggcctgatccggcggaatcaccagcagaacctgagagccgacggtctggccgaccagacccttctgccagccctcgataacctgatgctggccgctggaatcgctgaacagatcggcgtcgattgtggaatcgcgatcccaggacgaatcgaactgcttgccatccgtaagccaaccggtgtacttgaccaccacggtgttcttgtcggtcagcttggcgccgttacccttgatcagcgtctgcgagatcagcgaatcaaccgaaccctgaccgttcatgtcaatggacggcttgccattcttggctcgcgtcaccttcggcagattggccggcacatccttgacttcctcgccagtggccttcttcaggtccttggacttggatacaaacgtcatcgccaaaatgtaagagtatccggacgaatcctgagcgttgacgccaaagccgatcgtggtgttgatcttggcacccttgatctggttgtagtaggtcgaggagagggtcttggaatccaccttcagcgagcaatccggcgtgttcttggtccaggtgtccatgagctcggtgccgtctttaacgttgagcgcgatgccttgggcgcagacgcggtcgccctcctcgattacgtcgccatcgcccttttgcagcaccacataggagccgtcggacacggtcatcggcgtattaaaggagatggtcggcttctcgccgagcttgcccttggcggtcacgccggcaatttgccccttcttgtcagaagagtcggaagaggatttcgagtccgagctcgaactggagcaggcagccagcgatacgcacatcgccagcgagcaggcaagagcaacggccttgccgagaggggataacatagatttaacagacttacgcatgacacaccaccctactggtgaaccttgattttctgcgctcctaggtaataaacaggtgaagattgtagaatggttaagttatgagtgctgaagaacagactacaagaccggataagggcgccaagcgtccatcccgtcatgccaagatcatgcgtggagtggtgacgcctatcttcggtctattggccgtggcggctgtggtgttggggtacatgaatgccacgatatggaagccctccactgaaatcaccgcttccgcaaccatgagcggctcccggtatgccgtcactgatccgaatgtgctgaccttgttggatcagaacgccacgataaccgtggactcgggatcctctcaggacgaggcgtgcgtggcgttgggtccgtccaaggatgttgccggatgggtcgcgtccgagaagtcctatacccgtatcaccggattggcgtcatggagcgagctgagcacccagaagggaagcagcacgagtcagggagcgcctgccagtgccgatgacgcggtggcgttcaaggattccgatatgtggactgccgtgaaatgcggcaccgggtccgtttcgctggagagcaagaagaccggcgcctcgacggtggccattgtggatttgggtgaaaatgccaccaacgccaaggtgcagctgcactgggtgcgctccgaagtgccggactttgcgatgccgttctatctgtccggtggattgctggccgtgctggccgtattgtgcgcctccgtgttcgccatgccgccgcataagcgccgcaagcgcatggtggaaggcacggcaagcgccgtaattgaggaagaggcacccgccagcatcgcagtgtccgggaagccggatggtgcaagtcgacgtaatcgtcgccgccacgccacaaatcggcgttcgggccgtgcgtcctcgcaatctgaagccaccgaaacaccggttatcatcgacccaagttcacgtaacctggtcgccgaccagcagactggtgccgagagcggcgctgagaccggcttcagcgccggcgataacgaatcgacttcggtaatcacccctgacgaactgcaggcctacttctcccgcttggcccaagaggtcaataccggagacgactcggccgatgacggacaggaggaaagctgatgaacaagcgatggaacaaactgtgtgtggccgccctcgcctgcgtggcgttggtcgtgccgttgaccgcctgtgaaggccggctgccgacgccggctgctgatacctccaccaaggttgcgccggatttgaccgaggcacaggagaagaagattcgcctgaagattctcaagacgatcgatgaagccgatcaggccaagaatcccgatggatatgcggccgttatgggcgggccccagctggacattcgcatcagccagaccacgatcaaccagcgcggcggcggtatgtccaaatacgcgaccattcccaaggacatcgcccagacggtgattcccatggacgacggatggcctcgctcggtgttcaccatcacgaccaccaccgaagatcagcagtccaagcgtttgctggtcttcgatcaggaatccgcccggcagaattacaagctgatggccatggctcgactgtttgagggggccaagctgccgaagttcgagattccgactattggctcgcagatgggcactgcaaaggatgagaagctggtggccactcccgccgatgccttgacccaatacgccgatgtgctgcagaacggctccaagagccaatacgcttccaagttcgcagacgatttgctgcgccaggaactggccaataccacggccaaggtgcaggaaggtatgcaacgcaacaacggtacgcaggagcagaaattcaccgttgtgcctgaacagatgtgggtgatgcgtgctgcagacggtgccggtgatttggtggttggccgtattaacggcgaatggactcgcaaggcgggggatggccgcgaatcgcagccggcttccgacgacgagaaggcgctgttcaatagcgacaagtacaccagcaccatgaaggtcacgtatgtgaacgtggtggccttgtacattccgttggcaagctccggtgagcaaatcaccgccgtgggtgccgaccgtcagccggtaaaggtcgaagcgctgtagttgttgccgccgcccaccgtgcggttaacgccccaccacgatatgattcatccaccacgatgtcggtaagttttacctttcgcacaatggtgccgttttgagtcacatcgtggtgggcgttttgctacgtggtgggaatttcaccgcgtagtggaagaatccctacgtggtgggaatcggcattacaatcaatgtcagcaaatgtgattgttgttgtacgcgaatcgcgtggaatcgggaggcattatggcagagcagcagttcaatccgggagtctcattggcgggcgccgtcgatttggaggcgctgaagcatcaggtcaaggccgagcccggccaggcgggtggcgctcctgccgctggtgggtacgtgatcgacaccaccgaaaacaccttccaggcaatggtgcagacttctgcgaccttcccgatcctgctgctcctgtggataccgaccgatgaccgcctgttcccgatggcccgtgcgttgggcgacgcggtgaacgccctgaacggccagattcagctctcccgtatcgatatctcgtccaatccttcgattgcccaagcgttgcaggtgcagggcgcgcccgcactgttcgcgttgattgccggccgtccgatgccactgttgcagggccttccgggtgacgacgagctcaagcaacttaccgacgaggtgattccgaagatcattcaggccgccgcgcagtctggtgtgaacggtaccgcgccgtactcgggtgatcctgattccgatgccgccaagagcgctggtgccaccggtgccggcgtgggtgctgagcaggtgccgccggagcatgccgaagcccatcgtttggccgaggagggcgattacgccggtgccgccgccgaatacgagcgcgtgctcgaatccgacccgtccgatgcactggccgcccgcgaacgtgcgaaggcgctgttgctggcccgctccgggtccgctgatgtacgtgacgtgcgtgccgctgccgccgcagcgccggacgacgtggaagcgcagttggctgtggctgatatcgacatgatcggtggccagattcaagacgctttcgaccgtttgctggactttttggccgccgggcataaggccgatatcgagccggttcgcaagcgtctgctcgaatacttcgccatccccgaacccaccgacccgcgtctggctcgcgcccgccgtcgcctagccaccctcatgtactgattggttttggctcccctctttgaggggagctgtcaggcgtagatgactgagggaagcgcgcgaacgtacttgattgcttcccctaaaccatccgattcttcccgaaatattgctggaaccttggcccctccagcgccagttcctcctcgaaatcatccgcccacttgcagaacggacggttggcgagaccatcgttattgaatcgcgcctgatcggtgatttcggtgatgcagaattccggaatcgtcagattggtaaccggcccggatcgttcggcctcggctacgatgagcggcgcgttcggcccgccgaacacgtccacgctccagccgtcttccgcaatccacacggaataccggttcttgatgattaccgagccgccgcgcttgatgagttcggcggcgatgcgcgtgtcgatctcgcgctcgacctcgtagcgcgtgccacccacggacggacctttgacggtgacatacgcttccgagaaccggtcgcggtattcgtccagcacggccaccggatttacgtcgggcgtcatgtcgacgtgcaccttgtgcgagaccagccgcacgcgcaaggcgtaattgtcggcatgcacgtagtagctctgaataatgagggccggggcgtcgccgtcgtcgtattccgccggcagctcgcggcagaagaagcggcgttcgtattcgaagtcatctgtaggttccgacataacctcattgtagagccgatgatggcgattttctcgttattttggcgacgtatgtgcctcatgcagcgtgatgtggtgtacagtaaagaagttgctcgggtttgtagctcagtggatagagcgtctgtctccggaacagaaggtcgtgggttcgatccccatcaagcccaccagcatggctttcggctagccgccggaagccttttgcatattcggcgcgtgatattaagcgcgtgcaaagctggtgctggtgctggtgctggtgctggtgctggtgctggtgctggtgctggtgctggtgtcggtgatgccggctcgcttgggtcgtggaaaaaccgcccggtttggcgagaacggtagtcgaatcgtctggaatcgtctggaatagcaaggaatagtctgttgatggccgtatgccgggcatcatgcgcgctaaacgcgacttcgctcagtagactgctacgtaatcggcattgccaatcgttgccgatcgtgcgattggtcgtagccggtggtgatgtgtaccggcgccggccgcagcaggtgggcgcccccaagatgagaaggagcacaatatgagcgaaaagatggaagccgtagccacttccgaggcgccggccgcgctgggcgcatacagccaggcggtgaaggccaatggcttcgtgttcgtatccggccagctgggcattgatccggccaccggcgaactggcgggcgagaccgctggagagcaggctgcacaggcgctgaagaatattaagcacattctcgacactgccggtaccggcattgagcatgtgtgccgtgccaccatctacctgaagaacgtcgaggacttcaaggaagtggacgcacgttacgctgaggcgttcatcggctccgtcaagcccgcccgcgtggcctttggcaacaacatgattcccaagggcgcgctcgtggagatcgacgccatcgcggtggagtgattcgaacgttttcccggcggcccgtctgcgcgcagggtgtgtgcagacgggccgccgcgtattgtgcgacgcattcccgggaatgtcgcgctaggcggggtgcgaggggtggttccgcggcacattcccgggaatgttgcgctggaatcgttgggcggtggtccgtgccacaatagagaccatggcatccaaaggaaaaccgtcgccgcgttcggccgtaagcccgctgagtgatgagcaggtcaagcgtctggccgcccgccacacgcttgtggactcgacacagtattacccaaccggccctcgcacgcccaatcagccggaaatcgacgcccagaatcccaaggccaccaaacgactgctgggaggggtgtccattgtgttccgcgccagctgcaagaccaaggcctggggtctggaacaggtgccggaaaccggaccgttcatcaccgccgccagtcatatcaccatgtttgatgtgttcgtgccgatgatgagcctgttccacatgggccgccgcccccggtacatggccaaggccgagatggcgaagtggccattgatcggcaagtggttccggttggtcggcatgcagccggtgcagcgtcattcgggcaaggccaagcagatcgaagagacctcgattgatattctgacgtccggccgcccgctgacggtctggccggaaggcaccgtgacccgcgacccgaaaaagtgggtgatgagcattaaggagggcgtgggatacatcgcccttgaatcctcgcgcagactggggcatcaggtgccgctgtacccggcggtgacgtggggtgccgcctccatcaaccactggtggccatggccgcgcaaaaacgtggtgatgtgctatgaccatgcgctcgattactccgatctgcttgccgacatggactcatggggtgaagagccgcctgccgaggccgtgaacgagctgatgtggcgcgtgctcaaacgcatgaacacagtactggaggaaattcgtggcgagcagttccccgctgaaggctactgggactaccgcagcatgagtcgcaagccttggcctgaagccggcggcccgttcccggctgagaagtagccgcaccggttcccgtacggggagcctaggcgagtagcatggcacaagattgtaccgatgaagttgcgcgacaagcgaaggtaggaatttgatatgggtaaaaatataacggttctcggtgcaggagcatggggtaccgctttcggccaagtgctggcggacgccggcaacacggtgaccatgtgggccaaggagcagcggattgtcgagggcattcgcgatcaccaccacaacgccgtgcgcctgccgtccgtcgaaaagttgccggacaacatgaccgccaccggggatcgcgccgaagccgtcaagaacgcggacatcgtggttgtggccatcgccgcgcagttcgcgcgagtggcactcgtcgaattcaagggactgattcccgatcacgccatcgtcgtcagcctgatgaagggcatcgagcgtggcaccaacaagcgtatggacgaagtcgtccgcgaatcccttgacctgccggccgaccggttcgccgccatttccggaccgaacctgtccaaggaaatcgccgatcgtcatcctgccgccaccgtggtggcttgtacgaacctcgataatgccacgaaggtggccgaggcatgtaccacctcctatttcaagccgttcgtgaccaccgacgtcatcggcctggaaatgtgcggcagcctgaagaacgtgaccgcgctggccgtgggcatggcccgtggtgccggctacggtgagaacaccgcagccatgatcgaaactcgtggactggccgaactgaccgcgctgggcgcagccgctggcgccgatcccaagaccttcttcggcttggccggtgtgggtgatctcatcgccacctgtggctctccgctgtctcgtaactatacgttcggcgcgaatctcggcaagggattgacggtcgaggaggccaccaaggtcagcaacggtgtggccgaaggcgtgcccaccacggatgcggtggtggctcttggcgagcagcttgatgtgccgaccccattggcgtatcagatgagccgcgtgctgaacgaaggcatttcctgctcggagatgcttgccggactgttcgggcacgaggttaccggcgaataacgagagaagcgacgtatacgtggcgtatacgttgtacgtgcaaagtcgtgtggcgtatacgtcgttgacgtgcgcgagtagactggtgtgcgtctcttgtgcgcggcggtccgagcgcggttcggtccggttggcggtgcaaagcataggcttgaaaacggttgtagtttcaataaaaggatggttatggccaagaagcgtgttgtggtgctctatggtgggcgtgcagacgagcattcgatttcctgcatctccactgccggtgtgctgggggccatggacactgaacggttcgagccgattccggtcggcatcaccaaggacggcaagtggatcatcaacggcgaagatcctcgtggctggaacttggacggcggcgagctgccgaccgtaaagatcaccccgggatcgcgcccggtgatgcttgacccctctcgcggacaggacggtttcttcatcggcgagacccgccacatcaattccgccgattccggcttcggtaccagcttcgtcagcatgcccgacccggaaatgcaccatgcgctgacctcccttggccatgtggacgcggtactgccggtgctgcacggcccctatggcgaggacggcacggttcaaggcctgctggaaatgatgggtgtgccgtacgtggggtgcggagtgtttgcttccgccgcctgcatggataagcattacaccaaggtggtgctgggtgccgccggcattcccaccgcgccgggtgtgacggtcgatgcgcgcaacttcaccgccgccgatgtgcttgccaagatcgaggacgccggtcttacctatccgctgttcatcaagccttcacgcgccggctccagcttcggtgtgaccaaggtcgagaaaaccgatgaccgcgagacccagcaggatcgtctggccgccgccatcgccaccgccggcgagcacgattggaaggtgctcgtcgaacaggggattgatggtcgcgaaatcgaatgtgccgtgctgtgcccgaaggccggtgacgagcccgaggccagctggcccggcgaaatcgtgctcgatcatcagaacgacgaccagttctacgatttcgactccaagtacatggatgcctccgccagccacgtggaagtgcctgccaatctgccggtcagcgtgcttgaggacgtgcgtgacgtggcccggcgtgcgttcaaggccgtggatggtgccggcttgagccgtgtggacaccttcgtgacgcctgatggcacggtgatggtcaacgaaatcaacaccatgcccggcttcacgccgatttctatgtatcccaaggcttgggatgccaccggagtgagctacaccgaactcatcacgcgattgattgagggcgtgctgaggtaagtgtggtgcggaatcggccgcaggccggttccgctattgacacattgcccatacctgtcagtaattcatgccaagttttcctaagttcaacaggcgtacggcaaatggcggacgcaattcacttgcacgccagtgtcaggacagattaggcgcatagtttcttttctggattcacgggccgcgcgaatgccgcgcataccaagcccgactccccagactgtcgtctggatgatgttgagaaaaggaacagtatgaacaacctgcgtaagatcgcggccggctcccttgccgccgtactcgcgttctcgatggccgcctgcggctcgagcaacgcctcctccgatggcaccggcaaggccgtcaccgtgaacgagaagtccgccaaggccacctccctcgccgatttcggcaccatggaggaccttgagaaggccgccaaggaagaaggcgcgctgaacgtcatcgccttgccgcatgattggtccaactacggcgaggtcatcgagggcttcaagaagaagtacccggagatcaagatcaccgagctgaacccgaacgcctcctccaaggaggagatcgacgccgccaagaccaacaagggtaccgacgccgcccccgatgtcttcgacgtcggccaggccatcgccgccacctccaccgactatttcgccccgtacaaggtgcaggcctggaacaagatccctgatgctgccaagaacgtcgacggcgcctactacgccgactacaccggcatcatgtccgtgggctggaacgccgacaagtacggcgatgtcgcctccctgaacgacctgctcgatccgaagttcgccggcaccgtgtccctgaacggcaagcctaccga

SEQ ID NO: 1920 - DNA, 7525 bp, Unknown
  R17_18m  MAG No. k141_2406
caccggcgaaaccatcaccctgaagtcttgggccgaggattacttcgagtccgcctccggccgcgtggtcaccatccacgtgacccacaccgccgccgacggcacgccgcttgcccgcgaaaccgagcgtttcgcgatccgtggccgcgtctactccgatgctttgcccgcagacgcccccgagtatggtggtgccctcctgaataaggaagcggatggctccgtcgccggacagtccactggacagtccgcctcctcgcgcggcctgcaagtagtgcaggccactccgcgccgtctgctgcgccgcgtgaaggtcgtcgccccacacgacatgaccgccttcgcccgcacttccggcgacttcaacccgatccacacctccactcgtggcgctcgcatctccggcctggccgccccgctcgtgcacggcatgtggctgtccgccaccgcccagcacgccgtgcaggcgaccgacgagaagggtgcccactacgagattgccggctggacctacaacatgtacggcatggtccagcttgacgacaccgtcgaaatctccgtcgagcgcgtcggcaaagtgcgccacggcggcatgaccctcgaagtcacctgccgtatcgacggccagctcgtctcccgcggcaccgcactggtccgcgcaccgcgcgccgccttcgtctaccccggccagggcatccagaagcagggcatggttctggacgagcgtgccaagtccgccgccgcccgcgacgtgtgggagcgcgccgacaagctcacccgctccaagctcggcttctcgatcctgggcctcgtgcgtgacaacccgaaggaactcaccgccaacggcgtgacctaccgtcaccccgaaggcctgctcaacctgacgcagttcacgcaggtggcgctcgcgacggttgcttttgcccagaccgcccgtctgcgcgaagccggcgccgacatctggcccgcctacttcgccggccactcgctcggcgaatacaacgcgttgtccgcgttcgccgacgtgattccgctggaaaccgtgctggagctcgtgttccaccgtggttccaccatgcaccacctcatcgagcgtgacgcacagggtcgctccaactaccgcatgggtgcccttcgtccgaaccagttcggtgtggacgacgcgcacgtcaaggaatatgtggaatccgtggccaaggcgtccggcgaattcctggagattgtgaactacaacctcgccggccagcagtacgccatcgccggtacgatcgccggactcaaggccctgaaggccgattccgcccgccgcgtggccgcattcggtggcaagcccgcgttcatgctggtgcccggcatcgatgtgccgttccactccacgctactgcgcaagggcgtgccggaattccgcgacaagctcgacgcgctgcttcctgcttacatcgactaccgtggccgtctggtggaccgctacatcccgaacctggtggccaccccgttcgagatgaccaaggaattcgccgccaagatcctcgaagccgtgccgtccgaacgcatcaaggccgtgctcgacgacccggccgtgtgggattcctacgccgccgacgaccagaagctcggccgtctgctcttgaccgaactgctctcctggcagttcgcctccccggtgcgttggattgaaacccaggcgctgctcttcggtcagcgcgaacagggcggcctcggcgtggaagaatacgtcgaagtcggcctcggcaacgccccgaccctggccaacctcggtaccaagaccctacgtctgcccgagttcgccggcaacgatacggtcgtctacaacgtcggccgcgatgaaggccgcgtctacatgaccgacaccgattcgctggttcccgacgacgagccggaagaggctgcggcctcggccccggtcgaaaccgctcctgccggtggttccgccgtcgccaagctcggatcgggtgctgctccggcaaatgccgcgactgaggctgctcagacaacggatggctccgtcgccggacagtccactggactgtccgcctcctcgcgcggcctgcaatcagggcaggccgctgctggcgcaccgtctggtgccgccgtcgccgacctgcccttcaaggcttccgatgccatcggcgtactcatggcctactccgccaaggtgcgcctcgaccagatcggcagcaacgacaccaccgacaccctgaccaacggtgtctcttctcgccgcaaccagctgctcatggacatcagctccgagctgggagtcgccagcgtggacggtgctgctgaagcgacgctcgacaagctcgcccaaatcgtcaacaaggccgccccgaactacaagccgttcggtgccgtgctctccgaggcgctgcgcgaccgcctgcgctcgctgttcggtgccgccggcgtcaaacagcagtacatccgcgaccgtgtggccaacgtatggcagctcggcgaaggctgggtggccagcgtgctcgccgcactgctgctcgacactcgcgagggtgccagctcccgtggcggcgatctggccaagctgcccaccgccgccgtgcagaacaagccggaagccgacaagctgatcgatgcggccgttgaggtcgtcgcccagctcaagggtgttgccgtggccctgccgtccgccggtggtgccgctggtggcgctgtggtcgattccgccgcgctcgacgccttcgccgagaaggtcaccggttccaacggcgtgctcgccgccaccgcccgcttcgtgctgaacgagctcggcgtggccgctccggctccggaagaatccgaggacgagaacgccgccgtcgtggccgcggtcgaagccgaacttggttccgactggcccaagcaggtcgctccgcgcttcgacgccaacaaggccatcctcttcgatgaccggtgggcctccgcccgtgaagacctcgcccgcgcctactacggcaacgaccccgccgccttgaacggcagcttcatcggccttggcaagaccatcgccgccgaagcccagtggttcgccaacgagtcggagagcgaggagcttaaggccgccttccagaaggccggctccgaggccctcgaacaggtcgcttccaacaagaacgcctcccgttacgcgaatgatatcgccatcgtcaccggcgtgagcccgaactcgattgccgctcaggtggtcgaaggcctgctcgcaggcggtgccactgtggtggccacctcgcacagcttcaagccgtccatcaaggcttgggccaagcaggcctaccgcgagcacgctaccggcaacgccaagctgtggctggttccggccaacctctccagctaccgcgacgtcgacgctctggtcgactgggtgggccacgagcagaagaagacctccggtgccaccaccacgattctgaagcccgcgtgggagccgaccctgttcttcccgttcgccgctccgccggtccatggcacgctcgccgactccggcgacctgttcgaatcgcaggcccgactgatgctgtggggcgtggaacgcgccatcgtcggcttcagcaacatcggtgccgacaccaacgtgcagcacaagctccacgtggtgctgcccggctccccgaaccgcggcgtattcggcggcgacggtgcctacggcgaagtcaagagcgcctttgacgccatcgtcaaccgtgcccgcgctgaaaaggtgtggtcgagccgcgtcaccttcgctcacccgaagatcggctgggtgcgtggcaccggcctgatgggcggtaacgacccgctggtcgccgtcgttgagcgtcacggcatccacacctactccaccgcacagattgcggccaagctgctcgacctgtgcactgccgaatcgcgcgagcaagccctcaaggccccgctcgatgtggacctgaccggtggcctcggctccgagcccatcgacatcaaggccctgcgtgccgaagccatggccgacgtcgagaaggaagctgctgcggcctcgtctcaggaaacggatggctccgtcgccggacagtccactggactgtccgactcctcgcgtgggcagcaaatcaaggcgctgcccaccccgatcgtcaccaagcaggcttcggtcgaccttgccgactggaccaacgtcaccgccaagccggaagacgaaatcgtcatcgtttccgtcggtgagctgggcccgtggggctccggtcgtacgcgcacccaggccgagctcggcatccactcggacggcaccgtcgacctgagcgccggcgcagtgctcgaacttgcgtggaacatgggtctgctgacttgggccgacagcccgaagcccggctggtacgacaccgacggcaacctcgtgcccgaagaggacatcgccgagcgctaccacgacgaggtcgtggcccgctccggcatccgcccgttcgaggaaggcatgggcaacgactacaaggacggtgctgacgaagaagaagccgaggtcttcctcgaccacgacgtcaccttctctgtgcccacccgcgaagtcgccgccgaatacgtcaagttggacgaggctcacaccaccatcgccccggatgaggaatccggcgaatggaacgtgacccgccacgccggctcgatgatccgcgtgccgcgccgcgccaccatgacccgcacagtcggcggccagttcccgaagggcttcgacccgacccgatggggcattcccgcctcgatggtcggcgacgtcgacaagatcgccctgtggaacatcgtcaccactgtggacgcctacctgggcgccggcttcaccccggccgaaatcctcgagtccatccacccctcgctggtggcttcgacccagggcaccggcttcggcggcatgatgtcgatgcgcaagctgtacctcgaccgcttcctcaaccacgagatcccgaccgacatcctgcaggaggccctgccgaatgtggtcgcggctcacgtgatgcagtcctacatcggcggttacggcaacatgatccagcccgtctccgcctgcgccaccgcggccgtctcccttgaagaaggcgtcgacaagatcgccctcggcaaggccgatttcgtggtcaccggcgcgatcgacgacatcggcgtggaatccgtgatcggcttcggcaacatgaacgccaccgccaattcggaggaaatgtacggcaagggcatcgacgcgcgcttcttcagccgtgcgaacgaccgtcgccgtggcggcttcctggaatcccagggcggcggcacgatccttgtgacccgcggtgacatcgccgaaaagctcggcctgccggtcgcggccgtggtcggcttcatccactcctacgcggatggtgcccacacctcgatcccggctccgggcctcggtgccctggctgccggcctcggtggcaaggactccaagctcgtgcacgacctggctaagctcggcgtctcagccgacgacatcgccgtggtctccaagcacgacacgtccaccaacgccaacgacccgaacgaatccgagctgcacaacacgctggcccacgccatcggccgcaccgacggcaacccgctgttcgtgatctcgcagaagacgcttaccggccacgccaagggtggtgcctgcatcttccaggtcaacggtctgacgcagctgttcaagtccggcgtgattccggcgaacgcggcgctcgactgcgtggatccgaagctccagcgcgacgatcacatggtctgggttaggaagcccctgcgcatcggcggtggcgaggacgagttcggtcgcgagaccgctggtcgcccggtcaaggccggtctggccacctcgctcggcttcggacatgtttccggcttcgtggccctggttcatccgggtgccttcgaagcggccgtggccaaggccgatggcgaggccgcgctggaagcctggcgtgagcgtgccaacgcccgcctggccgccggccagcgtcacctcgaggaaggcatgatgggtcgcgccgcgctctacgagccgatcgacaaccgtcgcttccgcgaggatcaccgtggctacgaccaccacgaggtcgaaaaggcgatgctcctcaacccggacgcccgcctcggtgccgacggctactacgaggcctgattcctctggctcccctcggttgaggggagccagtagcgcaccggatctcggctcccctctttgaggggagctcccgcgaagcggatgaggggagtttcccctggagctttctcgctggcacaaactcagtgagagaaatatgcagaacatacgaaagcccctccctcggagtgggctttctgcgtttcaaggggctgatttggcattcgccggaggtctacttccgtttcaaggggctgttacccaagtagacaaggcgtaaaaacggcggaatggcgttggcgttatgctgcggatactcgtggtatggaggatgaccagacccttgatacggaagtagacatccggaacggtcaaaatccgcccctcgaaacggagatagacctccggggcggggcgcggatgtttttttggacggctaggcagccagcccaagatgtttgcggtattgcgcgaggtcatccagcatagtgaatcttttccccctgaaatggaaatcaggccccaattctgatgaggtgtagagattacgcgcgaagcggtacacaataggaagcatgaatacttgtggtttggggcatgacgtggtggatgtggccgcattcgccgaacagttggcggagccggggtctcgcatgcgtgcgctgttctccgtgcgtgaggtgcggcaggcatccgaccgcgcgcgccagaagaatgatggggaggccgtccatctggccgccaaatgggcgggcaaggaggcgttcctcaaagcctggtgcgattatcttggcgatgccccctatccgttcacgcttgataatttcccgtggcctgaaatcgagatcttggacgattcccgtggtgtgccgtatgtgtctctgggtaagggggcggcgtcagtcttccaaactgattacgcgaattcggctgacggcgctcgctattcctctgcttagtcccctgctgccgataccgggccttatcccgtgatgcaggagcggcggaatgcgcgttcggcgcagcgctcgactctcggtgcggggtcgatgccgcatatccatatttccctgagccacgatggtccgattgcctccgcggtggtgacgatttctgtggaatagcgcccgaggcccccgagtgctacatgctgtacaacgtctccatcatggttaacctgtggagcgcgctcaccggtcgcgacgtgcgcctgctcaagaaccagatcgacaagctcgactcgctgcccgaaaactgctggttcgtgattctgaatgcgatgggcgccgacctccaaccatacgagtcccagctcatccatttgtgatttcgacggtttccagctcccctctttgaggggagctgtcgccgtaggcgactgaggggagtcctcggcaaagccacaatcca

SEQ ID NO: 1921 - DNA, 12886 bp, Unknown
  R17_18m  MAG No. k141_2508
agaactcattgagctgcgaatacgagccgccgtagatgttgtcccccacaacaatgcgatcgccgggcttgaaaatgctgagcacggcatgaatcgccgccaagccggaggcgaatgcgaagcctcgcgtgccttgttcgagttgtgcgatctgcttttccaggaagtcgcgcgtgggattaccgcttcgtgcgtagtcatagcggggcatcgcgtcgaccttctcgaaggcatatgtcgttgagttgtagatcggcgggttcacggctccggtgttgttgtctccaaccggcagtccgtggacgagctgagtattgaacctggtcattgcgcaccccctttatggtgttctctatggctgctgtgcacgaggccgttccccgtgcggcacgtctacgacgataacgtatcggacacttgaatggaacggcgttgctatatgggttgcttatggaccgttcaaatgcggtcgcggcggtcacgtggctacactgggagccatgaagattgccaaggccttgacccgtttgaccggtcctgaaaccgccccggtgttcgtgctgttgcacggctggggttccaatgaatacgatctgcccgatctgctgaactattgcggtgccggttcggctgattatgccagtttgcaggcacccatcgcctatggcatgggatatacatggttcggggcgtgggcgcatgaaggtgtgccggaaggcgaatcattggacaagcaggcggctgaggccgcccaagccattgattcatgggttgcggagcatattcccgccactcggccggtggttgccatgggattctcgcagggcggcctcttggccgcgcatctgctgcgtttcaatccgaagcgatatgccgcagccgtctcctgctctggatggctggcaccggggtccgttgcgggcgatgccgaattggcttcgttgaagccgcccgtgttctacgggcatggtgctgcggacgacatcttcccgaaagccgatgtgacggcgatgggtgagttctggcgcgagcacggcacgttgaccgaacaagtgtatccgggcatggcccattcgatcaatatgccggaaatgcgcgatattcaacggttcttggaggccaacggattcattcggccgcagatttggtagtcaccacctcacatggcgtagtctacatgggcgaattcggggactttgtaccatttgacggggtagccggcaccgtgggcgcagaagaccgagtcgggggtgttgtccagatcggcttcgggatcgtaggcggcggctgcgatgacctgttcggcgtcatggcatggcttgtagccgccgaaggtggcggagaaacggccatggccgtgcgtgtactggttcacgtccatcgcatagtcgcgcatttcggacaccggcgcctcgccttcgatcacggcgtattcgtcatcggtgaccggggattcgaagctgccggccatgcgctggatgtcgctcatggcacggccgatcatgtctgcgggcacttcgagccggaaccggtaccacggttccagcagtcggcagttgccctcccctgtggtgtccggccggctctcgaccggcgtctcgggccggccactgactcctgccctggcttccatcaacccttggcgaatcgcccggtacgtggcttgacggaagtcgccgccttcggtgtgcttcagatgcgcgcggccggccaccaaagtcatcttgatatcggtgagcggtgcgccaacgagcacaccgagatgctcacgctcggtcaggtgggtcagaatcagccgttgccaattgcggtccaaatcattttcggacagggccgaggccacagtgactccgctgcccggctcccctggttccagcaggatatgtgcttcggcataatgacggagcggctcgaaatgacctgcgccttcgatcggcgcagtgatggtctcacggtacaggatggagccggggccaaaggacacatccagaccgaaccggtcgtgcagggtctgctgtatgatttccagctggaccgcgcccatcaattgcacatgaatctcggccagccgttccacccacaccacatgcaacaacgggtcttcgtcttccagctcacgcaatgcggtgatgaccttgtgcaaggtcagatcatcgaactggggacgggccggcgagctattgtccgccgcggtctggccggcggtgtcgttctcctcattgcggccggttcccgacttggcggcatcatgctcggcatcgtcctgattcgcgctgtcacggccggctcccccacgtttggccgctcccgaggtgccggccgtatcggattccgctccgacgggcaacaccgtgtaggtcaacacgggttgcaacgacggcgattcggcgtccggttccgttcccagcccttcgccggggaaggtctgcgtcagcccggtcaccgcgcataccaagccggccggcacttcggtgaccgtctcgaatttggcgccattgtagatgcgcacctgatcgactttctcggaccacgccatgtcatcatcctcctgcgctggcgacggtgtcgacgccgcggcgcacgaggatgaggagacgatctccttggctttgagcgcaccgccggtgacgcgcagccacgtcatacggttgtgctgaccgtcgtgggcgattttgaacacgcgtgcggcgaaggcggccggccattcacgttcgcgggtgaacgtctccagcccgtccaggaattccttgaccccttcgagtttcaatgccgagccgaaatatacggggaacagctcgcgtacggcgatcatcgatcgcaatctgcccacggacagcgcgccatgttccaaatagtcgttcatcgcctcctcgtccagggtggcgatgtcttcggcgaacgcgtccaacggtagcgcgctgccctcagcggactgttccattgccggcaacggatatatcgcatcgttcagacgcctgcgcaactgagccaacacggcctcgcgggcaaatccggcggcgtcgcacttgttgacgaagatgaacgtcggcacaccgtatctggccagcagacgccatagtgtctcggtatggccttgcacgccatccgtgccggagaccacaagaatcgcgtagtcaagcacacgcagcacacgttcggtttcggctgcgaagtccacgtgccccggcgtatccagcaaggtcaggcgcaggtcgccgtgttctaccaatgcctggtgcgcgaaaatcgtgatgcctcgcgccttctccaaggaattggtgtccagaaacgcatcgccgtgatccactcgccccaatttacggatctcaccggtacggtagagcagcgcctcggacagcgtggtcttgcccgcgtccacatgcgccacgatgcctgccactatctgtttcatcagctgtgctcccttcccgatgcgccgcatgttgccggccgcctaaccaatatatccgagaaaatccgggagggaaaaattttaccgtcagaccgggctgccggtacaataagtcaccgaacaccgactgatatgaggagcctccgtgaccacttccggcattaccgttttcggccaaccatcccagcccaatcatggtgccggcgggcgaatcgccatggacgatgccctctttcccaccgattatgtggcgcttgatctggagaccaccggcttttacccgaacagttgcgccatcacggaaatcggtgccgtgcgcgtgcgggaggggcatatcgtcgatcaattccagcagctggtgaatcccttgcggccgattccgcgtcagatcaccacgctgaccggcatcaccgatgcgatggtggccgacctcgatccgattgacgaggtgcttccccgattcatcgcatggctcgctaccccggctgccggtcccaccgttgagccgattgtcggtcataacgtcagcttcgatctgcgattcctggattacaacacccggcatatcgccggctgcggctttgcctgcgcggattatgacacgatgcaaatcagccgcgccctgttccccgcgcagcggcatcaccgtctggctgacctgatcgtgcgcttcggcatcgcggacaatgaggaacaccgcgcattaagcgatgccatccagacccagcagtgcttcgaatggatgcggcattatgtcaccgagcatcacgaatccgaagcaatccgttggaagcaggcgccggccagaaacagcaccgaaattctccaccagcagctagtggtaaagcggtagttacagcccgtattattcgcacatagaggaaaactattagtcgctgggctagagaccttatagtggacggattcctctcgcatatcggagaaattcgggataccacacggttagcggccaatttggggccggcgtcccgcaaccgtgcgggacgccacgcacgtcaaacgatgcacacggctggcatcccacaccccattccacagaaccattggaattctgccaatcccacaaaccggtgacgacaccgtacatcaggttctgtgggacgccagaggaaaaacacccgaaatccgctggcatcccacaccatgtcacaccgcacctgcagcatcgcaccacaccacatcacgccgacacctattcgtgcccccatttgcataattcgacgtttttggaagatggcgcacacatgcatgtgcccccatttgcatatcaaacggttgacgcaacaatggtggcgcatgcccctttgtatcggtatgaatcagtccctgccgtcaggctctccccctattgtgagggccgactggcagggactgaacacgcataatcacatgagcacgccatgccaagcatggacatctcagtacgaacagaacctattcgcacacgttacagcccgtattccttggcgatgacggaccagaggtcggcggcggcctgatcgacggtttcgttgacgatggtgacgtcgaattcgttttcggcggcgagctccactttggcggtttccaggcgacgggcctgctgttcggcggtttcggtgccgcggccgatcagacggcgcttgagctcttcgaagctcggcggcgcgatgaacacgtacaccacttccaagtcgagttcggcggcgcgctgcttgacgcggcgagcaccctgcaaatcgatttccagaatcgttggcatgccggcagccagatgctcctcaacaggcttgagcaatgtaccgtagtgggccatgccgtgcaccacggcggtttccaggaactcccccgccgcttcgcgggccaggaactcgtcttcggtgaggaaccagtagttgacgccatcaacctcgccggggcgcggggcacgcgtggtggcggagacggacacccacacttcggggtggtcggcgcgcagcttggcttccacggtgcccttacctactgcggtagggccagtcaggacgattagacggccggcatgggtgttttcagtcatgggttcctccggagatgatgtggtgtgcagcgattatgaatccaatgtggtaacggctcaccggcgagatgaccggtaactgttacagccccgacgaacagggaagaatatgaatcgtgatgcgacgtatgcaatgagatagatacgtacgcatgccgcgacatctgattccgttctgattactggttttctgcgccttcggcagtggcttccatcagcgactgacgtacgtcaagcgcaatcgactcggtagcttggctcagtgcggcgatatccggcccatgcgaggcgataaagcgggacacggtaaccagcacgttgccgcgcgtaccgcggaacacggttttcagatccttggcctcggcaccctgccaaccgtaaccgggggaaagaatcggaccggtgaacttggaggggtccacgccggaatcctgcatccattggccgatggtggcaccgatgatcagacccaccgagcccatgccttcgatatccacgttatgcttctgcgcggtggaggcgatgccgtaggccacggtacgtcccttgtaatcgccgctctggcgcaacgcggtctgcagactcatgccttccggattggaagtcagggaggcgatgaacacgccgcgtccgttttccaacgcttcggtaatcaagccgttcaacgagcgcgcgccatagtacggcagcagcgtgatggcgtcggccagcaacggtgcaccgggcttgaaataggcgtctgcgatggcggaaatcgtggtggacaggccgccgtgcaggcagtccacgatggtgatgacgcccatttgtcgtgccgcgtagagcacgcgctcgagcgcttcgaaacctttggctccgtagcgctcgaacatcgacgtctggaatttgactgctgcggcgcgcccgttggcggcctgcagcatacgcatggagaagagttcggcgccttcggcgtcgacgttgtatccccagtcggtgaggagcttgcgatgtgggtcaatgcccacacacagcggtccgtatttggccattgaattgctcagtcgcagaccgaaatccgaacgttgtgcctgcaattcctcactgctgggtgtagtcatcagaactcccgtcgctccaattcgaacagctgcttcgaatgctcctgaatgctcatgatctgataatcattatgcttcacggcctcgatagccagcagtgcggcttggaactcggtgatggtggtaaactgcggcagatcggctgcaatagcggcagcacggatggagtagccgtcggaacgggagccgcgcgagttcggcgtgttgaggatcatgtcgatcttgccttcctcaatgagctgaaccacgttcttgcccacggagccggcggcgtgatgcacctcgaccggggcttccggatcggtgtccacgcgggtgctgatcttgtccacgatgttcgactcgatgccgtaacggcgaagcacggaggcggtgccctcggtggcccagagcttgaatccaagctcttcgaggcgcacggcgagcagcggcagctgacgcttgtcggtgtcgttcacggaaatgaacacgttgccgtgggtcggcaggccaccatcgtaggcggcgagctggctcttggcgaaggcgtgcgggaagtcgcggtcgaagcccatgacctcgccggtggagcgcatctcaggtccgagcaggatgtcgacggtcttgcccaccggggtacggaagcgcttgaacggcagcacggattccttgaccgcgacctgctggccggggtggatgtcgccgccgtcgcccttgggcagcagcagaccgttggcgcgctggtcggcgatggtttcgccggccatgatgcgggcggcggccttggccagcgccacgccggtggccttggaggcgaacggcacggtacgggaggcacgcgggttggcttcgatcacgtacagcgtgttggccatgaaggcgtactgcacgttgatcaggccctgcacatggcagcccttggcgatggcgtaggtgccttcacgcaggcggcggatctggtcgtcggacagggtggacgggggcagggtgcaggcggcgtcaccggagtggacgccggcctcctcgacgtgctccataatgccgccgatgtacagttcctcgccgtcgaacagggcgtcgacgtcgatttcgatggcgtcctgcaggaacttgtcgatgagcagcggggagggcaggcggccggagaccacggtatcggccttggcctcggcaagcgcgcggtccacgtacttggtgagctgcttgtcgtcgtagacgatttccatgccgcggccgccaagcacgtagctcgggcgcacgagcaccgggtatccgatgcggtgggcagcgtccatggcctcttcgaggctcagggcggtgccgtaacgcggggcgttcatctccgccttcttgagcacctcgccgaacagctcgcggttctcggccagatcgatggattccggggtggtgccgagaatcggcacgccggcggccttcagacgcgcggccaaggacagcggggtctggccgccgagctggacgatgacgcccttgaccgggcccatcctcttctcggcctcgtagatttcgagcacatcctcgaaggtgagcggctcgaagtagaggcggtcggacatgtcgtaatcggtggagacggtctccgggttgcagttgaccatgatggtgtcatagtccttgccaagctcctgcacggcgtgcacgcacgtgtagtcgaactcgatgccctggccgatgcgattcgggccggagccgaggatgatcacggcctcgcgctcgcgcgggcgcagctcggtttcgtcggcgtagcagctgtagtagtacggcgtggcggcgtcgaactcggcggcgcaggtgtcgacggtcttgtagaccgggcgcaggccgtaggtccagcgcagctcgcggatggtgttctcgccttcatcgcccaagccacgcaggtgggccacctgcacgtcggacagaccggcgagcttggccttcttgagcagcttcggggtcagggtctcggcctcgcgcaccgtcatggcggtctcgttgatgaggaagatctgcttcaggaaccacgggtcgatcttggtggccgcgaacacctgctccagcgtggcgccaccccagatggcgcgcatgagctgcaggtaacggtgttcggtcggggtgtggatggcctcaagcagttcggccacttcctcggcggacggcttctcgccatcccagttgaagcccatgtggcgcttgtcgatggaacgcatggccttgccgagggactcctggaagttgccggccagggccatggcttcgcccacggacttcatggaggtggtcagggtggggtcggcgcccgggaacttctcgaaggcgaagcgcggcaccttggtgaccacatagtcgatggtcggctcgaatgaggccggcgtggactgggtgatgtcgttgcgaatctcgtcgagcgtgtagccgagggccagcttggtggcgatcttggcgatcgggaagccggtggccttggaggccagtgcggaggaacgggagacgcgcgggttcatctcgatgacgatgatgcggccggtggccgggtggacggcgaactggatgttgcagccgccggtgtccacgcccacgccgcggatgatggcgatgccgatgtcacgcagcttctggtattcgcggtcggtcagggtgaagcagggggccacggtgatggagtcaccggtgtgcacgccgaccgggtcgacgttctcgatcgggcagacgaccacgacgttgtcgttgcggtcgcgcataagctcgagctcgaattccttccagccctcgatgccctcttcgatcaggacttcgtcggtgggcgagtaatggatgccggcgccggcgatgcggtgcagctcctcctcgttgtgggcgatgccggagcccaggccgcccatggtgaagctcgggcgcacaaccagcgggtagccgaacttctcggcgatcttgtcgacttcctcgatgctgtgggcgatgtcggagcgggcggattcggcgccggcctcgtcgacgaccttcttgaacagttcacggtcctcgccacggtcgatggcttccagagaggcaccgatcagttcgacgttgtacttcttcaggacgccggcctcgcccagcgccatggcggcgttgagtgcggtctggccgcccagggtgggcagaagcgcgtcggggcgttccttggcgatgatctgctcgaggatcggagtggcgatcggctcgatgtaggtggcgtcagccatctccgggtcggtcatgatggtggccgggttggagttgacgaggatgacgcggatgccttcctcacgaaggacgcggcatgcctgggtgcccgagtaatcgaactccgcagcctgaccgatcacgatcgggccggagccgatgaccatcacggatttgatgtcggtgcgcttcggcatatcacttaccttccttggagttgttcttcataagttcgcagaaacggtcgaacaggtaggccgcatcgtgcgggcctgctgcggcctccgggtggtactgcacggagaatgcggggatgtccacgcactgcaggccttcgaccacgtcgtcgttcagatcgatgtgggagacgaacaccttgccgtacttgccgttttcaaacggcgcgtcgacctgcctgccgatcggagcgtcgaccgcgaagccgtggttgtgggcggtgacctcgaccttgccggtggtcagatccttgaccggctggttgatgccgcggtggccgaacttgagcttgtaggtgccgaagccgagcgcgcggccaagcagctggttgccgaagcagatgccgaagaacgggtagccggcgtcgagcacctggcgcagcagctcgatttcggggccggcctgttccgggtcgcccgggccgttggagaagaagacgccgtccgggttcaggttctcgatttcggcgaaggtgatggtggagggcaccacgtgcacgcggcagccgcgttcggccatgcggtgcggggtcatgcccttgatgccgaggtccacggcggccacggtgtacagcggctccttgccttcgtactcgccgcatggctcgatggtgtaggcctgcttggtggacacttcgtcgtacaggctcaggccctgcatctgcggtgtgttcttgacgtcttcgagcagctgctcgatggtcttgagcgcgccggtggcctggtcggtcagggcgtcgccggagaagatgccggcgcgcatcacgcctgcggaacgcaggtgacgcaccagcttgcgggtgtcgatgtggctcaggccgacgatgccgttcttggcgaggtcgtcatcaaggctgccttcggcacgccagttgctcacgttcggagaaggatcacgcacaatgtatccggcaacccagatgcgggaggactcagggtcttcgctgttgacgccggtatcgccgatgtgcgggaacgtctgcacgacgatctggcgatcgtagctcggatcggtgagcgtctcctggtatccggtcataccggtggcgaagacgatctcaccggtcgtctcaccgagggcgccgtacggctcccccacatatacctgtccgtcttccaaaacgaggactgcatcatccttgtcatacatcggaattgcgatggtcccggactcgttctggctcaccaaaacccccttatgtttttcgggtattcgtaccaaggttaacggccagcgcagactcacacgccgttgggcgcaaagtctcaccccgctggcggggctgtcggcaaggtgccgacttgagaatgtgtggcgacacaagtgtccgcccatgaaaaagcctcccgaatggggaggctgaacaacaaatgactaatcgaccgtcggctgaatctcagcggacggggcagcggactcgtcggatgcaccggacgaatcgggcgaatcggaaacatcgccctcatcggtcggctcggatgcggcggcatcggaatcggacgattcctcatcggcctcttctgccgcggactccggtgccggtgctgcgttcttggcggtgcacactgcagacagcaggccatggatgaaagcgggcgaatcgtcatcgcacagggtcttggccaatgccagagcctcgtcgatggcgaccttgtccggcacatcatcgttgaacagaatctcccaagcggcgatacgcagaatgttgcgatcgaccacgcccatacggcggaccttccaacccgtggagtgttcgtccagggtcatgtcgatctgacgacggtgctcggccacgcccttgacgatttcaatggcatagtcgggaagcggggtctgggcaccgggatgtgcgatgcgctcgtcaagcagggcgagaatatcctgacttttttcgtcggcttcgtacagggtgttcagagcccttttgcgcgcggtggaacgtgccatactgctgctgtcctagtcctttatacggtcggtcgtctgttgaggatgcggagatcagttgttctcgcggccggtgtaggaaccatcctcggtgttgatcttgacgcggtcgccctcattgatgaacagcgggacctgaatctcggctccggtctcaacggtggccggcttggtgccggcgttggagcggttgccctgcaggcccggctcggtgtgggtgatggtcaggaccacggagcccggcaggtcaacgctcagcggggtgccgtcgtggaaggagaccaggcagtcggtgccttcgagcatgaacttggccttgtcgcccacgagggtcttcggaaccatgatctggtcgtaggtggtcatgtccatgaacacgaagttgtcgccgtcctcgtaggagtactggagggtgcggttgtcgacggtctcgaattccatcttcatgcctgcgttgaaggtcttgtcgacgatcttgccggagagcacgttcttgatggtggtgcgtacgaaggcggggcccttgcccggcttgacgtgctggaacttcatgacggtccacagctggccgtcgaggttcaggacggatccgttcttgatgtcgttagtagtctgtgccacgttattcacctatttcaaattcaaactagcttaggcaaagcccaaaaattgccttggctattatgccacaccgggtatacaggaagtgaacgccccggattcaacttgtaagtgcaacggctggtttcgggtcggcttgttttgattgtagcttggccatctcctcgtcccatacctcgttgggcgttttgtagccgaggagcttcatgggggtgtcgttgacctccccgacgatcgcgtagagctcgtactgcgtgagatcctcgaaactggttcccttgggcagatagctgcggatcctgccgttcctgttctcgttgctgc

SEQ ID NO: 1922 - DNA, 26717 bp, Unknown
  R17_18m  MAG No. k141_2642
ccgtctgcgcttcgacttccagtggtccaaggccccggccaagtccgtgatctccgcagtcgaggagcgcgtcaacgacaagctgcgcgacaacctcgccgtgaccaccaaggaaatgaagttcgacgacgccatcgccctcggtgccatgcacctgttcggcgagaagtacggcgacatcgtacgcgtggtctccatcggcgaagacggctggagccgcgagctgtgtggtggtacccacgtggaccacgtcggcaagatcggcatggtcaacatcctgtccgaagcctccatcggctccggcgtgcgtcgtgtcgacgccgtcgtgggccagggtgcctatgacttcaacgctcgtgagcacgcgttggtctcccagctgtccgacaagctcaacgctcgcccggacgagctcgccgagcgtgtgaacgccctgctcgccaagctcaaggaatccgatcgtcgcttggcctccatgtacgagtcccagctggccgcctcggttccggcgttggttgctgacaccaagaactccgcggccccggtcaaggtggccgtcaagaacgtgggccacttcggcgcggtcgacgccctgcgcaagaccgtactcgacgtgcgcgcacaactcggtgaagacgcccccgtggtggtggccctcgccggcgtgaacgaggatgacaagccgatggtcgccgtggccaccaacgaggccgcccgcaaggtcggcatcaaggccggtgatctggtgcgtggcgcagccaaggtcctcggcggcggtggcggcggcaagccggacttcgcccagggtggcggtgtcgatgcctccaagatcgacgaggccctcgaagcgctcgagcacgaggcgcagaaagcctgattccgccagtggtgtggttaggcgttgatttgggtaatgcccgggtcggactggcactgtccgacccggagcttacctttgcacaccctgctggcaacattcatgttgccggcgactatttctttgctattgacgaggtcctgaacgtcatcgaagacgaacatgtggaccatgtaatcgtcggactgcccctgcagatggacggtacagaaggcaaaagcgccaaaaaagcgcgcaggtgggcggccaatctggagaagaggctgcaagcagagagtgaagacagtgattctacggagtatcagattccgcaggtgtcattgatagatgagagattgacaacagtcagtgcgcatcgtcaactgttcgaggcccataaagcttcgaacaagcacaggccggtggttgaccagcagtcggcagtggtgattttgcagacggcactcgaccgtacccgggagcagtgaggtatcggttatgaccgatgattttaacgagttctttgatgacaacacgcattgggtcgaacaggggtcagaaccaatgcgcgggaccgagccgccagaaccgccgaaatcccgcaaggagatgcgcaagcgacgtgcacagcgcaagcgcaagcgcgtcagtggcattatcatcgctatcgccatcgtcgccctgcttatcggcggcggctatttcggcgtaaccaagctcatcgcatggcgcgacagccggagcaaccagtcgacggccatcgcggactatcggggaccgggctatggcgaggtcgaattcaccgtgagcgagggccaaggcgcggcggagatcgccgataatctgctcaaggccgaagtcatcaagtctactgccgcgttcaccagcgtggtcaacgccaatagcgcgacactctatccgggaacgttcacattgaagaagcatatggccgcatccgatgtgatcgccgttctctccgacaccaaccaggcggcgggcttccttgaggttcatcccggtgaacgtgccaccgatgtgttcgccgacgccgcgaagctttccggcgttgcccaaagcgaattcgacacgattatcaagaacaagggtaaggatattctgcccaatgaagcgggcggtagctttgagggatggctggagccgggaacctacaacgtcaagagcatgaagagcgcttcggaaatcctcaaggccatggtcgataagcgtatcgccaagttggatgaattgggcgtgccgaccggcagtgaccgcgaacgggtgatgatcatcgcctctatcgccgaggccgaggtcaacaaagccgattactacggcaaagtgacgcgagtcatcgagaaccgtttggagcagggcatgtcgttgggcatggattccaccgtggcctatggcaataacgtcaagcccgcgcaggtgaccaccgagatgacccaagacgagtccaacccgtacaacacgtacaagatctccggcctgccgcctacgccgatcagcaatcccggcgatagcgccattcaagcggcactgcaccccgaaagcggcaattggctgtacttctgcacggtcaatctggacaccggcgaaaccaagttcgccgcaaccgccgatgaacatgaccagaacgtggccgaactacgcaagtggcaagccgaaaaccagtagtcacctcattggctcccctcgccgaggggagctgtccgcaaagcggactgaggggagtaatacgggattaagccccaaccaccaccgccacaatcgcgcccgccaatatcaccggcacatacggcaccttgcccgcatgtgccggtgatgtgcgttgcgggtcgaatcgcgtccacaaggcaagccatgtgatgccggcaacgcccatcgccagccaccagaccaccacaggcaacaggccaaacagtccgacagacaatcccataggtatcaaggcggtcacatcgccgaatcccaatgaccgcggcaccagcaacgccaacgcgaactggatcaggcaacatagcacggtgaacaacagcgcctgcaacagcacgaacaggtcgttcgccaccactccatgcgcgaaatcggcggccaactggattaacgcgcccacggccacccatgcgatcggcacccgccgatgacgaacatcctcaatggacagtgcaagcccacatagcagaccgggtagcgtgaacaggtatggcatggcttaacattaacccctagttagacgtacacatagacgtacacacatgaaacgagggaagttatgctgcgttggcagacggcaggggagtctcacggagaagcattggtggccatgattgaagggttaccggccggcgtgcgcattagcacggacgatatcgtttccgcactggcacgccgtcgacttggatatggccgtggtgcccgcatgaagttcgagcaagacaaggtccgtctgctgaccggtgtacgccacggcctgaccctcggctcgccggtggccatcgaaatcgccaacaccgaatggccgaagtggaccgaggtcatgagcgccgatgcactcgaccatgacctgccgcgcgaaggccgcaatgcgccgctgagccgcccgcgcccgggccacgccgatctgaccggcatgcgcaagtatggttttgacgacgcccgcccggtactggagcgctccagcgcccgtgagaccgcctcccgtgtggccttgggcgaggtggccaagcagttcctggatcaggcgttcggcattcgcaccgtagcccacgtggtggcgctcggtggcgtgcagaccaaccctgatttgccgttgcccacacctgacgatctggaagcgttggatgcctctcccgtgcgtacgttggataaagaggccgaggcccgcatcatcgaacgcatcaacgaggccaagaaggccgccgacacgttgggcggcgtgattgaagtgctggcttacggcgtgcctgccggcatcggcacctacgtggaatccgaccgtcgtctggacgcggctctggcctccgcgattatgggcattcaggcgttcaagggtgtggagatcggcgacggcttcctggaagcctcccgccccggttcgcaggcgcacgatgagatcgtggtcaacgccgacggccgcatcgaccgtctgtccaaccgtgcaggcggcattgaaggcggtatgtccaatggccaggtgattcgcgtacgcggtgccatgaagccgattccgtccatccccaaggccctgcgtacggtcgacgtgctgaccggcgaatccgcacaagccatcaaccagcgttccgacagcaccgccgtgcctgcggcatccgtggtggccgaggccatggtgcgtctgactttggcgaagtacgcgctggataagttcggtggagacagtgttgccgaaacacggcgcaaccttgagtcgtatctcgcctcgtggccggagcacatgcgctgaacgaagtggagtatggttccgagacgactgccgcggaaccatcagcaactgtacccaccaatcgtcgagaggattcgtagattatgaccgcacgcccccgcgccgtcatcatcggcatgatgggagccggcaaaacacgtgtcggtaaggaagtggcgcatatgttgcgtctgccgttcgccgatgccgatgtggagatcgaacgtgaagtgggcatgaagattcccgcctacttcgatgaatacggtgagccggcattccgcgaggtcgaggccgatctcatcgccgatatgcttgaggatttcgacggtatcttttcgctgggcggtggcgctcccatgacgccatccacccagcatgccctcgcctcatacatcgaccatggcggtcgtgtggtctaccttgacgccgatccggcggaggccatggaacgcgcgaaccgcgggggaggccggcccatgctcaatggcaatgccaactcccgttggaagaaactgttcaagcagcgtgacccggtattccgcgaggtcgccaacgttcatgtccatacccgggggcttacgcctcagggcgcagcgaagaaagtgattgatatggtatctgagcgagcagtgcatgttaccggatcggcaattgagccgtatgatgtggtcattggcgaaggtgccatgaatcatctggtcgacgtgctgggacccaagcccgccaaaatcgcgcttatccatacccagccggtgcagcgacactccgatcgtgcccgcgccctgttgcgtcagggcggctatgaggtttccgacatcgtgattccggatgccgaacccggcaagaccattaccgtggccaacggcatttgggaacgccttggcaacgaaggtttcacccgatccgatgccgtggtggggcttggcggcggtgccgcaaccgatttggccggttttgtggctgccacgtggatgcgcggcgtgcgctatgtaaactgcccgacctcgctgctggccatggtcgatgcctccaccggtggcaaaaccggcatcaacaccccgcagggcaagaacctcgtcggctcgttctacacgcctgccggtgtgctggccgacaccaagacgctggctacgctgcccaatgacatcttcattgagggtctcggtgaagtcgccaaatccggtttcatccgcgaccccgaaatcctgcatatcctcgaagaccacgcagctgaactgcgcgctttcgacggctctacattcctcggctcgccgctcgaagacgtggttgccgagctcattgagcgcacggtaaaggtcaaggcctaccacgtctcctccgatttgaaggagaagggtctgcgtgaattcctcaactacgggcacacgatgggccatgccatcgaaaagctcgagcacttccgctggaggcatggcaatgcggtggccgtcggtatggtgtatgccgccgagctggcccatctgatcggttacatcgatcaggatctggttgactatcaccgttcgttgctcgcttcgctgggtctgccgacgtcgtggaatggcagctcgttcgacgacgtgctcgcattgatgcatcgcgacaagaaagcccgtggcaacgaactgcgtttcgtggtcctcgacgagattggtcacgtcgtacacctcgacaacccgcccgccgaagccgtagaagaagcattccgtcgtatccagcagtaattgaacggccgtaggccgtgccgttcgccatcccctcagaaaaagtacttggctcccctctaacgaaggtgccccggagtcggatttaccttctacctccctctgatgagggaggtgccccgaaggggcggagggagagaagcacaaacaaaaggagtcccaatgaccaaagtcattgttgtcaatggccctaacctcggacgtctcggcgtccgccagcccgacgtctacggtcgtcaagacctcgacaccctgcgcaagctctgcgccgaatggggcaaggacctcggcctcgaagtcgaggtgcgccagaccgacgacgaagccgaaatggtgcactggatgcaccaagccgccgacgagaaaaccccggtggtcatgaaccccgccgccttcacgcactattcgtatgctctcgccgacgccgcgcacatggtcattgatgagaacctgccacttatggaagtccatatttccaacccgtccgcccgcgacgagttccgcaagcgttccgtaatcagccctgtggccaccggcaccatcaccggcatgggtttctacggctacaagctcgcgctcgatgctgtggcgcacttgctgagcgaatagaaccaagccctccagccaatcccgggtatcagtcgacgttgcgcccgggattcctgttccgacgaatcggacccgaatcctcgtccgggcgcgccttatggacccgaagtacgccgtgtattcgaccatatgctggccaaggcagaacgagatgggctgcctacgcacgactacaccggccacgtcatgaacacgccgggtcatacacggatgatagagtgaaattccatggttagaagaacacatggtaattctcaagaacacgtcaccaagcatattttcgtcactggcggcgttgtctcctctctcggcaagggcctgaccgcatcttcgctcggtcgtttgctgcgcagccgcggtatccatgttctgcagcaaaagctcgatccgtacatcaacgtcgacccgggcaccatgaacccgttccagcatggtgaggtctacgtgaccgaagacggtgccgaaaccgatctcgacatcggccactacgagcgtttcctcgacgtcttcctgagccagaaggccaacgtcaccaccggtcagatctatcaggaagtgctgcgcaaggagcgcgccggcgaatacctcggccagtgcgtgcaggtcatcccgcacatcaccaacgaaatcaagtctcgtatgcgcgcccaggcttccgatgacgtggatgtgatcatcaccgaaatcggtggtaccgtcggcgacatcgagtcccagcccttccttgaggccgcccgcgaagtgcgtcgcgatctcggcccggacaactgcatgttcgtgcacgtttccctggtgccgtacatttccgccgcccacgagctcaagaccaagcccacccagcactccgtgatgatgctgcgtcaactcggcatctccccggacgccctcgtgttgcgttccgaccgcccgctcaaccagtccatcaaagacaagatctccctgatgtgcgacgtcgatgccgaaggtgtggtcaactgcgtggatgcgccgagcatctacgatgtaccgaagatcctgttcgaagagggccttgatgcttacgtggtgcgtgagctcggcctgccgttccacgatgtcgattgggatgaatgggcagacctgcttgagcgcgtccaccaccccaagcacgaggtcaacatcgccatcgtcggcaagtacatcgatctgccggacgcctacctgtctgtcaccgaggccatcaaggccggcggctttgccaactgggccaaggtcaacgtcaaatgggttgctgccgaccgttgcgaaaccactgaaggcgcggccgccgctctcgacaacgtcgacggcatcgtgatccccggcggctttggcattcgcggcatcgacggcaagatcggcgccctgaagttcgcccgtgaaaccaagctgcccgcccttggcctgtgccttggtctgcagtccatggtcatcgaatactcccgccacgtgctgggcattgaagacgcgaactcttccgagttcgagcccgattgcgccaacccggtgatcgccaccatggaagagcagaaggacatcgtggccggcaagggcgacatgggccacaccatgcgtcttggctcctacccggccgagctggaggaaggctcgctggtcgccgaactgtacggcaccacgcatgtcaccgagcgccaccgccaccgttacgaagtcaacgtggcctacaaggatcgtctgcgtgaaggcggcctgcgcatctccggccagagcccggacggcgagctcaccgagttcgtggaactgccgcaggacgtgcacccgttctatgtggccacccaggctcacccggagttcaagtctcgcccgaccaagccgcacccgctgttcgccggtctggtcaaggcggcgctcggccatcaggcggcccgctgaccgtggatcccgcgcggtcggtccgcgcacgatgaaggcgtgacggcacggcatctcaggatgcttcgccgccacgccttcgccgtttggcgccatccgtgatgccgcatggcccgatggcgcccgcatgtaatcaagcccacagccaatatgcgtcaggacagctagtgtttgcacttgggttctgctaggttttcataggattaagtgtgatacaaggaaggcaggatggtgaccgaaaacacagcaccaaacgccgccgctgacgtggagatgagccagtatgtggctgatcgtacccgcgtcaacgaggacaagatcaagaaggatgacgagatcatcagccagttcggcgactacaactatggttggcatgattctgatgccgccggcgaagccgcaaaacgaggcattgatgagaacgtcgtacgcgcgatcagcgccgacaaaggcgagccgcagtggatgctcgacatgcgtctgcgtggattcaaggcgttcctcgaaaagcccatgcccgattggggtgtggatctctccggcttcaacgccgacgacttcaagtactacgtcaagccgatcgagaagcaggcgaagtcgtgggaggagctgccggacgacatccgcaacacctacgatcgccttggcatcccggaggcggagaagaaccgcctcgtctccggcgtggctgcccagtacgagtccgaggtaatctacaactccattcgtgaggacctgaagaagcagggtgtgatcttcgtcgacacggacaccgctgtgcgcgaataccctgaactcgtcaagaagtacttcggcaccgtcgtgccccctgaggacaacaagttcggcgccctcaacaccgcggcatggtccggcggctcgttcgtatacgtgccgaagggcgtgcacgtggacatcccgttgcaggcatacttccgcatcaacaccccggccatgggtcagttcgaacgtacgctgatcatcgcggacgaaggctcctacgtgcactacgtggaaggctgcaccgccccgatctggtccgaggactcgctgcacgccgccatcgtcgagatcatcgtcgagaagcacgcccgcgtgcgctacaccaccgtgcagaactggtcgaacaacgtctacaacctcgtcacccagcgtgcctacgtgcgtgagggcggcacgatggagtgggtggacggcaacatcggttccaaggccaccatgaagtacccggcctgcatcctcgccgaaccgtacgccaaggcatccaccatgtccctcggcttcgccggcaagggccagtaccaggacacgggcgcgaagatgattcacctcgccccgcacaccagctccaccatcgtcgccaagtccatctcgcgcggcggcggccgctccgcctaccgcggtctggtcaaaatcgtcaagggcgcgtacggttcgtccaactcgaccgtgtgcgatgccctgctggtcgacgacttctcccgctccgatacctacccgcacgtcgacgttcgcgaagacgacgtctcgatggcccacgaagccaccgtttccaagatctccgaagaccagctcttctacctgatgagccgaggactcacggaagaagaggcgcgaggcatgatcgtgcgcggcttcgtcgaaccgatcagccgcgagctgccgatggaatacgcgcttgaactcaacagacttgtggaacttcagatggaaggatcggtgggctgattccgatgaccgacaacacaacacccgtcaaggaaatcaagattccggtcgccgaccccaacgacccgtacgcgattccggccgccatgccgtcctccgtggaccatgccgtgcgttcgttcaacgcaggcgactacccggagcccagccgcaagcaggacgaatggcgctacacgcctatcgagcgcatcaacgagttcttcaccgtgttcaagccttccggcgaaacgcagatcgaagtctccatgattgacggctcgccgttggccgaaggcgtgaagctcagccagatcaagctcggtgaaggcctgtccggcactgtgtccaagcccaacgaccgcgtctccgcagtcgaatgggaatccggccacaccgcaaccattctggaactgtcaggtgagatcgcccagcccgtgctcgtcaaggtgcacggcgcgggggaggacctcgacgccttccatctggtgatcgccgccgccgacaaggctcatgcggacgtcgtcgtggaacacgacggtgacgcacgactggccgaaggcgtggaaatcaccaccggcaaggactcgcacgtctccaccacgttcgttcaggaatgggccaaaaccgccaagcatgtggccaaccaccgcatccacgtcggcgaaggcgcatccctgcgccactccgtcgtgaccttgggcggcgacatcgtccgcatccgcatggatcaggacttcggcggcgaacagggcgacctcaacatgctcggcatctacttcgtggaccccggcgagcacatcgagcaccgcacgatggtggtacacaaccaccccgactgcaagtcccgcgtggtctacaagggcgcgcttgacggcaagggcgcgcactccacttgggtgggcaacgcgctcatccagcccaccgcccccggcaccgactcctacgagctcaaccgcaacctggtcctgaccccgggtgccatcgccgattccgagccgaacctcgaaatcgaaaacggcaacatcatcggtgccggtcacgcctcttcggtgggccgtttcgacgacgaggaactgttctacctcgaatcccgcggcatccccgaaaccgacgcccgcaagctcgtggtgcgcggcttcttcggcgaactcgtcgaggagatcggcattcccgccatctccgaacatctgatgaccgtgattgaccgccgactggcccgtggcgaaaacgacgccatggcacaggtcctcgaagacaagtaagaacagcatttttaggagcacaacaatgtcaacactcgaaatcaaggacctgcacgtccacgtcgaaaccaaggaaggcatcaagccgatcctgaagggtgccaccctgaccgtccactccggcgaaacccatgccatcatgggccccaacggttccggcaagtccactctcgcctacacgttggccggccaccccaagtacgtggtcgactccggcgaggccctcctcgacggcaaggacatcctcaagatgactccggacgagcgcgccaaggccggcctgttcctggccatgcaatacccggtcgaagtgccgggcgtgtccatgaccaacttcttgcgcaccgccaagaccgaaatcgacggcgaggctcccggtattcgccagtgggccaaggacctgtccgcagccatgaagcgcctcaagatggacccgaagttcgcctcccgttccgtgaacgaaggcttctccggcggtgaaaagaagcgcgccgaagtgctgcagctcgaactgctgaagccgaagttcgccatccttgacgaaaccgactccggcttggacgtggacgccctgcgcatcgtgtccgaaggcgtgaaccgtgccaaggaagccaaccagttcggcatcctcatggtcacgcactacacccgtatcttgaagtacatcaagccggacatcgtgcacgtgttcgccgacggccacttcgtcaagaccggcggccctgagctggccgacgaactcgaagagaacggctacgaccagtacctgcccgaaggcgccgactccgagtccgcgctggcctgagtccgtgaccgtgggagtctgacatgccctattctcgacacgctccgggccactcaggccaagtctttacggtcgcgaacaggccatgtccgactcccactcgtttcgtacaattgttacgtaagtaggggaacataatggttgattttaaggagattcggggcgagttcccgattctggatcaggagattcacgggcatccgctcgtgtacctggattctgcggccacctcgcagaagccgaatgcggtgatcgacgccgaggcgaacttctaccgtacgatcaacgccggcgtgcaccgcggtgcccacgagctggcggcccgtagtaccatggctttcgaagaggcccgtgccaaggtcgccaagctcgttggcgcgaatacggccgaaggtgaagaggaggtcgtcgtcaccggtggtgccacggccggactgaacctgctcgccaccgcgttcggcaatgcgtcgctgggccgtgggggagaagccgccaagcgttttgccctgaagccgggcgatgagatcgtcgtctcgcgcgcggaacatcattcggtgctgctgccgttccaggagctggcctaccgtaccggtgccaccttcaagtggatcgacctgaccgaggacggtcgcgttcgcacggacaacctcgacgaagtcatcaccgaacgcaccaaggtcgtggccgtcacccacgtgggcaacaccacgggtgccatcaccaacatcgcccctatcatcaagcgtgcgcatgaagtaggttcgatcttcatcttggacgcttgccagtccgtaccgcacctcaaagtcgatttccatgcgcttgatgtggacttcgctgcctggagcgcgcacaagatgtacggtcctaccggcgtcggtttcctgtacggtaagcgcgaactgctcgaagccctgccgccggccaacttcggcggctccatggtcgagctcgcctacatggaccacgaggcccaatacatggcccctccggcccgcttcgaggccggcacccagccggtcgcccaagtggtggccgcaggcgtcgccgccgaatggatgatgaacatcgggctcgagaacatcgaggcccatgagaagaccatcgccgccgaactgctgaagctcggcgacatcgatggcattcgcatcctcggaccgcgcgaaaacgtggaccgcatcggtaccgtggcgttcgacgtggccggcgtgcacccgcacgatgtgggccagttcatcgacgcccagggcatcgcgattcgcgtggggcaccactgcgcccagccggtgcaccgccacttcggcctatacgcatccaaccgtgcctcctccggtgtctacaattcggtcgaagatgcccaagcattggtcgaagcggccaagggcatccgtaagttctttggagtggagtaaaacagaacaccatgaacgaattcggtatgagcggggatgacctcgaacagatgtaccaagaggtcatcctcgaggcgtcaaaacatccgcatggcaaggaatcctttgcgcccaacgcggcggtcgaacagtccgcggacgcggcggccaatgtcaccgtgcaagccagccacgaatactgcacgcccggtgaatcgcaccagttcaacccgacctgcggcgacgaggcgaccatccatgtcgaagtctccgatgacgaaccgcacaccatcaagcgattggtgtgggacggccacggctgctccatttcgcaggccagcctgtcggtgatggtcgatctggtggacggcaaaaccgtggacgaggccatggatctggaacagacattccacaagctgatggaatcgcgcggtgccggtctggacgacgagaacctggaagaaaagctcggcgacgccgtggtattccaaggcgtgtcgaaataccctatgcgcatcaaatgcgctctgctaggctgggaagggctgaaggactccatcgccaaagccctcgctgcaaagaactgaggaaatatgtccaacgataatttggtccccgaaccacagccgtccgttttcgatgccgtcaacggcgtcctgcaggacgaggaggccgctcgccgcgtgatggccaacccggccttggccaagggcttcccgaacggacgcccgatcgagcactctgctgcgtccggcgatgacacctgtgcgtgtggcggtcaccatggcaaatgcggttgccgggatgacgaacagtccgatggcagcgagattccgatcaaggcgattgacgatatcggccgcgccactgccgaagacgtgcgcgaggcactgcatcaggtgattgatccggagcttggcatcgacgtgatcgatttgggtctggtctacggcattgagatcgatgagctaggccgcgccattattacgatgacgctgaccacgccggcctgcccgctgaccgaccttatcgaggacgaatgcgcatccacgctggccggtctggtcgaggagttccgcatcgactggacgtgggacccgcgctggaccatggagcgcatcacgcccgaaggccgcgaccagctcgccgcccttggcttcaacttcgacaacatgccaaagtactgatagcgcttagtaagctccctctgatgagggagctctatacgagaaaagccccgcatgatgcggggcttttccaagtctggactggtcaatcagtcatcgacgatggtgttcttcgggacaaccgtaatgccgtccggcgtgacggtgaagccacgggccagatcgtgctcggtatcgatgccgacagtggagttttcggtcaggaccacgttcttgtcgagaatcgccttgtacacgcgggcgcggcggttgatgatcacaccgtcgaacagcacggaatcgacgatctgtgcccacgagtggatacgcacattgggggagagcacggagtggtgcacttcaccgccggagacaatcacaccgggggagacgatcgagtcggtggcgtggcctaggcggtcacgaccggcatgaacgaacttggccggcggcaggttgccggacatcgtgtaaatcggccaatcctggttgtacaggttgaactcgggcacataggcgatcagatccatgtgcgcatcgtagaactgcttaatcgtaccgacgtcgcgccagtaagcgtgatcagtgaccgtggaacccggaatctcgttcgagttgaagtcgtagacgccggcctcgttgcgggaagcgaagtacggggcgatgtcgccgcccatgtcatgcttggtgtcggcagccttctcatcgagagccagagcctcgaacagggccttggtgttggcaacgtagttacccatggaagccagaatctggttcggattgtccggcagaccggtggtggtggccggcttctcctggaagttcctgatcatgttcgggtgatcgggatcgacctcaattacaccgaactggttcgattcctcgatgggctggcggataccggccacggtgaactcggcgccggactcgatgtgctgctgtaccatctgctcgaagtccatgcggtagacgtgatcggcgcccacgatcaccacgatgtccggctggacgtcctcgatgatgttgatggtctggtagatggcgtcggcggagccgaggtaccagtgcttgccgagacgctgctgcgcgggcacaggggagacgtacgagccaagcagcggggagaaacgccagacctgggagatgtggcggtcaagcgagtgagacttgtactgggtgagcaccacgacctgacggtacccggagttcaccagattgctcaacgggaaatcgatcagacgatacacaccaccgaagggaacggcgggcttcgcgcgatcgcgggttaacggcatcaggcgggtcccctcaccacctgcaagcacaatcgacagaatcttgggattcttggccatcgtaactgtcctctctgttactgagcgtctttcgacaccgcactgctgggccggatgcttccttgcattcggtttacatagttaataattgcagaaaaattcgaacatgcaaggctttcgcccccgcgtgccgtgaacttgcgatgaacagtttcgtagatttgtttaaggatccggccttttcggagcgcgtgcgattccttagcgtgtcgcgtagaacgccactgcgctggatgccgccacgttcagactatccacgccgtggctcatcggaatcttcacggtcaaatcggcgcgggcaatcgtatggtgggacaggccgtcgccctcggtgccgaagatcagcgcgagcttgtcgatatgcgtcggatcttcgtcaggcgcgtgcagacggcgtgtcagttcgtccaacgaaatcgaacgatcctccaatgccatggccacggtggtgaagcccagcgacttcaactcgtcgatgccctggaacggccagtaatgcttgttttcggtaccgtcgtcgttgaacccggtgatacgggtccacggaatctggaatacggtgcccatcgacacacgagcggctcgtcggtacagcggatcaccgcaggagggtgtgaccagcacggcatccacatcgagcgcggccgccgaacgcatcagtgcgcccacattggtgtggtccacgatgttttccattactgccacgcggcgggcgctcctgcagacctcggctacggagggcagcggccagcgtcgcatcgcgcatagggcgccgcgatgcagacgatagccggtcagtcgcttgagctgctcaggtgaggccacgtagacgggaatatccgcgccccagcgcccgtcgatgaagtcgaaggtgtctttcatgccctccagccaaggttcctcgaccagcagtgacagcggttcgcggtcagcggccagcgcgcggtcgatgactttgggggactcggcgatgaacacgcccttggctggttccaagcgattgcgcaactgcatttcggtgaggctcacatacgcttcgacgcgcgggtcgtcaacggtgtccagcgtgatgaactgcattggtggcctttcgtgtgtgcagataacgaaaaaccccttgcaatgcaaggggtttatctgtgcccgagacgggacttgaacccgtacgcccgtataaaataggcactagcacctcaagctagcgcgtctaccattccgccacccgggcaggtgtcgtttggacaacgagtaaatagcttagcatgaaattacagggatgcaattcgcgcgtgtgcccggcgtgtcgcgtgtagccttgaagtcatgactgatgccctttttcttttcgacccgcaggtcgacgatgtcccggtgaacagcgacgaacttcacgccggctggaagctaaccctgcccgcgcacatcaagcgccatgctgtgcaggccatgcgactcaaggcgggggacagcctgcaactttccgacggcaacggcttgagaatccaggcagtgatggccgatcctgaagccggacttgctgaagttgtggaagtggggcgcgaacccgagccgctcacccgtttggcgctgattcaggcattggcgaaaaccggccatgatgagcaggccatcgatatggctacgcagattggcgtcgaccaagtggtgccatggcaggcggaccgatccattgccaagtggaaggtcggccgtacggacaagaagtggaattcggtactggatgccgccaccgagcagtcgcggcgcgcttttaagccgcaactggaggcgtgcgcgtccagcaaggaggtcgtggccatctgccgcagggcctgcgtgcatggcgatgtggtgattgtgctgcatcaggatgctaccgatacgtggtccggcgtggaggagaaggttacgcagttggtggaacgcacgctccaggacggccggccgcggactgtcagtgtggtggtcgggcctgagggcggcatcagtgagcaggaggtagctgatttcgtcaaggccggagcggtgagctgcgtactggggcacaatattctgagagccgcgacggccggtcctgtagcgttgtcgctgttgtctcgggtgttgggacgttacgagtaacgcccacgcgctaagctggtgcgtagcaacatcaaaccaaggagcatgatgagcgaatccgacgattgcctgttctgcaagatcatcgcagggcagattcccagcagcaaggtctacgaggacgagacgacctacgcattcaacgacatcaaccccaaggccaaggtccacgtgctcgtggtgcccaagaagcactacgccaacgtcgccgaacttgccgccgacgacccgaccgagctggcccacatcgtctccatcgcgcagaacatcgccgacaaggaatttcacggcgcctaccgactggtgttcaacaccggtctcgacgccggccagaccgtcttccacgtgcacgcgcacgtgatgaccggcgaaaagctcgacgagtagtaggggaatatccgcttcgtggcaacgactacacgtaccatcaccatcccgccccaacttgaccccgtcgccgtgctcggcccggttgacgaggtcattcgcgaggtggagcgcgcctttccggacctgacgattatcgtgcgcggcaaccgcgtggcgatcgtctcccgctccaagcagaccgaagcccaggccgcacaggccgaggatttggtcaacaccatcatccaagccgcctacaccgcgcctatggacgccgacaccgtgcgtcgcatgctcgaccagaacgtgctcaagaaccacgtgcgcctcgaacatccaggtcacggcccggtgcatgacaaactggcgcaatcgacctcaaacgaacgcgcccatgcacgttctgccggctcccacgacccgacgtaccgcaagcccacggttcccggcgtcatcacctttgccgccggcgtgccggtccgtgcgaaaaccgccggacaagtggcctacgtgaacgccatcgaatcgcacaccatcaccttcggcattggtcccgcaggcaccggcaagacgtatctggccgtggccaaggctgtgcgtgccttccaggacaagcagattcgccgcatcatccttacgcgcccggccgtggaggccggcgaaagcctcggctttctgcccggcacgctgaacgacaaggttgacccgtatctgcgcccgctgtacgacgcgcttggcgacatgctcggcgccgaccagctcaagcggtacatggacgacggctccatcgaagtggcgccgctcgcctacatgcgcggtcgtacgctgaacgacgcgttcgtgatcctcgacgaggctcagaacaccaccgaacagcagatgaagatgttcctgacccgtctgggcttcaacaccacgatggtcatcaccggcgatatctcgcaggtggacctgaccgtgccgcgctcgggactggccaccatcgaacgcatcctgggcggcatcgacgacatcgcattcgtgcatctcaaaaccgaggacgtggtacgtcaccagctggtcggccagatcgtggccgcctacgaccgtcactccgccatcgccggcgaccaccgcgacatcgaacgcaagggccgccgcaaccataccgacttcgatgcccgccagcaaacggattcaaccaaccaaagtgagacagacgatgagcgttgacgtcaccaatgaaacccagtgggtcatcgaccccaaggtcttctccgatttgggtatttgggtactcgaccagatgcgcgtgagcacccagtccgacctgaccatcatgttcgtggatcccgatcccatcgccgaattgcacatgcgttggatgaacctcgaaggcccgaccgacgtgatgagcttcccgatggacgagctgcgcccaggcgacggcaaaaccgtgatggaaggagtgctcggcgacatcgtcatctgcccgtgggtcgctgcccaacaggctgccgcagccgggcacagcaccatgcaggagatgctattgctcaccatccacggcatcctgcacctgctcggctacgaccacgtgacccccgagcaggagcgccagatgttcggcctgcagcgacagctgctgctcaccttcttcgccctgcgccacgatgccaacgtgcaggccacgctgcccgccggcacacccgacgcgctggccctgtacgacgccgcgcacggtgctggccgcgacctcgattccaaataaacttccaaatcaatcacaccaaattcggattattctataccgttcaaggacattcaaggacaccgaaaaaacattatggagtattccagtaccacgctgatcgccgtcaccgtcattctcgtacttgtggcggccctgttcgtctggctttcgctgaccatggccgccgctgaaggcgccgtggcccgcgtaacgcgagccagcctcaacaatctcatcctcgaggtgcagaccgactccgaagcaagccagttcctcaagatgaagaagatcgacaagattcatcgcgtgcaacggctcatcgccgaccgttacgccaccgccggcagctgtgcgttcttccgcatcgcctgcaatgtgctcgacggcgtactggtgtcttccatcgcatccctgtggggtgcggaactgtgggttgaactgctcgccggattcctgttcgcgattatcgtagccgtggtctccgtactggtccgcccgcgcaccgccggcatgaccaagccggtcgacatcatgatttccaactcgcgcatcgtgtcgttggccaccaagctcacgccgttcgcacgcatcggtggcgacaagtccggttccaaggggccgggccgccgctccaaggactccgatctgtccgatgacgaggagcttgagaagattcagctcgagcagggcaaggccgccatcgaccgactggtggagtccaacgacttcgatccggaagtctccgaaatgttgcgcaacgtgctcaccctgtctgatacgttgactcgcgagatcatggtgccgcgcaccgatatgatctgcatggagcgcgactccacactgtcttccgcgctgaaactgttctcccgctccggtttctcccgcgtgccggtgatcggtgaggatgtggatgacctgatcggcgtggcctatttgaaggacgccgtgcgcgccaccgccttcaacccggcggccatggagcgcacggtcgaatccatcgtccggcagccgctgcttgttcccgaatccaagccggtggacgacctgttccatgagatgcagcgttcccgccaacatgtggccgtggtggtcgatgagtatggcggcatcgccggcatggtgactatcgaggatgccatcgaacagatcgtcggcgagctggaagacgagcacgaccgcacccagcgtaccgagccggagaaaatcggcgacaacaagtggaagatgcccgcccgtacgccgattgccgatctggaggagatcttcgagatcgacattgatgaggacgatgtcgataccgtgtacggcctgctgaccaagattctgggccgcgtgccgattgtcggtgcttcggccgtgacgcgcggtctgcgactgaccgccgtggactccgccggacgccgcaagaaggtgtccaccatcgtcgtcgaaccggcgcacgtcgagggcggcgaggaaaatagcaggacccatgaggaaactgacggcgagcccgtcgaaggcgatgataccgccagcaaggagtgatatgaccgaccagaacaacagcacgaacgacgtcgatgacattgacgtcaccgatgcttccgatgttgccggcgttgccgaagtcgacgcgaccggtgaaacggagaatgtgaccaagcaggacgtgccgtatcgctccggattcgtggccgtggtgggccgcccgaacgtcggcaaatccacgttgatcaacgcgttgatcggcaagcagatcgccatcgcatcctctcgcccggaaaccacccgtaaggcgattcgcggcatcctgaccgccgaccacgcgcagctcgtgctcgtggacacgcccggtatccaccgcccgcgtacgttgcttggccagcgtctgaacgacgtggtcgacgaatccttggccgatgtggacgtggtggccttcctgctgcccgccgaccaggaaatcggccccggcgacaagcgtattctttcccgactgcgtaccgacttcgccaccaagcgtgaggacggtacgttcaagtggcgcatcccgctgattgccatcgtcaccaagatcgacgagcttggccgtcagcaactcatcaacaagctcatcgaaatcaacgatttcgccgatttctcggacatcgtgccggtgagcgccctgaagcacgacaatctggctgaagtgaagaacgtgctcattgagcacacgcccgagggcccgcagatgtacccggacgatcagatcagcgaggagcgtccggaagacaccatcgccgaactcgtgcgcggtgcgttccttgagaccctggacgacgagttgccgcattcgctggccgtggtggtcgattccatcgactatccggaagacaacgagaccggtcagggctatgacggcaaggcgcaggtcaacgtgtccatttacgtggagcgtgactcacagaagccgatcatcatcggcaagggcgcctcgaacctcacctacgtcaagaagaagctacgcaccccggtcaaccgcatcgtcggccaaaaagccaagctcgacctccacgtcaaggtagccaaaggctggcagtccgaccccaagcagctggagcgcctaggcttctaggaatcggccttcggccggttataacaaagggagattccaatggaatctcccttttgctgtactcgagtcctccttacttcttcttggtgtacatctgggtgttgaggagggtggagtagcgcttgatgaccttggggcgaatcaccttcatggaagcggtcatgaggccgttctcctgagtgaactcctcgggcaggatgatgaacttgcgtacggattcggcgcgggagactccctcgttggcccgatcgacccactgctgcacttcggcgcgcacggcggcgttccttgccgcgtcctcgagggacatgttctcgtcaagccccttggcggcgagccacgggcgcaacgacttctcgtccaacgtcaccagggcggagataaacgggcgtttgtcgcccagcaccaacgcctgggagacgatctcgcaacgctggatgacctcctcgatcgggccgggggagacgttcttgccgcctgcagtgatgatcagatccttcttgcgaccggtgatgtacaggaagccatcgttgtcgatacggcccaagtcgccggtggcataccagccatcttcggtgaacgacagctcagtggcctcgtcgttcttgtgatagcgcgggaacacggcacgacccttgacctgaatttcgccgtcctcggcgatgcgcagggagaatccggggaatgcgatgcccacggaaccagcgtggaacggcgtacccagcgggttgaacgcgcacggtgcggtggtctcggttagaccatagccctcgtatacaggcacacccgcgccacggaagaaagccagcagttcggggtcgagcggggcaccgccggccacaatccacttgacgcgaccgccgagcacttcgcgcagcgaagagtagacaatcggatcgaaggcagcgcggcgagtgcgggtcagtgcacctgccttgccattggcggagacttccttcatatagttctgcgcggccaccacggcggaggcgaacaccacgccctttggaccgtgtccggccttctgggacgcggcgttgtacaccttctccagcacgcgcggcaccacgatcatgagagtgggcttggccacctgcagatcgctgatcagcgtcttgatgccggtggcgatgtagatgcggacgttcgaggagacgacgatgtagttgatggcgcgggcgaaggaatgggcctgcggcaggaacagcaggatggtgttcctcttgtcgtgcagcagatcgggcatgtaggccggcagattcagcgcggtctggcagtagtgctcgtgggtcatctccacgcctttcggcgcggccgtggaaccggaggtgtacacgatggagcacaggtcggtcttcttgaccgaatcgatgcgctcgtccagctcctcgtccgagaccgtggtgccgtaggccttgatttcgtccaagccaccggtctcgatggtgatgatgtgctccagggacgggcactcttcgacggccccatccgccttcttacgcatgtccgtgtcctgcacgatcagcagtcgggcatcggagttgttgacgatattgcgaatctgctcggcggaatcggtgtcgtagatggtggccagcacaccgccgcacgccatgatcgccgcgtcggtcaggtcccagtcgtaggaagttcggcacatgaatgccacggcatcgcccttcttcaggccgtaatgaatcaggcccttggccacggcacgcacatcagccaagaactcgttggcggtgacggtcacccaatcgttgccggacttgtaggtgtacagcggctcatcgcccatacgttcggcgcggtccgcatacaggtcgtagatggacgtaccttcgtccagcggcggattgccttcggtggaggtggtgagcaggccggtggcggggtcgatgtcggtgacggtcaggtggccgtcgtcccaatcgtcgctgtgaggcaaagcgatattggtctcgaccggcacgtcggcgttagacaggtaatcgggctcgtctggagtgtcgtcgtggaccgggtggacgaagtcggatcccaacctgagcgccttacgggtgagattgatagtgtgctgcgtgaaggaattgataaccgacaagtcttgctcctgtaaacctttcagtgtcgtccagccatgaggcgaacgcttctcaaagttcaaattgtaatcgcccaaaccgaactcgtcaccttacgcaaccgtaggattctggcgggttaggggagtgcgtggcaaaatattgcacaggtcccgatattgttgagtaaccgtgagctacgaaacggtgattgtcgatagttattgagcggttggttgctgatcgatgccaggtgattgttggacgacttccgagcaattcatctgcaatgcacatggacacattcgtatttctcactaatttcgggttcgtttctgtttcgattggcggaatctcaagtcatggcctttaccttccgactacactttctatgcggataaccatgtccattttgaagtagaacaagaaagggctctcatggcgcaaaacccagaagccaccgtggtgttcggcgttttgaacgaaacgtccgaaacggaatcccgcgtcgcgctgacgccggatatcgtcacccggctgaagaggagcggagtctcctcgattattgaggccggtgccggcattgccgccgaatacaccgatgaggattacgaaaaggccggtgcgaaggtgaccagccgcgacgaggtgctcgccgaagccgacgcgctcggttttgtggaccgaccgtccgccgagaccgtggccaagctcagggccggccagtgggtcattggcatgctcgggtccttcaccgatgccgattacgtggccgcgctcgagaaggccggtctggtgggcatcgccatcgaaaagctgccccgtaagctttccagcgcccagtccatggatgagatgacctctcagaactccgtgatgggctacaaggcagccatcaccgccgccgatgcttacggttccttcctgccgatgatgaccaccgccgccggcacgattcgcccggctaaggcgctggtgctcggtgccggcatcgccggcctgcaggccattggtacgctgaagcgtctaggcgcggtcgtcaccgcgtacgacgtgcgtcccgcctcccagggcgaggtcgagtccctcggcgcgaagttccttgatctgggacttgacttctccaagggccagggcgagggcggttatgcccgcgcgttgagcgccgaagagcaggctcagcagcaggctgccgtcgatgagaaggccgccggctttgacatcatcatcaccaccgccaaggtcccgggccgcaagcccccggtgctgctcaccgcagccggcgtcaagggtctcaagcgtggtgccgtgatcgtggactgcgctgcatccgacctcggcggcaacgtcgagggctccgccgtcggcgagcagatcaccgagggcggcgtcaagctgatcggcgctccctacctggcctccggcgtctccacgaccgcatccaacttgctttcgcgcaacgtggccgacatcctcgtgcacttcgtgcgtgacggcaagctcggccaggatctcaccgaagaacttgatgacgcgctggtggttgccggccgcgccgccgccccggcagctgctgccgatgccgagaagtccgagaagtaa

SEQ ID NO: 1923 - DNA, 7389 bp, Unknown
  R17_18m  MAG No. k141_2680
ccggtcttttacgatggagcggccgaccgatacggccggcgtgctgtacccggaatgcgtgcggcagctgaaagtcatgctggggctaccggcctcggcggagtctgccactcccctgcccaaaactattcgcttggccggtatgagcacgtcttcgctcagtgaggcggcggctacggccgtgcagccttcactggatgacatgcttgaagaggccgacaatgcccgcggccagacctcacaggcacgtttgcatgatgccgaggccgcactggatgccgtacgccgcaaatttggcagcaaggccgcccagtttggggcgtgacggccctgcggcgtggcttcccgccagccgcgcgggctttccacgttggacattaacaaacaccgggcaggcaccaagcaggcaccagcctcttggcgtacgtttccccagaccaatttccccatcatctggaacaacgtacgccgagacgaagcaaacgtacggcacctcagacaagaacgaaaacagtccggaacaacatacaccgagctgaagtaagcgtacgtttccccagacaaggacgaaaaaagtctggaacaacatacgctagctcacacgcggacggccgcgccctcccaggggccaagctcacggttggcgagggagaccacggcgtgcgaggcgtcgtaggtggaaatcacgatatccggttcggtcaccccgtgctgcaccagttcggcggcgtcgcgcggcagatcgaccgttcgtccggacaggttgaccgccaccagcagcttctcgccgccgagcgtgcgagtgaatgcgtagacgtactggtcgtccgcatcgatcagttgccagtcgccggcggccaccaacgcattctcgtggcgaatggcgatcagccgcttgtagaacgtgtacacggagtctggatcgtcgaattcgcccgccgcattgatctgggtatgattccggttcaccgaaatccacggctccacggcggcgtccggcgcggtgaaccccgcataggcggaaccatcccactgcattggcgtacgcgcgttgtcacggccgcgggcggcgatgccggccatcatcgattccgcggactgcactttggcttcctcgacccgctgatggtaggcattgagggattccagatcgcggtactggtccagccgggtgaagtggacgtcggtcatgcccagctcctcgccctgatagacgtagggggtgccgcgatgcatgtgcagcatcagacccaacgccttggcggaacgtacgcggctgccctcggtggagtcgtctccccaacgggagaccacgcgcggctgatcatggttgccggtgaacaggctcgcccagccggcattcttgacggccgactgctgcttggcgaaaatacgcttgagctggggcaggtcgagcggcagcggcttccatttgacgttgtcttcgcagtcgaagtccacgtgttcgaacaggaagagcatgtccagttcgccgttggcgggattggtgatgtgctcgttgcgctgggcggtgatgccgggggcctcgcccacggtcaggaagccctcgcgcccggcgaacacctcgcgacgcatttcggccaggaattcatcctgacgagggccgtccgcacagaacgggttcgggttggagtagccctcctcccccacgggcaggtcctcaagttcggaaccgtattcgccgggcagacggccggccgaatcgatacgcttggaaatgagggtgatgacgtccatgcggaagccgtccacgccccggtcgagccaccagttcatcatgtcgtacaccgcacgacgcaccgcaggattctcccaattcaaatccggctgcttcttcgagaactgatgcagatagtacttgccgcgttccgggcaatactcccacgccgaaccgccgaaataggaaccccaccggttcggctcggcccccggctcacccggggtggttcccgggcgggccggacgccaccagtaccaatccgcatgaggatcggacttgtctttggacgcctcgaaccacgcatgctcgtccgaagtatggttgaccaccagatccatcacgatcttgagcccccgcttgtgtgcctcggccagcagctcgtccatatcctcgagcgtgccgaacagggggtcaatgtcctgatagtcggaaatatcgtagccattgtcgtcctgcggcgacctgtacaccggcgacagccatagcacgtctacgccaagatcggccagataatccaaacgcgaggtgatacccttcagatcgccgataccgtccccgttcgaatcctggaacgaacgcggatagacctgatagaccacagcattcgaccaccacggattcggcgtggtgccattggttcgaacggaatcgggaagcacgacacgctgcgcagtagtcatgattgcaacctttctaacgaatgtgacgggaatcccggagggcggcaagaaccctccaggattccacagactgatgacgggatgagacggcttacttgttcgcgcctcgcatcacgccgctgatcacccacttctgggcgaagatgtagacgatgaggatcggggccatggccatcaggtagctggcaaacgccaccggatagttggcggtgaactgcgagctgaacacgaactgcgccagcgggatcgtctgatccgcggaattggacagcaggatcaacggcaggaggaagtcgttccacgcccacagcgcggtcaggatcgcgatggtggcgttgatcgggcccatcagcgggaagatgatggtccagaagatgcgccaggtggacgcgccgtcaatgcgggccgcctcttccagcgacaccggaatcgaacggatgaagccgatggcgatgaacaggttggtgcccaggccgaagatcatatacaggatgatcaggccgaacttgttgtcgaggttccacccgcccatctgcttggccagcggcagcatgatcacggagaacggcacgaacatggctgcgatgaagaagtagtacaggaagcggaagaaccgcttgtccatgttacgggccaccgcataggccacgaacgtgttggtcagcagggtgagcacgatggcgcccacggtgatgatcgccgagttcagggccgcgcgcggatagttcaccatgttcgaggcctcggcgaagttgccccactgccagctggtgggcagggcgaacgtgccggcttcggccggggttttcagtgcggtgacgatggtgaagtagagcggcaccagaatggtcaggctcagcaccgcgaccaccgcggtcagccaccagttgatcttatggtccttgcggaacttgtttttcttgggttgtgcagcaacagcgctggtcatgatcacaccttctccttgctaccgaagaacttgagctgaatgaacgcgatgatcgcgaggacgatgaagaacatcaccgcattggcggtctggtaggcgtattcgccaccggtcaggccgccctggtagatgaggtaggtgaccgtttccgtagcggagttcggaccgccaccggtcagggcgaccacctggtcgaaggtgcctaaggcgcccttcatcgtcaggacgaggttgatggtgaagaacggtccgatcagcgggaaggtgatctgccagaacttctgccaggcgttgacgccgtcaagggcggcggcctcgtagatgtcggtgtcgatggtctgcaggccggcgaggtagatcagtgtggtgtaggccacgccctgccatacggagagcaccacgatcggcgcccatgccagcgattcggaggtgatcatcgattcggacagccaccctatgcccaacgccttgccgagttcggggatcggcatcatgaagatgtacttgaacacgtagccgaccacaagcacggccagggtgtaggggatgaagtagatggcgcggaacccgttgcggaacgcgatcttggagttgagcagcacggcgatgaacatggacagcaggttcaccagaatcgtcaccacgatggcgatgaagaacgtgaacaggtaggcgcgcccaatgcgctcatcctggaacatggccttgtagttggtcaggccgatccatttgtatttgccgtagcccttggaattggtgaaggagtacatcacgccgcgcaggaacggccagtacaggaacaccatgaacaggatcatggccggaacggtcatccagtagtatgcgggatcgaccttgcgatgggagaaagcggagacacgcttcttgcgtggtttttcggcaatggcggacatggtgaacctccttactgtacggtcctggcttggatctgatcccactgcgtctgcattgaattggtgaacgcctcaacgttgccggtggtcagcaggctttgcaggctgccggccatggtcatggacgaggggatgtagtggtcggcgaaatcagcgatgcgtccctccttgtagaagtggaggatgttctgcagagcctcgtcgccggcgtaggtgtccttgaacggggtgaagcagaactgcgattcggcgtattccttgagccggtcctcgtccatcaagaattccacgaacatgcgcgattccttgggatgcttggtggtggccgaaatggtgagcacggtgtcgtcgccggcggtgagcacctgctcgtccggatcgtcggtggcgggcagctgggcgaacttcacgttgatgtccgggttgaccatgcgcacctgcggcacgacgtaggtgcccaggggcaagatggccgccttgccgttggcgaagtcctgggtggcctgctggtaagtaacgcccggattgtcctgcgtgtactggtagaactcgacttccttttccgccacgggaccccacaggtcggcgaatgtggcggtgccgccgctgagcttcgagtattcgctgatcggcacaagtgtgccggccagggaggcgaacggcgcctgagtggtccacggttcggcgaggctgccttcgatcggcgtgatgccggcctgctggatctgcttcatcgcggcgatgaactcggaccaagtttcgggcaggttgtccgggtccagcccagcctgacgccacaggtccacgttgacgacgtagccgttggcgttgccggcgaacgggatgccgtacgcgcggtcggcgctggtgtcgtacagtttggccagatccttgagcagcttgaccatctgcgggttgatgttgtcgaggatctcgtcgtcggtgaagtcctggaagattcccgaggcggcgaattcgccgaagtaacggccgccgtccacggtgaggacatccggcaccttgttcttgacgaagcgcgtgcgcagatcggtggcggcatcggcggtgttgatgatgtcgatggtgatgttggggtgttccgcctcgaatcccttgaccagcttcttgaactggctgactgcctctaccttgtactggaagaattcgagagtgacgtttccggcggtggatgtgccacaaccggcgagtgcggccacgcatgcggcgccggcacagacggcggcgatggcgcgggatatgctgcgggtctttgccgccatacggttcgggcgtcgatcatgcccggaggacgaccagcgctcggtccaagacgatgcggacttcatctgctgcttctcctttcatttacacttcacgacttcgctactccgcgactgtcgtgatgtatacgttaacacccatatttattgatatcaaacggcataattacaggatttctgtaaacggttacattccgtcatggtatgattgtggccattatcgagcacccatgaggaaggttcgcgcgtgatacattccacgatctacgacgtagccgtcagggccggggtgtccgtggccacggtgtcacgaacattcgccaaaccggatatcgtcaccgaggccacgcgcaagaaagtgatcgaagcggccaacgaactcgacttcgccatctcccggtccgccaccgcgctgaaatcgaaacacacgttccgtatcgctatgctcaccggcgaggcgatcgccacctggttcgactccaatctgtacaaggggctgaccgaggtgctgcagacccatggctacgacgtgtccctctacggcattgcggacaccgaacagcgcatgtcgttcttcgacgagctgcccctgcgccgcaatgtcgacgcggtgatcgtggcctcgttcaacgtaaccatggaggagatctccaacctgcagggcatgggcgtgccgctgatcggcgtcaacgtgccgcacaacgaggggttcaacgccaccgtgtccatagacaacgccaagagcatgcgcatggccatcaatcacctgcatgccctggggcaccggcgtatcgcctacatctgcatcgacgtctcggaggcgccgatggaatacagtgcggactcgcgcctgcagagattcgaatcggcctgtgcggcgtatgaggatatcgaacagttgaccatagccctgccccgcaacgacttcaccgtggacgaggcgatcgcgcgcatcaccgtcatggaccagccgcccacggccctatgctgcctgagcgacgggacggcgctgcccctgctgtacaagctgcccaaagccgggatcggcgtgccgaacgacatgtccctgatcggattcgacgacagcgactatgcggccgagttcgggctgaccaccattcatcaggatccgcaggccctggggcgcaaggcagcggaaaaggcgctgtcgctgattgattccgcgacgttcggcattgacctgggcgagccgttcgagaccgcgcgcacgttcctggccatccgcaataccacggcggcgccccggcggtagtcggtgtcgtcaggcgcgggccgattgcagacgttcgcaggcggagcggatggcctcgtcggtggcggtggcggagaaacgcaggtaggcgggagcgccgtagaattcgccggggctggggatgatgccgatcttggcgagctcggccatatcggcccagcagtcgccggacttggccttgacccatacgtacagcgcgccggagggcatttgcgccgaatagccatatgccttcagcgcgtcaaccagcgcggatagacggcgacggtaacgaccccattgctcgtgcacggcggctgtgtccttcagacccgcagccatggcggcctgcaccggtccggggataatctggccgatctgcttgcggtattcggccatttccttgaccagccggtaatcgccggcaaccagagccgtacggtagccggccatattggactgcttggacagcgagtagagcaccaggatgccagctgccgaaccttcacacacatgtgaattcagggcacatggcgtggcggagagactgaatgcggtatcggaggcgggctc

SEQ ID NO: 1924 - DNA, 5551 bp, Unknown
  R17_18m  MAG No. k141_2855
agcacttccttggtaaggaagaggtcgtgagtccaattctcactcggggctctctggcggggtagctcagctggctagagcgtacgactcataatcgtaaggtcaagagttcgagcctcttcctcgctacaaatcgcgcccgctaaccggtgggcgcgcactatacctaagaacacagaggtgaatgacaatggctaagagcgccgacatccgtccgggcatcacgctggcctgcaccgagtgcaaggagcgtaactacattacgactaagaaccgtcgtaatacgcccgaccgtcttgagctcaagaagttctgcccgcgctgcggcaagcagaccgtgcaccgcgagactcgttgatcgcaagcatcacagctttacaaaacccggcccattcggccgggtttttgcgtattgactccagagccgagtggtagggtgcggaatcagtatccgcatcgcgtgagaaatggcagaaatcccgcgtctgaacgaacccctcgcgggcgttctgccgtttcagccgatgattgccccgatatcgcacctgcgccactaagataggaagtcatgacaagctttgcagacatcaccaccatgggcgtgggcggccccatcgcccatttcatcgagccgaccacgcgcgtggggctcatcgaagccgtggaggatgccgattccaaaggcctgcccttggtcgttatcggtggcggctccaacctgcttgtttccgataagccttttgacggcgtggtggttcgagacgcccgacgcctcatcactgtgccggacgaggctgcaccggtagagggcgaggatcgcaccgtgcatgtcaatgccgaggccggtgccaattgggatgatttcgtggccttcaccgtagagctcgggctcgagggcgtcgagggactgtccggcattcccggcacagtcggcgcttccgtggtgcagaacatcggtgcctacggacaggaagtcgccacttcggtcgaatcggtggaagtctgggatcgagacaccaaaacaacgcgcgacctcacacccgccgatcttcgattcggctatcgatactccgcgctgaaggccagcatgtacgccggtcccggccggccggccgaccgattcttcccgacgccacgttacgtggtgctctccgtcacctttgccctgacccactcggccgaaggcacggtaggttacggacagcttgccaaagcgcttggcgtcgaagtgggcgaccgtatggccaccgccgacatccgcaaagccgtgctcgcagtacgtgccgccaagggcatgcttgaggatcccactcgctacgccttgcccgacatggccaccgccaagcgcgaggccaatatcctgaccgatctggagcgtctggcctccctcaatgaggccgccggcgttcccgttggcgatgacggcctgcctgctcccgactacaatcgccacagctgcggctcgttctttatgaatccgattctgaccgccggccaagcggcggccctgcccgaagatgcgccgaagttcgacgcgactctgcctgacggcactcccggcaccaagacgtccgccgcctggctcatcgaccatgccggctgccataagggatataaggtcgatgcgtacgcgccggccagtctatccacgcagcacacgctggccttgaccaatcgtgggggagcgagcgcagccgatatcgcagctttggcgcgcgcggttcagcaggcggtcaagagcgcgttcggagtggacttggtgcccgaaccggtctgcgtcggcgtgctgtaatcgcgctattgattgatggagttggatattaatcccatatattgcggactctaagtcttattaatagacaagacacgcgggctcttctatactcgattgtcggtattgtgcgcattcggtgcgcaaacaacagagaaaaagaagagcactatgcaactgttccgtacgaaatccgtcgaacagaccattgccgaaacgggtgaagagggccgcaagctcaagcgcaacctgacttggtgggatctgtcaatcatgggcgtggccgtagccgtgggtgccggcatcttctcggtgggcgcgcaggccgccgccttccacgccggcccggccgtgatcatcagcttcctgatcgccggcatcgtgtgcggcgcagccgtgatgtgctacgccgaattcgcttcgatgattccggtggccggctccgcctacaccttcacctacaccacggtcggcgagatcatggcctggatcatcggctgggatctgattctggaaatgctgatggccggctccgtgatttccaaatattggggcgtatacctcaacgatttcatgcgcctgatgggctggaacgccaacaccaacctggcgttcggctccttccatatcgatatcgccccgatcatcatcgtggcgttctttaccacgctgctcgtattcggcaccaagatcggcgcccgcgtggacggtgctatgaccgtgctcaagatcgccatcgtgttctttgtggtgatcgtcggcttcttctacgtcaaggcctccaacttcaccccgttcattccgccgagccagccggcctccaccgtggaaggttcctccgccgtcaccggcgtgatgacccagccgctgtggcagttcgccaccggcatgaccccatccgtgtacggcgttcccggcatcctttcgggcgcggcgctcgtgttcttcgcgttcatcggcttcgacgtggtggccaccgcctccgaggagaccaagaacccgcacaagaacgtgccgctcggcatcggcgtgggcatgctgctcatcatcgtcatgtacatgctcgtggccgtggtgaccaccggcatggtctcctatgccgatctcgccaagcaagacagcccctcgctggccaccgccttcgaactggtgggtgccgactgggccgccaagatcatcagcttcggcatcgtgctgggcctggccaccgtggtcatggtgctgttgctcggcctgacccgtatcgtcttcgccatgagccgcgatggtctgctgccgcgcggcctgtccaagaccggcaagcatggcaccccggccgctctgcagatcgtcgtcggcgcggtggtggcgctcgtggccgccttcttcgacatcggcgtgctctccgacatggtcaacatcggcaccctgtccgccttcacgctggtggccatctccatcccgattatgcgcaagaagcgccccgacctgccgcgcgccttcaagatgcccggcgacccgtggattccgatcctcatcgccgtggccaacttctggttgatgctcaacctgtccgtactcacctggattcgtttcgtggtgtggctcgtggtcggcgtcgccatctacttcggctacggctactggcatgcgcgcctcggcaagggcgacctgaccgaaacgctgtccgccgaaaccgataaggccgttaacggctgagagcgaggagcgtcccaacgggcgcgtaccctcgtaccagtatctgttaaggaggattccatgccatatgtgatcgctcagccttgcgtggatgtcaaggacaaggcttgcgtggacgagtgccccgtcgactgcatctacgagggttcccgctcgctgtacatcaaccccaacgagtgcgtcgattgcggtgcatgcgaaccggtgtgccccaccgaggccatcttctatgaggatgatctgccggacgagtgggcttggtacaaggatgccgctgtcaacttcttcgctgaagtcggcgatttgggcggcgcttccgccaatggcccaatcggcaaagacccggaacaggtcgccgcgctgccgccgcagaaccagtaagctgatttgcggataagcgctgcacacagcgcatagttcggattgaaccctcggtctatcacggccgagggttcgtcgtatcttaggaacataccgtccaagaaaggggttctcatgggcttccacgcatattcgtcgccatacgactggtctcgtatcgccggcttcaaagccaccgccaaaaccgtgccgggtggcatgatcgacctgtccgtaggctcgcccgtggacccggtgccgagcagtgtccagcaggcgctggttgccggcgcagacgcccccaacgcccatggatacccggtcaccgccggcagcgccgaccttaaggccgctatcgatacatggttccgcgaactgcgcggtgtggatctgaagtccatcaacgctgccgccgtacccaccgtgggttccaaggaggccgtggcactgatggccagcctgctgcaccttggcgaaggcgatgtggtcgtccaaccggctgtctcctacccgacttacgaaatcggtacccaacttgccggcgccaccgtggtcaaagtcgatgatgtgaccgacgtcgattcctgggtgaatattccgaacgtcaaggccatctggatcaactcgccgtgtaatccctccggcgaggtcatctccgctgactggctgaccgacatcgtggctgctgcccgtcgcatcggtgccgtggtgctctccgacgaatgctatgcgttgatggactggcgttcggtgcgccgcaatacagccgcgtcctctgcgcctgccgcgtctgcatctgctgcgtctgtgcctgccgcaccggtggccgaatccaacgagcccgcctccgataccgcattcagtctctccgccacgccatgtgccctgaattcacatgtgtgtgaaggttcggcagctggcatcctggtgctctactcgctgtccaagcagtccaacatggccggctaccgtacggctctggttgccggcgattaccggctggtcaaggaaatggccgaataccgcaagcagatcggacagattatccccggcccggtgcaggccgccatggccgcaggtctgaaggacacagccgccgtgcacgagcaatgggggcgttaccgtcgccgcctatccgcgctggttgacgcactgaaggcatatggctattcggcacaaatgccctccggcgcgctgtacgtatgggtcaaggccaagtccggcgactgctgggccgatatggccgagctcgccaaaatcggcatcatccccagccccggcgaattctacggcgctcccgcctacctgcgtttctccgccaccgccaccgacgaggccatccgctccgcctgcgaacgtctcacggcgtaatgagatcgtaagtggcgttgagccgttcacgccccaaactgggcggccttgcagccgaatttgcggcgtacggcatccagcgcggcctcggcatcatgcaagcgtgcctgtgaggtctggccgcgagcattgtcggcctcttcgagcatgtcatccagtgaaggctgcacggccgtagccgccgccttactgagcgaagacgtgctcatgccggccaagcgaatagttttgggcaggggagtggcagactccgccgaggccggtagccccagcatgactttcagctgccgcacgcattccgggtacagcacgccggccgtatcggtcggccgctccatcgtaaaagaccgg

SEQ ID NO: 1925 - DNA, 13058 bp, Unknown
  R17_18m  MAG No. k141_2933
cgtgatcgtccggttcctgccggacgagaacgccagcatcaacgccctcaagagcggcgacgtgcaggtgctttcgcccatctccgccacccttgccgatccgttccgcaaggatccgaactatgtggtcaagtccggtgacggttccgacaagttcgtgctcgccttcaacatggccaacgacaagctctccgacaagcgtgtccgccaggccatccgatacgccatcgaccataagcagatcatcgcctcgcgcggcggcgtggatgcccccctcggcggtccgatccccaaggtcgatcccggttacgaggatctgagcggcctgtacccgcatgacgtggccaaggccaagaagctcatggagcaggccggatactccgagtcgaagccgctggacctgaccctcacctacgccaacgtgtacggcaccgagctcggcgaccagctcaagagccagctcaagcccatcggcatcgacctgaagatcaactacgtggagttctccacttggctgcaggacgtgcacgccaacggcaactacgatctttcgctcgtggaccatgccgaaagccacgacttctacggatggaccacgccgagctactacttccactacgacaacaaggacgtgcaggccctgtacgccaaggcgctggaggccacctccgatgacgaggcctcgaagtatctggccaaggccgcgaagatcgtctccgaggacgcgccggccgactggctgttcagctggaaggtcaccgtcgcctacgccaagggcgtggacggcttcccgcagaacctgagccagaccgtgctgcccctctggcggatcacctacaccaagtagtcccggaacccatcggtcgggcgcggcgcgggagtgattccgtggcgcgcccgaccgtggacggcccatccggccggtgacgccacgggcggtggcgagggaatcgataagggaggcgttatgcggttcttgatgcaacgcttgctgctgttcgcggcggcgctgttcggcatttcggtgctggtgttcgcgatgctgcgcatcctgccgggcgacgtggcggtcgtgatggccggcatgaacgcatcgccggcgcgtgtggcggccctgcgcgccgaattcggccttgatcggccgtatgtcgtgcagtatctcgactgggccggagggctgctgcacggcgacctcggcgtgtcggcgctgaccgggcgggcggtgacctcccaggtcggccaacgtgcgacgatcacgttcccgctgatcgtgatgagcctggccatcgcgctcaccctcggcttgtccatgggcgccgccgccgtgatctcccggtcgccggccgtgcgcggtttcctgcgcgtgctgtccatcgtgggcggcgccgtgccggccctgtggagcggcctgctgctcatcctcctgttcgcacggggcgtgggccttgtcggtctgctgccctcgcaggggttccccgccgctgggtggggcgctcccgggcgggcggtctcgtccctgatcctgccggcgctggccaccggattcgtgtccggtgcgggcatcatgcgttacacgcgctccattctggaaggcatcgccgatgagggagggccgatcgatatggccatgtcctgcggcatgacccgcacccaggcgttggtgcgcgtgggattgcgattggcggctccgcagctcgtctcggtggtggggctggcgttcgcctcgatgatcaccggcgtgatggtggtggagaacctgttcgccctgcccggtctgggcgccctgttggtgggcgatgtcggcaaccgcgatctggtggccgtgcaaagcgagctgttcctgctcgccgcgttcttcctgctgatcggcctggcggtggatctgctgcacgcgctgcttgacccgcgtctggccgccggaaaggaggaatgatggttgatcgcaatggtcgatggcgtcgttcgggcgtggttctgggcaccatctggtcccggggcaccggccgctactcgctgatcgtgctggggttgtggatggtcgtcgccctggtgtcgttgttctggaccccgcagtcgctgctggccaccgacggctaccacgtgtgggacaagccgtcgtccgcgcattggctgggcaccgacggcaccggcgcggatgtgctgagctggctgatggccggatcgcgtacgaaccttgccatcgccctgctgaccgttgtctgctcggctgccatcggcatcctactggtcgggctgatggtcgcccgttcttcggcgctcgcttcggcgtcggtcgccgtggtcgacgcgctgatctccatccccaccgtgctcatcgccctgctgctcgccgtgccgttcggcgcatccgcggccgtggtgatcggcgcgtgctccatcggctacgggctgcatctggcgcgcgtcgcccgtccggccgccctgctcgccgcccgctcgggatacgtgcagtcggcccgggcgaacggcgccagcgggttcggcgtactggtcagacacatcgtgccgaacatcacgccggtgctgatggtgcaatcgtcgatgtcggcgggcacctcggtgctggccgaggcgggcctgacctatctgggcgtgggcgtcggcgcgggggtgccgagctggggccattcgctggccacctcggtcaaactcatcaacgtgtttccgttgacggtggtgtggcccggtctgatcgtcaccctggtggtggtcgcgctgaacctgttcggcgacgcgttgcgcgacgccaccgacccggtggctaatcccgcgttgcggcagatgactgtgcccggtgcggttgtgccggtggctaggggagccggtgacactgcggcgcagtccgcagtggcagcgccgaaggagacggatgatgagcgttgaaattcacgggctgaatattgctatcggcggcaaaccgattgtcacggatgtcgatctgtccatcgcggacggcgaacgggtcggcctgatcggttcctccggctccggcaaatcgatgatcgccaagtcattgctcggcctgttgccgcgcgaggccgtgctgtccggcaccatcacgatgggagaaaccgccatcctgtccggagaaaccgccgagtcgcggcatgggcaggaagatgactcaggatctgacgaagaacgcggcgcggcagataggcaccatgttgccggtgaacgcagggttgccacctcgggccacgattccgctgcgtacgccgacgagcatacgcttgccgatctgcgcggccggtatgtgggtacggtattccagaatccggcccatgcgctgaacccggtgatgaccgtggcgcagcagattgcgttgccgttgagactgcattacgatctgaccaaggccgaacgtgctgagcgagtgaataccatgctggacaaggtcggactggaccgtgacgtggccggcacatacccgcacgaactgtccggcggccaacagcagcgcgtgggcatcgccacggcgctgatcacctcaccgcgattcatcatcgcggacgaacccaccaccgcgctcgactccatcacgcaacgtcagatcgtggacctgctgacctcgttggtggacgacgccggcgcatccatgctgttcatcacccatgatttctccgtactcgcgcgtgccaccacccgctgctacgtgctggacgccggccgcatcgtcgaatccggacccaccgccgacctgcttgctgcaccgaccacgccgcaagcccaacgcttggtcgccgccgcccaaaccctcaccctccacacccccaaggaggattcgcatgagtaacagcagtgtgccactcctctccgcccactccatcaccaaatccttcggaccgcgcaccgcacgccaccaagtcctcttcgacgtctccgccgacgtccacgccggcgaatgtctggccgtgatcggcggctccggatccggcaaatccacgctgacccgcattatgctgggcttggaatccgcggactccggcagcgtggaatacgagagccaatccattgtcggcggccgaaaatcgccgggattcgcgaccctgcgccgcgaatcgggactggtgttccaggacccgttctcatcactcgacccgcgttggcaagtcgccaaatcggtggctgaaccgctgagtctgcagcgacgtgatctgaacaacaccgatatcgacgagcgggtggtcgcggctctgaccatggcgggtcttgaaccggcggacttcctgaaccggtacccaatcgacctgtctggtggccaggcgcagcgcgtggtcatcgcccgcgccatcatcaacgagcccaaggtaatcctcgccgacgaaccaatgagcgccatcgacgtggccgcgcgcatccagatcctcgacaccttcgccgctatccgtgaggcccggccgagcaccgccatcatcatggtctcccacgatctcggcgtggtgcagcatatcgccaaccgcatcctcgtgcttcacgacgggcgcgtcgaagagacgggtcccaccgccgaagtgctcggcaacccccaatccgattacacccgtcagctcatcgaggcagcctcgttatagatctttttggctcccctccctgaggggagctgtcgaatgcagtgaggctgaggggagttacgggtgccgtcgtactcccctcagtccgccggcgacacgcgcttgtcgcgggttgtgctatggtgtgaggcatgcagattatctcatgttgttgtcgctaaccgacgcccctgggcgagcggtcagtgacgcataacttgagatggagcattcgaatcgcggcgaatctgccgcatacttttcatgtatccgatggcacaagcgtaatcgtgtaatgcgcgagccgtggttaacatgaaaaactgattcacttttcggattcaccgtacagtgagcgggaatactcgattttcaaaccaaagccacagtccattcgtctgggaacgtcggttcacgaacgcaacgcagcaaacccccacaaccccagcaacgaaggacttcacatgaccatccacaacagcctcgcagaactcatcggcaacaccccgctcgtcaagctcaaccacatcccgcaggcggccggcgtcaaagccaccatcgccgtcaaagtcgaatacttcaaccccggcggctcctccaaggaccgcatcgccgagcgcatcatcgacgccgccgaacagtccggccagctgaagcccggcggcgtgatcgtcgagcccacctcgggcaacaccggcgtcggcctggccctggtcgcccagcagcgcggctaccgcacgattttcaccctgccggacaaggtttccgaatccaagcgcgcggtgctgcgcgcctacggtgccgaagtcatcgtcacaccgaccgacgccggcccggacgacccgcgctcctactaccaggtcgccgaacgactggccaacacgattcccggcggcttccgcccgaaccagtacgacaacccgaacggcccgctgagccactactacaccaccggccccgagatctgggaggctacggaccacaaggtcacgcacttcgtggccggcattggcaccggcggcaccatctccggcaccggcaagtacctcaaggaagcctccaacggcgcggtcaaggtcatcggctccgacccggaaggctccatctactccgcttcctcacgcgacgaagtccaccagtacgacatcgagggcgtgggggaggacttctaccccaaggctttcgaccggaacatcaccgacgacatcgtgcgcgtatccgacgccgaagcctttgaaatgacccgccgtctggccggcgaggaggcgttgctggtcggcggctcgtccggcatggccgtggccagcgccatcaagtacgcgctcgccaatgatttggacgagaaccagatcgtggtggtgctcgcccctgattccggccacagctatctggagaagatcttcaatgacgactggatgcgtgccaacggctacggcgacatcgtggaacgcaccagcaagccctccctcgccgagcagtaccttaacggaactccctctgatgagggagctgcggatggactccataactagctatcaaaagaatcaataccaacatccgcactaactaaccgcacctgttttaccttcgaatacggaacaatcccgaaaggaacccaatatcatgtccgctgaatacaacgccaagttcgccaacaccgacatcgccactcgcgccatccacgccggccaggagcccgacccgaccaccggtgcggtcgtcacgccgatcttcgccacctccactttcaagcaggatggcgtgttgggcctcaggggaggccacgactactctcgctccatcaaccccactcgcaccagcttcgacgagcagctcgccgccgtggaaggcggcaagtacgcgctgagcttctcctcgggcttggccgccatcgacgtgctgctgcgctccaccatcaagcccggcgacaacatcctgctcggcaacgatgtgtacggtggcacctaccgcctgctctccaaggtgttcgtgccgtggggtgtgggcctcgacgtggtggacatcaccgatctgaaagccgtggaaaccgcattggcctccaagcactaccagtatgtgtgggtcgagaccccgtccaacccgctgctcaacatcaccgacatcgcggccaccgccgaagttgcccacaagtacggcaccaaggtcgcggtcgacaacaccttcgcctcgcccgcccttcagcacccgctggccgatggcgccgatgtggtggtctactccaccaccaagtacatcggcggccactccgacgtggtcggcggtgccgtggtggtcaacgacgaggagacccgtgagaaggtcgccttcctgcagaacgccgccggcgcagtgccctccccgttcgactcctggctggacatccgcggcctgaagaccctggatctgcgcgtcaagcgccacagtgccaacgccctgaaggtggccgaatggctcgaatcccagccctctgatgtgattgagcgcgtctggtacccgggcctcgagtcccacccgggtcatgaaatcgccgcccgccagatgcacggcggcttcggcggcatcgtctccgtgcagctcgcggccggtgccgaggcggccaagcacttcgtggaccacacgcagatcttcacactggccgaatcgctcggcggtgtggaaagcctcatcgaggtgcccgccgccatgacccacgcctccgtggccggcaccaccctgcaggtgcccgccaatctggtgcgtatttcggtcggtatcgagaacgccgacgaccttatcgccgatctcaagcaggcgttggatcgtatctgaccgtactgacggtactggtgacaccgtattgacggtgccaccacgcttatcggcggactcgctatcgattggtacctacaaaaaatccccggcccacaagggtcggggattttccgttatcgattaaacatggatcgaatcagctggcgttgccgccctgccatccggtggcatccgcaccagccgggcgcaacgcctgaccggaagtcggtgtggtgccatcaacgaccacacgagtgccgatggtggcaaagtcgtacatccacttggcgtcggccacctgcatgttgatgcagccgtgcgagcctgggataccctgctgcacatagatggggtgctcgccccacatgtatgcaggaacaccgtgcagggcctcgccgccgttatagtaggaaatccacggcgtgcctggctggttgtagccttcgccaaccatggtctgcgattcgtacttgagatacacgtagaacgtgccggtatcggacagcatggaaccatcggcggtgggcttgccagaagcgatgttgaacttcttgaccaccgtggtgccctgatatgcagtggcagtctggttcgtcagatcaacatgaacccacttatcgccatttgccgtatcgaagttatgaggcacctcgacctgcttgacatcatatgggctgtctttcacagccacagtggaatcagtggactggttctgctcgatggcggtagccagacgttcgggggcgtccccggcaccagtcacttcaataccatccacaccgagtgtcttatcggcaccaatttccacgccgccttcgtctttcggcgtgatgtagacctcgcgtgtcaccttgggaacagtcagttccttggttacgctgtcactggtgacgtacttggtgatggcatcgcggtcgactaccagactcatggtgccacccgccttattcaccgtgggcttgaggaatgaggcaatggtatcggccgggatggtgacgctcttgttcacgccgttgtccacggtcagtttgaggccaagcttggcattggcgtcaaactgtgtttgctgtgcgctcgcgtcatcaatcggattctttgcagtctgtagcttgaccggcaccgtcgcattttcgcccggggtcgcgacggcctccttgactgcagcattgacaacattgatatccgggcccttgccatcctgacccgcggtgtaatcgaactgcttggtgctcttgttgtagacaacggtggcaatctgcgctcggtcggcctcatcgaccaggccggcggtgacgaattgttcggcagtctctttgtccctggtggcggtcagagcgatatgcggctgatcgaaaatattgagcttggccacgtcgccggtcttcgcgttcaacagcgcatctacggttttatccgtgtcgacggtgacgccaaggtccttcagcgaggctttgacgctgttgccttcggcggtgaacgtcactgtggtgttattcagctgctgcttcacagtattcgcaagttcttcgcgggtctggcccatgacagagacattgcccaaatgaacaccgggcgcagccttgtcttggaagtaccaacgtccgacgaagaaataggctattaatgcggcaagcaacactgcaaatatggttatgatggcaatccgtgcggccttgccatgtgatttagcggtggtagatgccataacatgttcacccacataggctgtattgtcggcatggttattggtgccattgtcgctttgctgtggcgtggcggtacctgtggccgcggctgcgaacagcccatcggcggccacaggctgcagcaccgccgtctcctgatcgtcaggagaggagaaggaaaatgtattgttggccataaaatgccccgtcttagttctctcaaagcggcatatcgtgtgatatgccgggaatagcgttcctcgacgcataataatacggaagggctacgtacatcggtacgaggtattccgttatacgatgaaatccatccgcggtcggcctacactggtcgtttatgacagcacatcaggcggcgctggaggcgctcacacgatacttcggctatgactcgtttaggcccggacagcaaggaattgtcgaggctttgcttgccggacgcgatgtcttgggcgtgatgcccaccggcgcaggcaagtccgtgtgctaccagattcccgccgcgctcagcgcgggtgcgactttggtcatatctcccttgatttccctgatgcgcgaccaggtcgatgcgctgaacgacctcggtctgccggccgcgttcatcaacaccactcaaactcccgacgagcaggcgatggtgttcgcccaagccgccgccgggcagatcaaactgctgtacgtggccccggaacgcttggaaaccgggcgattccgcgactttgccgcccgtacgccgatctcgctgatcgccgtggacgaagcccactgcgtctcccagtggggtcaggacttccgctcgtcgtacttaggtatcggcgatttcatcgccgggctgccgcagcgtccaccggtgggtgcgttcaccgccaccgccaccgaacgggtgcgtcgggacatcgtgggactgctgggattgcggaatccggccgtcaccgtcaccggattcgaccggccgaacctgtattttgatgtggtcaaactggagaccaaatacaaggccgcatgggtggcgcggtatgtggccgaccatccggacgaatccggcatcgtctactgcgccacccgcaagaccaccgaagcgctcgccgacacgctgaaccagatggggcatccggccgtcgcctaccatggcggcatgtcgccggacgcgcgtgaggtggcccagcgcgacttcatcaccgacaaggtgccggtggtcgtagccaccaacgccttcggcatgggcatcgataagtccaacgtgcgttacgtcatccaccacaatctgcccgaatccattgaagcctactatcaggaggccggccgcgcgggccgtgacggcgagcccagccgatgcacgctgctgtggaatgagtcagacatcgtcacccggcgtcggttgctggataacgattatgagaacgagcgattgactcccgaagagcaggagatcgttcgccagtccaagcgccggctgctggacggtatggtcggctactgccgcaccaccgactgcctgcaccggtatatgacccggtatttcggtcaggaattgtcgccgaatgctggttccgcggcgggtgaagacattgcggcggactcttcgcagtccggcagatgcggtgcctgctcgaactgcgaaagcacgttcgagaccatcgacgtgacccgcgtggcgcaggcgatcagccgttgcgtgcatgacgtggggcagcgcgtcggttccggcaagatcgtcaagatcctgcgcggttcgcgggcacaggatctggcatggctgaacccggagcggatgcccaccttcggcatgctcaaggacgtgaacgaggctcgcgttcgcgacgtgttgagccagatggccacggacgggtacctgtcaatcgccgaagggcgtatgccaatcgtcatgttcggtgcgcgggcggccgaaaccgccgctcccgacttccactatgagatcaaacgggtggaacgcaagtcggcggcggccggttccggtcggagcgggggagtggctgatactgccgattccgccaatgttcccggcgatgcgctgggctcgtatatcccggacgatgacgaggaatcgctgttccagaagctacgcgaactgcgacgcaccatcgcccaggaaatcggcaagccgccgtacatcgtgttctccgacaagaccttgcgcgacatggcccgcatcaagccggttaccaacgcgcaatttctggcggtcaacggcgtcggtcaacacaagctcgacctctacggccagcgcttcatgcaaaccatcgcctcgttcaatgccgggagtgcgtcataacaatctcctatagcgaaccgcggagtatttgcgggcgttcttgggctggcgcgactacgatgactgttcgatacttcatgaccgaacactcagcaagtagaaaggcaacagcatggcagaagacaaggccgaaaagcccgtcgtcgaatcattccagcttgatcacaccaaggtcaaggcgccgtacgtgcgttacatcgacaccgaaacgggccctcacggcgacgtgatctccaattacgatctgcgcctgacccagccgaacgagcaggccatccccaccggcggcctgcacaccatcgaacacaccatcgccgtgctgctgcgtgaacgcattcccggctacatcgactgctcgccgttcggctgccgcaccggcttccacctgctgacctggggcacccactccaccgaggatgtggccaaggcgttgaaggaatcgttggagttcatcgcatacaaggccacatgggatgacgtgcccgccaccaccgagaagagctgcggcaactatcgcgaccacagcctgttcgccgccaaggaatgggccaagcagatccttgaggaaggcatcagctccgacccgttcgagcgcaaggtcgtctgattcgtctgattcgattcaattctgattcggctcccgctggcgggagccgggggcgaagccgactgagggtggctgtcctcaactcggctggactgtccggctcctgcggacgggagtcattgtttattagtgtccgtcatgcaacgcggacgggatttcttgtgcctacggcatggtaggttggccgtcagttagtcgccggtcaccgtgccggcaacccggcatgtcggagaggtgagaagtgactcagtcgaacgctgcaaacaaggcgacaggccgccgtttccgccacgccaccatgcgcgatctgccgcagatgcagaaaatctacgcacgcgcacgcgcgttgatggccgccaacggcaaccccacccagtggggcaacgaatttccgcgtgaatcggtgattgaagacgacatcgccaaccagcgtacgatgctgctggtcgacacctgcaatggccacgaacgcattctggcccagttcgccctgtgcccgggcaaggatccgacctacgccaaaatcgacggcgcctggctggacaacgacacctatgtgaccatccaccgcatcgccgcatccggtctggtgcgccacgcggcccgcgactgcatcaggtgggccctgaagcactacggcaacgtgcgcgccgacacccaccccaataacaaggccatgcagcacgtgctcgaaagctccggcttcgcccgttgcggcctgatccagctgctcgaccggccggtcgacaccaccagaatcgcctatcagcgccacgagtggtgagtgtggctgtcgccaccgtgttcggttccgcggtggagctggtcaggtaaggtccacgtcgtcgcgcacgtacggtccgtcggccgcccgtccaaactcgtgcatatcgcaaaaaccgtacgctgaaagtaactcagcgtacggttttcacgaaagcagccatcgactatcggtcagccgatagacctcagtcctcagtcgcagcgaccttggtgtcagccccggccttctgctcaaggccgagcttggagcgcttgcggctgtagccgaagtacacgatcaggcccagaccgaaccagatggcgaa

SEQ ID NO: 1926 - DNA, 4688 bp, Unknown
  R17_18m  MAG No. k141_2954
cggcttccgggtcaacctcgaggtctattccggtccgttcgatgccttgctcggcatgatcgccaacaacaaactcgagctgaccgaagtttccctctcctcgatcaccgaggaattcctgacatacgtgcgcgggctcgacttcacgaaaaacatggatgaggccagcgcctttctcgacatcgcctctattctggtcgaggccaaaagcgtggcgattctgcccggcggcgaagacagccagcacgacgagcaaagccttgaagcactgcgcgaacgcgatttgctgttcgcccgactcctccaataccgcgcctacaagcaggccgccggtgatttccgggcgcgtatcgccgccaatgccggccgattcccgcatccggcggccatggacgagggcattgccgccatgttgcctgagctggtatggacgctgaccccgctcgaactcgcccaactggccgcccaggtcatcgccaacgcgcccgcctccgaagtatcgatccaccagctgcacgtgccgctggtcgatctgcgggcccaatcgctggtggtgcgcgaccggctgatcgcagcactggaatccaagggcgaccagtcgatgtcgttcagcgaattgacccgggactgcacttctcgtattgaggtggtggctcggttcatggccgtgctcgtgttcttcaaacaaggtgtgctgcagtatcagcaagatggtccgtttgccgaactgcacctgaggtgggtatccggcgtagacgaaacgatgaacgacgtgaacatttccgaaggcgattttgcgtaaggacggcgactggtgactgaacggattgacgcaacgaatgcaaccgagcacatggcggatgccgaatcgacggctgaatccgcaaaagccgaggtgaggggagtggaggagacgcgccccgaatacgtggatttcacggtagacgattttcccggcgggctgcccgcatgtctggaagcgattctgatggtcgccgaccagccgcagaccgccaccgagctggcccgcattttggcattggaccgcaacacagtcgaagaggcattgcaagccctgcacgatgactatgagggcgatgaatcccgtggcatccgcccgcgcggcttcgaactacgccgcaccgctcgtggctggcagttcgccagtcgcgccgcgttcgagccggtcgtctcatcattcgtcaccgacggccagactgcgagactcagtcaggccgcactggaggcgcttgccatcgtggcctatcgccagcccgtcacccgagcccaagtggccgcgatccgcggtgtcaactccgatggcgtgattcgctcgctcacggtacgcggccttatcaaggaagacggcgtggaccccgaatcccgcgcggcccttttggtcacctccgaatccttcctcgaccaaatgggcctgaagagtctcgacgaactaccctccctagcgccgttcctcccgtccgtcgccgaaatgacacagtcgaaatcgggggatacggacgtgatttcgtagcgattggggcccgctacctgaccaatattcgtgcgctagaccatccaatatgtgatttatggtcattgtgactataagtagtgctatgctctcaatgcggggagaacaaccggtatggaaagaggcatggcatgggattcggcaatgtgtccgagcgccgcagcgcaccgccacaggtcggcgtgtcagtggtgattctggcactcggcccgaaaggcgataccggcaacagtgccgccgattccggcaacgccgcgaactcggcccattcccgtctctggctgcccctggtcaagcgcgtccgtcagccgttcctgggctgctgggcgttgcccggcggcgacctgcgctccgatcggtcgttggaacagtccgcctacgcggccctcgaatcgaccacagacctgcacccgcgatacctcgaacagctgtacacctttggaggcccgacccggtcccatggcggattgcccatggtatccgtcgtgtactgggcgctcgtcggccagaccgaggccgcgggcttcgaggacggtgacaacgtacgatggttccccgaagacgaactgcccgagctggcgttcgaccatcgccagatcatcgactacgcgctgctccgcctgcgctccaaaatcgaatactccgacgtggccacccgactgctcggccccacgttcaccctgcgccaactgcacggcgtctatgaggcgattggcggcgaaaccctcgacttggcgaacttccgccgcaaaatgcttgcctcgggagatcttgaagacaccggggagaaggtgcgcgaaggccgccaacgaccggccaccgtctaccgctacatccccaaacgacctgtcgagaatggcatgccccacgaatccgatggcgacgacatcgtggaactgtccagacaaggcgagcgtgaagacgctctcgacgcgctgatcccatccgcgcgcatctgatttttcccgccgacccgcttcgggccggcatcacagacgtatatagggaaaggaaccactatgaccgcactattcactgcgccgtccgttgacgagatcatcgccaagctgggcgcgcaaagcacctgcgatgcaggactgacccaggacccatggcacttcgacaccaccacacccagctacggtcccggtgcctcgatgctcgaccgtctgcccgccaacgcgccgcgccagcaggtgctgccggacgagtaccgcaaggcctccgacgaggaactgcagcagcgcatctccgacgccaagcagcgtctcggctccaaactgttgattctgggccacttctaccagcgtgacgagatcatcaagcacgccgatttcgtgggcgactccttccagctggccaagaacgccaccgaacgcccggacgccgaccacatcgtgttctgcggcgtacacttcatggccgaaaccgccgacatcctctccacgcccgaacagagcgtgaccctgcccaacctgtccgccggctgctcgatggccgatatggccaacatcgaccaggtccaggaatgctgggaccagctcggcgagatctgcggcacccagccggactccgatggcttgcagcagatcatcccggtcacctacatgaactcatccgccgcgctgaaggcgttctgcggacgcaacggcggcatcgtatgcacctcgtccaatgcgcacgccgtgctggaatgggcgttcgcccgcggcaagcgcgtgctgttcttcccggaccagcatctgggccgcaataccgcccgcgcgatgggcattccgctgagcgagatgtcgctgtgggacccgttcaaggcacagggcggcgccgccgatccggccgattacgcccgcgccaagatgattctgtggaagggcttctgctccgtgcaccagcgtttcaccgtcgaacaggtcgaacgtgcccgtaaggcatacccgggcgtcaaggtgatcgtgcaccccgagtgctcgatgcaggtggtcgacgccgccgacggtactggctccaccgcgtacatcgtcaaggagatcgccaacgcacccgccggatccgccattgccgtgggcaccgaaatcaacctggtgaaccgtctggccgcgcagtacccggacaagaccgtgttctgcctggacccggtggtctgcccgtgctccacgatgtaccgcatccacccggcttacctggcttgggctttggagaacctcgaagccggcaacgtggtcaatcgcatcaccgtggacgaagacaccgcccgcgaagccaaggtggcactggagcgcatgctgcgcgttcacccgtgacatgcttctagctcccctccctgaggggagctgtcaccgtaggtgactgagggggagcagatgacgcaaaaacagaggaaagcaacacaatgagcaacactgaaatcgtcgtcgtgggcgcaggtgtcgccggactgtccgcggcactggccgtggccggcaccggacacgacgtgaccttggtaaccaaggccggactggtggaatcgaacacctatcatgcgcagggcggcatcgccgcggccattttctccgacgacgacccgaagctgcacgccgccgacaccatggccgcgggccacggcctgtgcgacccgaaggccgtggacatcctcacccgtgagggtgcggagcgcgtccgcgagttcgccgcggccggcgtccacttcgaccgcgacgcgcagggacgcatgctgcgcggcctggaagcggctcattcgcgcgcccgcgtggtgcatgccgggggagacgccaccggcaaagtgctcgaactggacgtctccgccatggtgcgcaagaacccgcgcatccacatcatcgagaacgcattcctcaaagatctcatcgtgcgggacggccacatcgccggcgtccgcctgctgatcgacgggcaggacaaggatctggccgccgaccgggtgatcttggccgccggtggagcaggccgtatgtacccatacaccaccaatccgccggtcgccaccgcggacggcctcgccgccgcatggcgtgcgggcgcccaggtcgccgatctggagttctaccagttccatcccaccgccatggccgtgggcgagcacttcctcgtctccgaagccgtgcgcggcgaaggcgcggtgctgctggacgaacacggc

SEQ ID NO: 1927 - DNA, 4752 bp, Unknown
  R17_18m  MAG No. k141_3606
acaacgtgctgcgcgacgcgaacatctccgtcggccagatcgaccacgtggtgctcgtcggcggttccacccgtatgcccgccgtcaaggatctggtcaaggagcttaccggtggtaaggaagcgaaccagtccgtgaacccggatgaggtcgtggcggtcggcgccgccgtgcagtccggcgtcatcaagggcgaccgcaaggacgttctgcttatcgacgtgaccccgctgtccctcggtatcgagaccaagggtggcatcatgaccaagctcatcgatcgcaacacggccatcccgaccaagcgttccgaggtcttctccaccgctgaagacaaccagccgtccgtgctgattcaggtctaccagggtgaacgtgagttcgctcgcgacaacaagccgctgggcaccttcgagctgaccggcatcgctccggctccgcgtggcgtcccgcagatcgaggtcaccttcgacatcgacgccaacggcatcgtgcacgtgtccgccaaggacaagggcaccggcaaggagcagtccatgaccatcaccggtggttccggcctgccgaaggacgagatcgaccgcatggtcaaggaggccgaggcgcacgaggctgaggacaagcagcgcaaggaggacgccgagacccgcaaccaggccgaggccttcgcctactccaccgagaagctcgtcaacgacaacaaggacaagctctccgacgacatcgtcaaggaggtcaccgacaaggtcaacgccctgaaggaggccctgaagggtgacgacaccgagaaggtcaagaccgctcagaccgagctgatgaccgccgcccagaagatcggccaggtcctctacgcccagcagggcaccgagggtgccgcggctggtgccggtgcggctggcgctgccggcgctggcgcttccgctggctccgcctccggttccgacgacgacaccgtcgaggccgaggtcgtggacgacgatgacgacaaggacaacaagtgatgtccgagttcaacaaggacgactacctgaacgacctgccggatccctcagatgctgaggctgccggccaggccgctcaggcctcttcaggggctgacgcctccgccgagtccgactctgcgcaggattcggctgcccaggctccttccaatgaaggagccgacgcggctcctgccgcagctgagggagagaagtcggatgccggagagaagactggcgaaggccagtccgattccgaagacaccctcacccccctcggcaaggccaagaaggaagccgcagactacctcgaagccctgcaacgcgaacgtgcggagttcatcaactaccgcaatcgcacgcagaaggagcaggagcgcttccgccagcacggcatcatcgacgtgctgaccgcgctgctgcccgccctcgacgacatcgaccgcattcgcgaacacagcgagatggacgactcgttcaaggccgttgccgccaagatcgacaaggctttcgagaagttcggcgtcgagaagttcggcgaaaagggcgaggacttcgaccccaccaagcatgaggcaatcctgcacaagccggatgccgatgccgacaaggaaaccgtcgacaccgtggtggaagccggctaccgtatcggcgaccgcgtaatccgcgccgcccgagtagtagtagcctccccgcaaaactgataacggccagctcgttaacgagctgacattaccttggctcccgctggcgggagctggcagccgaaggctgactgagggtggtcaaacactgaatataaaccaccctcagtttcgcttcgttcgacagctcccgatgttttatgcgacgtgcgcaattgcgcactgctatgaacagcccactgggctgttcatccagcgggagccaaccataaagactcttcaagaaaggagacatgaatggctgaaaacgaatggctcagtaaagacttctacaaagtccttggtgtctccaaggacgcttcggacgacgacatcaaaaaggcgtaccgcaagctcgcccgcaagtaccaccctgacgtcaacaagaccaaggaagccgaggagaagttcaaggacatctccgaagcctacgacgtgctgagcaagaaggaagatcgccaaaagtacgacgcgattcgccagttcggcatgggcggcgcccgcttcgcaggcggttccggtgccggcggcttcgacgcttccggtttctctgatatcttcggctccatgtttggccagggtgccggtggcaacggttcgcgtatccgcttctccacttcgggcggcggccccaacaacatcaacgacatcttctcgatgttcggcggtgctgcaggtcagggcggccagtcgtatggcggctacggccaatcgccgtacggcaatgccggcggctatggctatgaggaggccccgcgccccgaaaacggtgaggaccgcaactccaagatcagcctgaccctgcgtcaggcggtcaagggcgctaccgtgtccctgtccgtggacggcaagaagttcaaggcccacgtgcctgcgggcgtcaaggacggccagaaaatcaagcttgccggcaagggcaagccgggcatcaacggcggcaaggccggcgatttgtacctgcacgtcaccgtcaagcccgatgccgcgttctcgatgcgcggccacgacatcgtcatggacctgcccgtaactgtgggccaggccgtggccggtggcaaggtcgaggccaaggatatcgacggcaatcccgtcaccttcaaggtgccggcaggctccagctccggtgccgaggtcaagctcgcgggacttggcgtccagcgcggcaaccagccgggcgacctgatcggccgcgtgcagatcatggtccccgccaagccgggtctggccgtcaagcacgccgccaaagaattcgacgaaaaagccggcgactatctcagcctgtaatcaggaggtgaacaatggcgcggttagccaaccaaatgaagcagttgtacgcgatgtgcgcaaccgcgctggtgatgggcagggccgatctcgacggagccgatgacgtcggcttcgacatcgaactgcccatcttcaccgtcggccaggcagccgaactgggcaacatccacccccagaccctccgccagtacgaccggctgggtctggtccgtccgcagcgcaccgatggcggcgcacgccgctactgcctgcgcgacatcgcccgcctgactcgagctcagcgcctaagtcaggatgagggcatcaatctttccggcatcgcacgcattttggccctcgaagaagagaatcgccaactgcgccgcgaagtcaaacgcatgcaaaccggcgaccaggagagcgttttcgccgcaggccgtgacggcaatatcgtggaggtacaacgctccaaccgcgcccgcctttggcgcaacgccatccgccgcgaaacccgcgaactgcccggccgcgataccgctgccgacaccacgcgcgaatccgactccacccccgccgattccaaatccatggtcctgtggggttggtgatttgctgttcggctgtcgtgcggagttggtgagataggtatatcgaatacgaatagttgaggattcactgcgacgtacggaggtaaccatgctgctcaaggccgtgttttgggatttggacggaacgcttatcgattcggagccgctttggcatgacggtgaaatcgagattgcgcacaacaatggcggcgagtggaacgaggacctcggttgggagtgctccggcactccggtgccacacgtggcagaggtcatgattgcgcatggctgcacattgagcgttcccgaaatcgacaaacagctcaaggattatgtgttcaaggcggaggtcgaacgtctgccgtggattcccggcgtattggacgtgctgcactcgctcaaggaggccggcattccgtccatgctggtcaccacgtcgccgcgccgtatggcggagaacatcatgaagcagtccgagggactgttcgccggctacgtctgtggcgacgatccgtacgaacacaagccgaaccctgcgccctatctggccgcagccgacaagcttggcatcgcccgtgaagacatggccaagtgcgtggtgctcgaggattcctcggttggacttcaggccggtgcggcatcgggcgcgactctgatcgcgcagactggctggattcgcacggatacttccggcctgggccagttcgcgtccatcgaatcgtatgacggtatcgatgcggccgcgctggacggtttcgtgcgccagcgtcttggtgagtaattgattacatcaccgcgcatgcagttctcctcatgagcggtggaatgtgttgacgatataccagcgaagcacgccatatttgtaaagaagatggcagtaatggctgctatgaggttccggtggccccctcttgtatcggggcgactggtagagtggttgacggttttcagacgaatgtctggttattggacagattgttcacacatatagacgtataggactcataggaatcacatgggcttcgttaatttcatcctcgaactgctgaaggatccgcgtgccgcgattgccggttggattgccatgggcgtggtgccgaccctcggcttcatcttcctcatcgtatttatcgaaacgggtgtggtgttcttcccattcctgccgggcgactccctgctgttcgccgccggtgtgttcgccgctcccgatgccgcgaccggcaaggccgcgctgcc

SEQ ID NO: 1928 - DNA, 40084 bp, Unknown
  R17_18m  MAG No. k141_3936
cattcttgcggcgcaatcctgttgcgtcgcaagacctgcccattgccgagcagcgtgttcagtcgaaaccgccgggacgtttttctcgacgggggagagacgctgccgttgtcgaagatcccaatgatttggacgcttgccgcgaggctgcattgcgtttgctggacgcggccccacgtgcatccggcgcgttgcgcgaacgattgctcagcaaaggctatggcgaggcgattgtggacgaggtcatcgaacggctgattcgcgtgcaactgattgacgaccgcgcttatgccgaatcggccgtacgctattgtgccggtcgcatgatgggtcgtcgtggtgcggtcctggaacttgctcgcaaaggcgtggaccgcaaactggctgaacaggtgtgtggcgaagctgagcaaaatggcatctttgaagatgccgcatgggaattgggccgccaaatagcccgcaaaacccatggcctcgatcgtcaggtccgtcagcgtcggttttggtccgcaggcggccgcaaaggacacagccccgaaaccctccgccgagtcgccgccgaattgttggtgtagccaagaaaaaaatgagacctcttataccccgggttctgtcgtgccgtgcgcgaacgcacggcacggatggccatccatctcgacctgacgttgccgccaggctctagcagcctacccgatgacacgggcgagcagcccttaccgccatctgcttggccttgctcccgatgaggcttgccatgcgacctactgttaccagaggcccggtggtctcttacaccgccgtttcacccttacccgtcgaggacgggcggtctgttctctgttgcgctatctctcaggtcaccctgggcggacgttatccgccatcgtgctctatggagcccggaagttcctcagccgatcccaatgaagatcacggccgcggccatcaagaggtctcaagcctgcaattatacataaggtgcggaaaaggcggcatcccgccctgcggtgaggccatgacgttgcccagttatcctgttttctccatagttgggcatagttgggcgattcgtgaacgacgcgccgaatatcggatggggcgtgtcgggcgtgttgtggcgtgtcgtatggagacgaatcaaatctgtaagagcttggtatgtgcgagaaagagcaagaaaacgttgcctatccattgcagtatttgccatgacgaacaaacgagccagcctgataaaccggtatcaaatcttcttataggagactgctgccaaaaccccagtatatacatcgtttcattgcagagaaaagcccgggaataaacatatattctctgggcgagtttccggccgttcacccattgttcgtctacaatgaaacatacccggtcggtgatgatgccgttcggaacacatatagcgggttacaccgcttgagttagaggaggtcaacatggaaatcgtcgttaccggacgccacacgcaggtcaagcaaaggttccgtgatgtggtcgagaccaagatgaatcgtgtgaccgctatcgccccggatgctcagcgcgcgcagattgtgctgacccatgagggcaacccgcgtcaggccgataccgccaagcgcgtggaaatcaccgttatcgccggacgtaccgtggtgcgtgcggaggcttccagcaccgatgaattcagcgcgctggacatggcgctggataagttgacgctgcgtctgcgtcgtactcgtgaccgtcgcaaggatcaccgtcgtggttacgcaaacccggtcccggtggatctgggtgttatcgccccggagcccgagccggaggtgtcggaggaagagccgaacaacagcccgcaggctgcggtcgcctccgatcttggccctggcgaatccgtggaggtccaggttggggatacgccgattgtcatccgtcgcaagttgcacatcgccgagcctatgagcatcgacgaggcgctgtacgagatggaactgatcggacacgatttcttcctgttcgtgaacaaggagaccggacgcccgtccgtcgtctatcaccgtcacggttggagctacggcgtgttcgaaatcgacactccggagaatgtcaagaaagcctgagggtaagggctgctgacatgatcagctgataccgcatggaccgcttccaatatggaagcggtccattttttcgtaaaaaggtcgaaaaattcgattgctgacggtgcgaggcgctattctggtacgcggacaccaccacttatcagtcaagggagaacccagtggtcgatattgttgacaaagccctgcgaatgggtgaaggccaccagctcaagaagctggagaacgtggccaaggccgtgaacgccctggaggacgagatttccgccctctccgacgaggacctgaaggcccaaaccccgaagttcaagcaggaaatcgaaaacggcaagagtctggacgagatcatgcccgaggcgttcgccaccgtgcgcgaggtctccaagcgcaccctcggccagcgtcacttcgacgtgcagctcatgggcggtgccgccctgcactggggcaacatcgccgaaatgaagaccggtgaaggcaagaccctggtcgccaccctgcctacctacctgaacgctctcgaaggcaagggcgtgcacgtggtcaccgtcaacgactacctcgccagctaccagagcgagctgatgggccgtatctaccgcttcctcggcatgaacgtcggctgcatcatcaccgagcagaagccgccggagcgccgcaagcagtacaacgccgacatcacctacggcaccaacaacgagttcggcttcgactacctgcgtgacaacatggcctgggagaaggccgacctcgtgcaacgcggccaccactacgccatcgtcgatgaggtcgactccatcctcatcgatgaggcccgtaccccgcttatcatctccggcccggccgaaggcgacgtgacccgctggtaccgtcagttcgccaagctggtgctgaagctcacccgcgacgaggactacgacgtcgacgagaagaagaaggtcgtcggcatcctcgacccgggcatcaccaaggtcgaggacttcctcggcatcgacaacctgtacgagccggccaacaccgccctgatcggctacctcaacaacgccatcaaggccaaggaactgttcctgcgtgacaaggactacgtcgtcacccaaggcgaggtgctcatcgtcgacgagcacaccggccgtatcctgccgggccgccggtacaacgagggtctgcaccaggccatcgaagccaaggaaggcgtggaggtcaaggccgagaaccagaccttcgccaccatcaccttgcaaaactacttccgtatgtacgacaagctcgcgggcatgaccggtacggccgaaaccgaagccgccgaattcatgaacacctacaagctgggcgtgctgccgatcaagaccaacaagccgatgatccgcaaggaccaggacgacctcatctaccgcaccaagaaggagaagctggccgccatcgtcaaggacgtggccaagcgacacgccgagggccagccggtgctgctcggcaccgcctccgtggaaagctccgaagtggtctccgccctgctcgacgtggcgaagatcccgcaccaggtcctgaacgccaagcagcacgagaaggaagccgccgtggtcgccgtcgccggccgcaagggcgccgtcaccgtggccaccaacatggccggccgtggtaccgacatcatgctcggcggcaacgtcgagttccttgccgacgccaaactgaagtccgaaggttactctccggaggacaccccggaagagtatgagaagcgttggccgggcaccctgaacgagatcaaggcccaggtcaaggacgagcatgaggaggtcaaggagctgggcggcctgtatgtgctcggcaccgaacgccacgagtcccgtcgaatcgacaaccagttgcgcggtcgttccggccgccagggcgatccgggcgagtcccgcttctatctgtcgctggaagacgatctgatgcgtctgttcaacacccagctggtggcccaggtcatggccaagggcatggaggaaggccagccgatcgaggccaagtccgtcaccaagggcgtgcgcaccgcgcagaaggccgtcgaatcccgtaactatgagattcgcaagaacgtgttgaagtacgatgacgtgatgaacaagcagcgcaccgtcatctactccgagcgtcaggccgtgctcaagggcgaagacatccacaaggacatcctgcgtttcatttccgacaccgtcgagtcctacatcaagggtgccaacaagggatccgagaaaccgaaggactgggattgggagggcctgttcaaggcgctcaacaccgtgatccccaccaaggtcgacgaagacgaggtcaggaagatcgtcggcggcctcaagggtgcgaaggccgtcgaggccgtgcgcgacctgatcgtcgaggacgccaggcagcagtacggcgaaatggaggagaccatcggcgagaccggcttgcgcgatctcgaacgccgcgtggtgctcgccgtgctcgaccgcaagtggcgcgagcacctttacgagatggattacctcaaggacggcatcggcctgcgtggcatgggccagcgcgacccgctggtcgaataccagcgcgaaggctaccagatgtacaactccatgatcgaggccattaaggaggagaccgtccagctgctgttccacatcgacatcaagcaggtcgccaccaccgacgaggccgttgacgaggtcgaggagaccgccgaaagcgccgacaccatcgccgtggcctccggccccgacgagaacggcgaatccgtggtcgaggccgccgagggcgaagtcgaggaagaggacgaggatacggacgccaagcaggcgatcgccgaatccgcagccgtctccggggccggcgagtccacgctgcctgttgccggaccggctccgatcagccacgccgaaggcaaggtcccggtttccaagcgtccgaagagcgaagagctcaagacgccgtgggccgacggccgcaccttccctggcaccggcaagaacgccccgtgcccgtgcggttccggccgcaagtacaagatgtgccacggccagaacgagaagtgacgcatcgctagttagtaactagctcatggctccccacacggggagccattttttgtgcggttcatcagcatgtattcgtgcggtgccgtacgcgcgggacggcacgcgattttcgcggattttgacgtcgtatcccacactgttgcgggatggcacgagtgtcaatcgattgactagcgtggcgtcccgcagtacgaattacggaatcgttgaaattccgccattctcggtgttatggtgtcacggtccacaaagggtgatgtgggacggcacggctaaaacggcgaaaatgagctgccgtcccgcagttttacgggatagcacaaaaaagaggcttctgctgttttcgtgggttgggttcttggttgtggtgggcgtatgtcgagtccgccgcggcggagcataacaagcgcgatgggattgttcgcgtggtggaagccgtaggccatgcggatggtgaccttgatcctgttgtcggacgcctcgagcctggcgtttgaacagcccaattcgattgtcttgaggatgtcgggcccaggacggcggatcttccgggcgagttcgacgatctcggggatgcggctgtgggacgcccggagcacccggtggtccagttcggcccgggcctggtcggccggtcgtttgggcagcgtccggaggggttccctgagccgtcatgaacggtagggccggaccttggggtccgtgtcccgcaggttcccggacgcctcggaccgtctgtcggtcagcttgccggggttcttcaggacggtgtatctgacgccgcgcatgcgcttgacggatttctcgtccccgtcgcggcgcgcctggttccacgggtgtctcctgacttctttgtcgggcgcgtcgctcgtccaactgacgatgtggaacccgtcgggcgcgcgttcggcgttcgggcaccactcatgcacgcatgagtcgatccacctggccccgtccccggcggcgaccctgatggaggcgtgctgttcgggcgtcaacgtttggaagaacaggccgaacacgtccctgccgtacccgtcgtgcgcccatatcgcccgatgccgttcgtggtcgacgaccgcggtgatgcacgtgtggcctttgcggtagccggtctcgtccacgccgatcgacgtgaggccgccgaacgaagacggcatcgacgccttcaaccgttcggcggccctatgggcggcgtcttccggcggtgcgccacgcgacgtgcgggaaaccgcttacggtcttctggttcgcgacgctcatcggccacgcgcgttccgattcgaaatcgcgtgtgaaccggctgcccggctcggcccacggcacggaagcgaccacgacgccgcacgccgccgtcctggtcatgcccgcggcgcctccttccgcatcgggagcatcggagcatgcccgcacgtggacgcacccggatctcgagcacgggttcggaacgcggcggcgaatccgtgatccgcgcatcctctgcaaccgtgcctttgacgttcggcaatccggtgaatgggcttttgcccagcgttcttcgtgattcatttctttggtcggaaaacagaatacgcgggaacgcccctcacgcttacgaaaccaacggctcgacgacgaaccgacatccacgaaaacagcaatagcgccatattttgcaatatggaagattcagggccttgaaatgacgaaccattacaatgagcggcgaacatacatcacacggcgtaggaaacgccaaggagggcatcatggccgagatcacatggaagtcgattctcaccaagctggtcgggggagaccaccttactgctgaggaatcggagtggttcgtggacgacctgatgcaaggtaacgccaatccggccgccgtgggtgccgcgctcgctatgcagcagcagctgggactgaccgccgacgaggtgcgtggtgccgccaaggccatggtctcccacgccgtgccgctgaacgtttccggtgggaccaccgacatcgtgggcaccggtggtgacggcttcgccaccgtgaacctgtccaccatgggctccgtggccgccgctgcagccggcgtgaagatcgtcaagcacggcaaccgcgctgcatcctcgaagtgcggtgccgccgatgtgctcgaagacctcggcctgccgctggatttgaagccggaggccgtcggcgaagtgggcgacgaggtgggcatcaccttcgcgttcgcccgcaccttccacccggccatgcgcttcgtgggcccgattcgtgccgcgctcggcattccgtgcgtcttcaacatcctgggaccgttgaccaaccccgccaacccggcacacgtggccatcggctgcgccaaccgcaaggtgagcccgatcatggctgccgtctacgccagccgtggtcagtccggcttggtctacacttcgcatgagggcatggatgagctcgcccccaccggcccggtttccgtctgggagattcgcgacggcaaggtcaccgaaaccgagttcgacccgaccgtggatctgggtctcgccaagattaccgtcgaccagctcaagggcggcgtgccggacgtcaacgccaacgcatttaaggacttcctggccggcaaggacattacgtcccgcaccaccgcgctgctcaacgctgcctccgccatcgtggctgacggcaatctggtcggcaacggcacactggccgagcgcttcgccgaggcctacaagctggccgaggatgctgtcgactccggcaaggctgaagccctgttcaacaagtggatcgaaaccgccaagtccaaggcgtgatatggaatgggtttgctcgaatatgtttacctttccttcattatcaactatttcgagttgcaggagtccatcgacttcaattcgtgacctatcttggctcggccgcaattacggacgagctacgcctgcgatacattggttcgctatcgctcacacctcgcctacaaacagcccactgggctgtttgcttaacggctcggcctcagagaggggagccaaggactacacaacctacgcgaactacaccctcgcgccgtcgtcgtaatagccaccctgatcaccggggcggtctttgcggttgaggattttggccaccaatccgcccagacccaaaatgacgcccagtccgaagagaatattgagcagcgcgcctaagagaggaatcgcgttcaagccgggaacgaatatcatcaccgtttcgcctgcgagaccgatgatgagcaacgccgtcagcagtaccgtagatgctttgaccggaccaagatcagggttcgggggagtgaagccgccatcatcataggcatccatcacattatcggtatccagccagctggagccggtgaaatcacgggggcctgactgcttgccttttttgccgccacggctcgggcgagcatcatcggtgaacgagccgatatccaagtcatctacggaaagcagtgcttccttctcgcgtttcttggcctgcttctcgaactttttggcctgcctggaggaagccacgtcatgcaagtcggcctgatgctcggcttcgaacgcggcccacgccgcatccaaatcgttcgcgtcatgcgattgcggtgtatcggcaccattcgtggccggtccggcggcaccgggagtcgacgacttggacgaagtatcggaatcctgtccgttgcccggcgtgggggttggccgctctccgtcggcattgctattctggttctcagtcataactgtcactctaatcaggcgaccggccaatggctagttcgtctgcgggaggaatgccaagtgctctactggttcttcgtcaaaggtctcggccctattgctcatcatcgtttgagccctgctgtcagtggactgaataacgtgcctcgagagggtggcgcgattatcgcagccaaccatctggcggtgattgacgatgctttgattccgattacctgcccgcgcatggtgcacttcatgggcaaagccgaatacttcgagggcaagggattgaagggcaagttcaagaagtggtggttcacgtccgtgggcgtgttcccggttgatcgttccggtggcagcaagtcgcttggcgcactcgagcatgcacgcgagattatcgaggatgggcacctgttcggtatccacattgaaggcacgcgcagcccggacggtcgactgtacaagggacacaccggtgccgcacgacttgcgttcgagaccggttgcccgattgtgccgaccgccatcatcggctcggacaagctgcagccgattggcacgtcgattcccaagaagggcaagaccaaggtgttgtatggcaagccgattgaggttgcgaagaagccggctgatgaaattacacatgatgatttgcgttcgctgaccgatcgtgtttccaccgcaatccagaaaatgagcggtcaggaattcgtgaacgaatacgcccagaaggtcaaggccgagctcaaggcccagcaggccgctgaagaagccgaaaagtaattaacaaatgaggctccctcgtctcaagacagagggagcctcattcaaatctcacacgatggtgagggtgatgacggtggggttgccgttggcatcgcgcaagcgaatcttgccgccgttggataggtccgtatcgccacttttcacggtacgtaccgtgccgaacaggccaccgagcaccttgtcggttttcacctcgaacccgagaccttcaagtgtcttggttacggcgctttcctgtttgccgacaaggccggacggtatcgtcgccatctccgggcccttggaaatcaccacgtccacgctatcgccccacttcagctgggctccggcttcctgagacgcggaaatgacttgaccggcctcgaccttgtcatcgtactgttcggtgacattggccgtgagcttcaactcgccgagcgcggcttgcatctcatcctgggtcttaccgacgatgttaggcatggtcaccggcatcggtcccttgctcaaagtaaccgtcacctcatcgttgtgcttggccgtggtaccgggatcaggggagatcgtcaatgccacaccctgcggcgtgtccatcgaatactcatccttcgactcgtcatgcttgacattatcgaagccggccttcttgagcgcgttcaacgggtccttgccattggccgaattcgcgtcgagaatatccttcgggatgatggtcatccgcacgcccttggacaccaccaccgtaagctcctgattggctcgcttgcttatgcggctgttcacaacggccttggtcttgttcacggaagaagagatgatcttgccttccgccacgtcgtcgctgtattccttgtgcgtcttgtaggggatgccgagagccttcaacgtgctctcatacgtggcccaatccgcgccggccaacgagcattcggtgcctgcattcgcatcgcaggtcacgtcatccggcttgggcacactccaatagctgcccggtccggcaaaccaccaccagccggcggttccgccgattgcagccagtaccagcacgatcaccagtacgatgatgagcggttttttgctgcgctgcttctttggcccggtgccgttggaagcgacgtccggctcatcggaaagggcaagcgctcgggtgaaggcatcgccggcctgaggcagcacttgtgtctcgctgccggactgtgccatgatttgcgtcttatggggagccgaagcatcggctggcgtcgacgaatcaagtgccgtggtgggggcgaccggaggagccggaggattgacgtctgcggcgccaccggtatcggcggtattgcttgcgacatcatcggccaaaaacgccggtacggacggctcgaacgttgctgcaccggcaggtacgccggtcagcggggcctgctcggcgatattgcctaccagcgctgcagcggtggcatcggtatgatcacctccgatgggttcggcatgcaaacggtattgccacgcctccagcggcaatttggcggccaactggctcaattcctcagctgctgccgcgccatcggcggggcgggcatccacctgacgcgcggtcagatgggcgatgaacgccgccacggacggatcaatgccctgacagaccgtggccacggacggcacgtcctcatgaacatgcttgaagacaagcgtcaccggattatccgaatcgaacggcaccttgccggtcagcatctcccatgccatgatgcccacggaatacaggtcgccttgcgcggtggcctgattgttctcgatcatttcgggagccagataagcggcggtgcccaatagcatgccggtggagctcaatgtggcctggctggcggccttggccagaccgaaatcagtgatctgcacatggccgcgatcattgatcaaaatgttctcgggcttgatgtcacggtgaaccacgccggcgcgatgtgcggaagccagaccatccaacgtctccgcgaccacgcgcagcgtctcacgcacggagaatgtgccttgggcgttcatctcatgccgcagattgacgccatgcacatattccatgaccagaaaatcaagtccattgaactcgccggtgtcatacacctgaacgatgtgcgggttggcgatggacgcggccgaattggcctcgcggcggaaccgttcgacgaactgctcccgatgcgggcctttggcgagttgtgtgtgcatgaccttaatcgccacggtgcgccccagacgctcatcgatggcctcatacacggtggccataccaccctcggcgatattgcgcacgatgcggtagcgtccctcaatcatctgcgcgggctcgttctcactcatgttgtatcgtacggttcctttaatcacgactaaacatgttcagtgtacatggccccggttacgcggccggagcatcggcgcatagttgtcacgggttttcaccggtgttcatggtctcatgacccggcggctcgcattgtggactatcgcaaggattcggggacgaatcgcgcacaagcctcggtcagacggcgctgcgcttcggaattcagctcaagaccggcaatcgccttacgggactcaccccatagggcagcgatgcgctcgcgggatcgatcaagagcaccggtcgacgtgaacagttcaatggtgcgggctacctggtcgtcgttgcgacaatccgcttcgaagatggcaatcagatcggccttatcctccgtatctgccgcagacagagcatcagccaacagcactgtgcgtttgccttctcgaatgtctccgccaacgggtttcccggtattgcggcttgatccgacgacatccaacaggtcatcggccagttggaacgccagtccgagcggccggcctacggccaacgcgcaatgcctggcctgatccgggctctctcctgcggccagcagtgcaagcagcagtggggcgatggtggtgtaactggctgtcttccagcggaatacgttcaatgaggcgttcgccagagcttcgggatcagacaacggggtcatctcgacggccaagtccagtatctggccgatctccacctcgcgctgcatggtaagaaacgcctcgttcaaggcatcggtgttgggaagacggctggcggaccggcgtgtgatttcaatgcaggcggtggccagaatatcgccaagcatcaggcccaagccacggcctatggcaccgctgtgtacggcctgttccaaggcacggtgtgcggaaggcttgccccggcgcagatcggattcgtcgatgatgtcgtcatgcaccagtgcggccgtctgaaacacttcaatggcacaggctaggtcgatcatggcgtcacgccgatcaggagtcacgtcgccggcaagaatatcgaaggcgtccaatgcgagcaacgcacgcagtcgtttgcctccttggctggaggaggaggcttggtccacaacctgttccatcaccggtttcagggcgtcggcaacctcatcggtggcgggagcggcagtcagttcccgcaccaactgaatgatgcgtggctcgatgatttcgcggttgttagcagttgtgcacatgcctaataacttatccacagggtttgaagaacacaagaacgttgggaatcaagggttttgaagctagaaccacaatggtcgttttttcctgcgtcatacggcgttttcagccatagtgggcacacaccccctcggcgcatgagctacccggctcggcgcgcaccacaacaccaatagattgcacaccattagtcaaggaggatatgatgaacaacaacacgccacacaagccgcgtaagaaccgacacgccaaacggcacgccgccgaacagacggagccttttgtctttgacgagttggagacgagatcacaggaatttcgcaatgatcgacgacttcgaggcgcgcaacaggctaatgccgactgggtggccgaaccattggacgaatggctgtcttgtcttgatgccgggaacaccgacctaggccgagagacgatggccgcgtttgcggtgggcatgcgtgagaccttatcgattcgtgatgcgctgattctctcgttggttattgatgaaagccgttgccccaagtcatggcttatggaattcgcggcgcgaccgcatctggcgcgtacgagaacacgaatgggcgagctgctgacttgcgcattcgaggatgaaggcatgatgccggataaggagcgttgccatgccggcatcggtatgttgctcgatatcgccgaagcctcaccggtgccgtactgcatacaaccattggccgtgatcgcctacaccttatggtggctgggcgatccgcgagcaatggtgttcgccttgcgatgcctgctgcttgatgaggattgttcgctggcggcgatgatattctcagccgccgatcgaggcgtggcaccggcatggtgctcgggctgaatgaacagaaacggcggatttccgaggttttatgcgcgatgcgcggaaggaaagcgtgtggtgatcggcaacacgtcgggcaacgatgtgggaataatcgtccgtggagggtggtttactcacatagttgacgatttgcccttgccagaagtgggcccgtgtggtatatgcacttcacggcgagagatcagaaggagcagttttggccacgaaggaaacgacggcaaccaagcagacagccgagtccagcgaggagaccgagaccaagaagaaggccagctctacgaccaccgcgcgcaagacttctgccaagaagtccaagtccgcagagccctcgaaaaagaccacgcgcaagtccgccgcgaagaaaaccgcgaagaaggccaaggacgatgagctcgtcaaagacgaggacactcaggtcgatgacgagcttgatgacgatgccgaggtcaacgacgacgatttggatgttgacgacctcggcgaggatcttgacgacgttgacgaaggcgatgccgacgacgaagacctcgatgaggacgatgccgacgacgacgatgtggaagacgacgaggacgaggaagaagccaagtccaaggcacccgagcagcccaaggaaaagggtgcctacgtggtctccgacacggatgatgaggaagagaacatcatcccttcgggcaatccgaagcgtcgtgtgatcgcggccggcgcaaccgccgacccggtcaaggactacctgaagcagatcggccgtgtgagcctgctgaacgccgaacaggaagttgacctgtccgagcgcatcgaggccggcctgtacgcccagcacctgctcgacaccgaaagtgaaggcatggagttcaagcgcaagcgtgaactcaagtgggccgccgccgacggcaagaaggctaaggaccatctgctggaagccaacctgcgacttgtggtctcgctcgccaagcgttacacgggtcgtggcatgctcttccttgatttgatccaggaaggcaaccttggtctgattcgtgccgtcgagaagttcgattggaagaagggcttcaagttctccacctacgccacgtggtggattcgtcaggccatcacccgtgccatggctgatcaggcccgcaccattcgcgtgcctgtgcacatggttgaagtgattaacaagctgtcccgtgtacagcgccagatgctgcaggatctggggcgtgaacctacgccggacgagctggcccgcgagctggacatgccggttgagaaggtgcaggaagtgcagaagtacggccgcgaaccgatttccctgcacaccccgcttggcgaggatggcgattctgagttcggcgacctcattgaggataccgacgccatcgctccgtccgacgccgtggccttctccctgctgcaggaacagttcaaacaggtgctggaaaccctgtctccgcgtgaggccggcgtcatcaagatgcgctatggccttgaagacggccagccgaagacgctggacgacatcggccgtgtgtatggcgtgacccgtgaacgcatccgtcagatcgagtccaagaccatgtccaagctgcgccacccgtcccgttcgcagaccctgcgcgacttcctggatcaatgacggtcggcccgcttagtaggccgaccgcgcgaggagtttgacagcccagtgggctgtcagacgacggagccatccgttgaaggctcccctgaagaggggagccaaattattagaaaataggactgtatgcccaaagaagaatacggcgccaaggacctagctgttcttgagggcttggatgcggtgcgcaagcgtccgggcatgtacatcggcaccaccgactcgcagggtcttatgcactgcctgtgggagatcatcgataactccgtggatgaggccttggccggcttctgcaacgatatcgtggtcaccctgcacaccgacggttccgtggaagtcgcggacaatggccgaggcattccggtggataaggaaccgaaaaccggcctgtccggcgtggaggtcgtactgaccaaactgcatgccggtgccaagttcggcaactcgtcttataacgccgtcggtggcctgcacggcgtgggctcctccgtggtcaatgccctgagctcccgactggacgtcgaagtggatcgtgacggcaagacgcaccacatgaccttccaccaaggtcaccctggcgtatacacggatgccgacccggccaatccgtctcccgattccccgttcaagcgcactcgcaagaaccgacccaccgagctggaaatcatcggcaaggtatctcccaaaaccactggtacccgtattcgctactggtatgatccggagattttcaacaaaaccgccgaattctcatacgaacagctcatcgaccgcgtgcgccagaccagcttcctggtgcccggactcaaaatcaccattgttgacgaaaacgtaccggaaacggcgactgacaccgccgaagccattgatgccgacgcagtcgaacctgcgcaagaccaggccccggctttggacgtctcgtccaacgatgccgaactcttcgacgactccaccgaggctcaagccgacagtaccgagagcctgtccgaggaggacttctcgctgacggccggcgaccaggtcgtcgatggcgcgttcggcgagcagcccgcgcacccgcgcgtcgtggaattcctgcacaccggcggcgtcaaggacttcgtcgacttcctatccaaaggcgagccgatctccgacatctggcgcatccaaggcgagggcacctataaggaggagacccaggccgtgggcgaaggcggtgaactgcacgcccaggaaatcgaacgcacctgcggcgtggacatcgccctgcgatgggtcaacggctacgacaccacaatcatgagcttcgtgaacatcgtggagacgcccggcggcggtactcacgtggacggtttcatgaacgccatcaccaagcagattcgcaaggcggtggaagacaacgcccgcaagctcaaggtgaacatgaaggactccgccatgaaggtggagcgcgacgacatccaagccggactcgtggccgtggtcaccgcacgcgtggccgaacctcagttccaaggccagaccaaggacgtgcttggcaccgcgcaggtcaagccgatcgtcacccggctcaccgacaagcaattcggcgagatgatcaccggctccaaacgcggatacaaggaacaatccggccgcgtgctggagaagatcgtcggcgaaatgcacgcacgcatccagtcgcgcaaggccaaggaggtcacgcgccgcaagaacgcgctcgaatccgcctcgatgccggccaaactctccgactgccagccgggcaatgacgacgtggccgaactgttcatcgtcgagggtgattccgcactcggtaccgccaaggccgcccgcaacgccgggttccaagcgctgctgccgattcgaggcaagattctgaacgtgcagaaggcgtcgattacgcagatgctctccaacaaggaatgcgcggccatcatccaggtggtgggtgccggctccggccagagctttgacatcgaacagtcgcgctaccacaagatcatcatgatgaccgatgccgatgtggacggcgcgcacatccgtatcctgttgctgacgctgttctaccggtacatgcggccgcttatcgaacacggctacgtgtatgccgcagtaccgccgctgcaccgcatcgcgttgaccggctcgcacaagggcgaatacatctacacgtattccgatgacgagctggccggcaaactggccgacctcgacaagaagcacatcggttacaacgacgacatccagcgatacaagggtctgggcgagatggatgccgaccagctggcggacaccaccatggacccgcgcacgcgcatgctgcgccgcatccgcatggaggacgccgcccaggcatccgagatcttcagcctgctgatgggcgacgacgtgccgccgcgcaagcagttcatcgtcgacaacgccgacgatttcgaccgctccaagatcgatacctgatcgaagacgtcgctgataatgacatcgtgcttaccgagaatttccgtaattagcgtttgaggtgagcacgttgtcatatgttttatgcgtgttgcccatgagctattcgatagactgatgacatcgttatcacaaccggtgccgtactgtgaatgggagatggaacatggccagtctgttgcttgccgtcatctatgtggcgtttatcagtctggggttgccggattcgctactcgggtccgcatggcccaccatgagccaggatctgaacgtgccggtggcgtgggctggcggcatctccgcggtgatttccatgttcacgattgtctcggcgctgctttcggaccgaatgacattgaaattcggggcaggcaaggtcaccgccgtttcggtggcgttgactgcggcggccttggcaggtttctccgttgccccgaattactgggtgctgttggccatcgccataccgtacggccttggcgcgggtggcgtggatgcggcgctcaataactacgtagccattcactacgaaagccggcatatgagctggctgcactgcatgtggggcgtcggcgcatcggtcggcccctacatcatgggctatgcgctgtctcaagggcaaggctggccgtggggctatcggtacatcgcgatcctgcaggtgatgctgaccgtcatcctggtgctgagcctgccgctgtggaagaaacgtggcacgactgggggcggcgaatcgaccgatggtgccgcatcatctgacggcaatgccgagggatgtggtaatgctgaaggggcgtctgttgctgaacgcaaaccgctcggcgtggccggcgtgctcgccattcgcggtgccaaggaaatcctcgtgatgttcttctgctactgcgccatcgaatccacggcgggtctgtgggcctccagctacatggtgatgcacagcggcatcgacaagatcaccgccgccagctgggccagcctattctatgtaggcatcaccgtggggcgtgcgctttccggctttctgaccatgcgattcaaggacccggtcatgattcgcctcggccaagtgctggtgctcgccggcatcctcaccatgttcatgccattgcctcaccaccttggcgtggtcgttgggctggtggtcatcggcttcgggtgcgcgccgatttatccgtgcgtcatccactcgacgccggcctacttcggcgaagacaaatcgcaggccgtcgtcggcgtgcagatggcctgtgcctatgtgggctcactgctcatgccgccactgttcggcatcatcgcgcaatatgtgacaatcagtctctacccgtggtatttgctggtgctcttggtgctgatggtggccatgcacgagcgtcttcgtaagttgcgcggctgatcatgcgcgcatttgggcccgccgcctactatgcttggagcccatggtgataagtgaagaagaacataaacagatgcccgagcccgtacgggaacgattggaagcgctgaaggatgcgccgggctcggtaatcgtggtcggctcgatgaacgccgattacaccgtgaccaccaaacgactgcccaagccaggcgaaaccgtcaatggtggtgccatgaaagtgttgccgggcggcaaaggcgcgaatcaggcgtctgccgctgctcgcctcggtgtcaatgtccagttgctgggcgcggtgggcgaggactccaacgcggacttcctattaggcaagctggatgaggccggcgtcgacaccgccgatatcctgcacgttgaaggccccagcggcaccacggtaatcaccgtgagcgctgagggcgagaatgccatcgtctattcgccgggttccaatgccaaggcaagtgccggctatgtgcaatcacatcgcacgaccatcgccgaatgcgcggtattgggactgtgtttggagagcccgatctccaccgttatcgccgccgcacagaccgcgcatgacgctggcgtgaccgtgctgctcaacgactcgccatttatggacgagctgcctcacgaactggtggaagccacggatattctgctggtcaaccagcatgaagtggctcagttactgggtctgccggacggcgatgtggaatcactcgactggtatgaggtcgccgaacgattcaccgattacggattcgaccgggcgatagtgacgcttggtgcgtcggggtcggtggtgatcgagaacggacgttggcatcgcgtatccgccgcgcaagtcaatgcggtggacaccaccggttgcggcgactcgttcatgggaactgtgctggctggcttggccgctggccatacgctgctgcaatccgcgcaaatcggctcctatgtctccgcctatgcggccaccaagcttggtgcccaaagcgcctacggcaccgccgaagaagtcatcgcctacttcagctgacctataatcgtacatatgtacgaaaccctgagcctgttttccgaacccaccaaggtgtggttcgagcatgccttcggtcagccgaccgaggcacaggctcaggcatggccggcaatccattccggtcgtaatgtcttggtcatcgcacctaccggctccggcaaaacattggctgcgtttctctcggccattgaccggctgatgaccgtgccacgcacgcggcgtgccggtgtgcgtgtgctgtatatctcgccgttaaaggcgctcgcggccgatgtggccaagaacctagaacagcctttggagggcattgccgcacaatgcgaggcgcaagggctgcccgtgccgaagatcgcggtcgccactcgttcaggcgacaccaccgcacaggagcggcggcgcatagcctcccatccaccggatatcctcgttaccacgccagaatcgttgtatctgttgctcacttcgaaggcagggcggattctcggcactgtcgatacggtgatcgtcgatgagattcatgcagtggcgggcaccaagcgcggcgcacatctggcggtaagtctggaacggctggagaaccttgtcgcggaatcgcgcaagcgagatgcaatcgatgcggatgctgatgagggcagtgataccgccatcgatgctggcctcagtgaccttcatatgcagcgcattggtctatccgctacggtgaatccgcctgaagaggcggcgcgattcctgggcggcggacaaccggttaccatcgtgaatcccggtgggcggcctgcaatggatctgcgcatgattgagccgttggaaaacatgcgtgatttgcagtccgtgaatgccaagcagcgtgtcggtggcgtggaggctgaacggtccgctccgcatatcagcggtgtcacgccggccatgcagcgacttgccgaacgcaggggcattgtgccggtggatgatagagatgtttcttccacttctggggacgattctgatgcgagtgatgcgttcgattcctccgcgttggttggagcggcgggcgaccgtacctccggctccatctggcccgtggtggaacgcggtattttggatgagattctcgcgcaccgcaccacattggtgttcgtcaattcgcgtggtgtggccgaaaagctcaccgcgcgcctcaatgatctctatgcacagacccggcatggcaccaatcccgacactgtgcgggatccgggctctccggaaggccgcgaagggttctccacacattacgatgctgtggtcggttccaccaccatgcttgtcggctcgcatgagggcgatgatgtcatcgccatggctcatcatgggtcggtctccaaagaccgtcgcaaaatgattgaggaacggctcaagcgtggtgaattgcgctgcgtggtggccacctccagtttggagctaggcattgatatgggctcggtcgacttgatgattcaagtcgatacaccgttgtcggtctcctccggattgcagcgtgtaggtcgtgccgatcatcaggtcggtggcgtctctcacgcattgttctacccgctcacccgtcagcaaatcgtcactggggccgcaagtctggaagccatgattgccggcgatatagaaccattggccgtgccgcgcaatccgctcgatattctcgcccagcagaccgtggccgctgcctcgatgcacgatttgaacgctgatgactggtatgccacggtgctccgtgctgcgccgtttgccgaactgccacgtgacatgttcgatgccgtaatcggcatgatgtccggcgaatacaacagcgaggaattctcggccttccggccgcgactggtatggaatcgggataatggcctgatttccgcccgtcccggttcgcagaaagtggccgttacctctggcggtacgattcccgatcgagggctgtacaccgtggtcctgcctgaggcggacgccggcaaaggccagcgtcgcgtcggcgagttggatgaggagatggtctacgaatcgcgcgtgggcgatgtcattacgctcggcacctccacatggcagattcaggaaatcacccgtgatcgtgtggtcgtgactccggctccgggccgcaccgcccgtctgccgttctggcacggtgaaggcgctggccgtgactacggtttcagccgtaccatagcccgcttcacccgagaaatcgccgccggattagacgtgaagcggactggggggagttctgccgcagaaggtccagctgtcccaaccttcatcccaacaatcctcacccgtctccaccgagacggcctagaccccaacgctatcaccaacctggcccgcctactctccgagcaacaagccatcaccggcacagttcccagcgaccaaaccctcatcgtggaacggacccgcgatgaagacggcggctggcgcatcgtactgttaagccccttcggccgccgcgttcacgaaccgtggtccatggccatcagccgcagactgcgccaacgctacggtttcgatgggcaggtatatgccgccgatgacggtatcgtcattcagctaccggacggtgacggacatattcctgctcaagacctgttccttttcgacccagaagacctcaaagcagatgtagaacgtcaagtgggcgagtccgtgctattcgccgcacgattccgcgaatgcgccgcccgatcactgttcatgccgcgatccgacccgggccgtcgcgtgcccctatggcagcagcgactgcgcgccgcacagctcctgcaagccgcacgtatggtcaagaacttcccgctgctgctggaaaccgcgcgcgaatgtttgcaagacgtatacgacatgcccgccctgaacgaggtgatgaccggattgcaagccggcaccattaccgtgaaggacgtggagaccgagccgccatcgccttttgccgagaacattctctttggcttcgtcggcgtggtgatgtaccagtatgaccaacctcaggccgagcgcagcgcgcaactgttgtctctcgatccgcacgtgctcgaacgcttgctcggcaccaccgacatggcacaagtgctcaacccggacgtgattcgcgaagtcgaacaggaactgggggagcgcactttctggaatgaacttgccgacgatgatgtgactggtcgcgtgacccgttacgccaaaacccatggtcctttcaccgccgatcagctcatggccgatctgcacctcgatgctacggatgccgtgcatactttggatgtactggctgccaaaggcgagttgctgcaaggccactttgtagatgatgacaagcaaggccaacagtggctccataaggacgtattccgccgcattcggtctcgctcattggccaaggcgcgtaaagcagtcaagccagtagaaccagaggcgttccagatgtttcttatcgaccgacaaggtatcgggccggtcggcggcgaacgatatgaaggtgccgacgggctcatgcgcgttatcgagcagctggagggcatagcactgcccactgcactctgggagtcggcggtattccccgcacgagtacgagactaccaacctgcattgctggatgagttgctgaccagcggcgatgtggtctgggtcggctcaaaaaccgggggaaccagtgcgatggaccccggtgaggttgctttctatccggcggattcaatattgctcagcggtgtggaacatggtacgacatcgaacgcttcagacgccaccatgccggaagcgattctgaccgcactggactcagggggagcgttccatgcccgtcaactggtggatgccgccaaacgtgtgtggaatgaggccgcggagccggacatcaatccaaacaccggtgaaatcattccgcaagagtggagcgaacagcagttcaaggatgccttgtggagcttggtctggcaaggtaaggtcaccaattccagcttcgcgccggtacgtgcattaaccgcaggcgcagcaagcccgcgtaaatccactacatcacgtcgtcgtgggcgtgtcgctccgattcaccgagccactacggatatgacgttaggaggtttgtggtctgccgtaatcgggcaagctgaagccgaagacactgatcagaccgagcaggcgctcgcactggtcgagacgttgctggacaggtatggcgtcatcgcgcagccggtgatcgacaaggaaaatatcccgggtggctactcagcgttgtatccgatattgcagcgcatggaggagcatggtcgactggtacgaggcatgttcgtccgtggtttcggcgcggcccaatttgccgagcgcgacaccgtggatgcgttgcgtcatccgtcagagcatcgcggccagtccgtggtggcattgagtgtgctcgaccccgcaaatctcagtggctccgccatcgcgtggccggacgcgcctgccggtgcgggtaaaccggcacgccgtatcggagccacggtcgtgctcaatgcgcaaggtgcgctactatacgcggctgccaaagccaagcacttgacggcgttcgatcaatcggtcggccatgaacccgccgccaatgattccgacgaacaaatgcgcaaggccgccacagaactggcctacgctctcaaacgcaatggcaccggttccgtgacgttcagcgacatcaatggcgaacccctcaacgcccgtcaccccttcgcccgcatcctccaccagtccggcttcacccccgttccccgaggcatgcggctgtactgattgagcccagctatcgaatgcggtagttggagccgcgttgggtcatgatgaggccggcgtgggtgagcttcttatccagtgtgtagagggcgttcctgaggagcccttgttgctcgaagaatgggccaccgacgagcttgaccaattcgctggtgttgacaaactggccatcagccttgaccagtgcttcaagcaaactgtattccagacgggacagtgaaattgcggtgtgtgtggatgcgtagtaggctttgcgattcgtggtatccaacgtgagattgccacgaatgatcatggtgggggagtcggtggcaagcgagccgacgtatgagagcagttcgccatcggagaatggtttgctcagtacggcatccgggtgtcgtacattagctcgtgcgctagcggcagcattgtccgtgcactgttcggcttcggcatctgagttgtttgcgtgtgaatccgcgctgaaggagctgtagggcgtctcttcgatcggggcgtactcgtcaggcagcgctcgccagcggctgccttcgccgatggttttgctgagtggcgtcgaagtcagcagcagaatcttgacggaggcacgggcattgtgaagggattcgatgagttgctcggtggagatgccgagcagggattcatcgagaatcactgcgtcaaatagctccttggtgaccgcggcgagcgcgatactgccggtgcttgccaaggacacctcatgacgacaggcaagcagcgcaccacgaatggcgcgggccaacggttcattggatacggcaaccagtagtctcatcgccacctccttgatgcttagtgtaggtcgggtttagggtctcttctctatgtgtttggctcactatcgttcgctcctcgcctacaaacaccccactgggggtgtttgctttacggctcggcccatcagagggagcttaattgaggttacgcaatgaaggcgatgggggaggcgaggtccactccggagccgtctcggcgcatatcgggcttgggaagctcgaccggggagcctgcggatgtggaggcatgcaacgggtagagaccaacccaggcaagaatcagcgtgttctggcccttgaggaagcgctgggagcgtacgccaccggtagcgcggcccttggtggggtacatttccagcggggtgaccttggcggcgccgttttcggtgccgggtagtgcatcggagtcgccggccacggtgagcaccaccgcgccggagccggaagtcaaaccgttctcgccctcctcataggtccatgccaccttgccggcgggaaccacgttgaatgccgccacacgggcgccctcggccagcttgatgccggccataccgcccgcggtgcgaccctgcgggcgcacgttcttcgcctcaaaggtcagtagcgaggaatcggaggagatgaacaccagacggtcgtcatcctcggccacggcggcgaataccacttcgtcgccatctttcagatcaatgacgggccaggaatccatggtggtgggtgcctcacggttccaacgcttgatgacaccgttacgggtaccgatagccagcgacggcaacggcttggcctcggcggccccgccatcctcgctctcatccttggcactggccttgccggatgtcggctgctccatggcgatcgccgtaatcacgcgctcgccacgaatcggatcggtggattcggtcatgccgatcagttcgtcggcctgaactcctcccttcagcgacaatgtggcggcagcgggcaaggcaggcaaatcaaccacatgcgcgagcaccaggcggccggccgacgtgaccagcccgtacgtggcgcgcgtggaggtctcgaagattgtggtgatctgatcgtctcgcagacgttcatcggatgcggaccgtacattgaacacgtccatcgcgcttggcgtggtacgggcaatcaaaccggtggcgctcatcatcaccacgcacggctcgtcctcgatcttcaaggctccggtcagcgcggactgttcgccggtcttcttggctgcggctgcggctgcggccacatcggcttcggcggaggaaatcgtggtggcggccttcaccgcttcgagcgcggacttggacacacccgaagccccggcgccctgcgccacgaccggcgtcagagtgccatccgggtcggcgtccagcagcacggtgcgacgcggcgagccccacttggcgaccgcctcgtccatctcgtcggtgaccacctggtcgagcgcttcggcggaggccagaatgcgggtcagctcctcgatgcgcttcttcaggtcatcgcgttcggcctcaagttcgatgcggttcatcttggtcagacggcgcagacgcaggtcgaggatgtactgggcctggacctcgtccaggtcgaacacaaccatcaaacggcttttcgcagcatccgcatcatctgaggtgcggattacctggatcacctcgtcgatgtccagcatggccagcagcaggccctcgaccaggtgcaggcgctccaacgccttcttcttgcgatattcgctgcggcggcggatcaccacacggcggtggtcaacccacacctgaagcatctccttcaggcccatcgtgtgcgggcggccctccaccagcgccacgttgttcatggcaaaattgtcctgcaacggcgtgtgcttgaacagctgcaccagcaccgcatgcgggtcgaaaccggtcttgatctcgatgacgatacgcgtgccgttatgacgatcggtcagatcgaacgcgccggaaatcccctccagcttgcggttcttcacgccgtcggaaatacgctcgatcaccttctccgggcccaccatgtacggcagctcggtgatcacgatggcctgcttgcgggccgtgacatgctcgatatgcgtggcggcgcgcgtggtgagcgtaccacggccagtggcataggcctcacggatgccgtcgcggccgatgatcgtgccgccggtgggccagtcggggccgggcacgtaacgcatcagctgttccagggtggcgtccgaatgcgccatgaggaacttggcggcgttcaccacctcgcccagattgtgggtggccaggttcgtggccatgcccacggcgatgcccgagccgccgttgaccagcagatttgggatggcggccggcagcacggtcggttccttgagcttgttgtcatagttcggcgtgaagtcgacggtgtcctcatcgatatccgcgttcatgccgagggccgccgggccaagcctggcctcggtgtagcgggaggccgcagggccgtcatccagcgagccgaagttgccgtggccgtctaccagcggcagacgcatcgcgaacggctgtgccaaacgcaccatggcctcgtagatcgcggaatcgccgtgcggatggagcttgcccatcacctcgcccaccacgcgggcggacttcatatacgggcggtcgggagtcaggttcatctcgcccatctggtagacgatacggcgctgcaccggcttcaagccatcgcgcgcatcgggcagtgcgcgtgcgtaaatcaccgaatacgcatactcgaggaaggatttgctcatctcctcgttcagcggcgtctcgacgatatgctccttgaccgtgcgcggatcgtaggtttgcgcggacggtttgcggtgtgatgccatgaaactccctttcgaacgcccccatattagcgggagggcgcgaaacagtgcgcagagaacggttctcgataacaactgtgcgctggtttcggtgcgccaatcgcacatgtttgccgataaaatggcgtgattccagcgtttcagccgatgtgcgtttgtttgattatgtgcgttggggcgcacagttgttattgagaaccgttctctgcgcactgagccaaggggaggggtgctacttgaatgggcaactatgagtgttgagacgccggatatggacgagttgctgcggctggtgcccactgtgggctatggggatgacgccccggccgatcggcgtgggggagcactgcacctgtccgccgtgctgcccgccttgtccgccgcgattgggcatccgactcccaccaaggtccacgccgatcccaaggcctgccagcgcgcgttgggactgcccgacgccgaatcggccatcgtggtgctcgtggacggcctgggcttctggaacctcgccatgcgcctcggccacgcgccctatctgcgttcgctgatgaacgaacgcgccaatcagcgtcccatcgccacctgcgctccaagcaccactgtggcggccatggccgcattcggtaccggaacctgcccgggactgaccgcaatggcgggctatacgcagctcgaacccgccagccataagctcatccaactcatccagttcaaagacgcgctggcacccaaaccagccaatccgcacattcctgtgccacccatggtcgatccgctcgaccagcagcgcgaggagacggtgttcgagaaacttgcggctcaagaggtgcgcgtcacaagctcggggttgcccaagttctccaaatcgccattgaccgaagccgcattgcgaggcaccgactatcaaggcaacgtcaccccacgcgatcgtgtgctggctgcctcacgtgcctcccgtacccccggcctgacctacctgtacatccgtgacgccgacaaagtcggccacaattacgggtgggattccgaacactgggtggccgcattcgaacatatcgacgcccagctcgcgctcctgaaacgcagcgcacccaaaggcacgctgatcgtcatcgtagccgaccacggcatggtgcaaaccgacgtggaccagcggattgacatcgccgttgaaccgcagctcacccgaggcgtgtcactggtcgggggagagcctcgctcgctgatgctgtatgccgagccggatgaacgacctgaggatatagcttgccggtggcgcgattacctgcaagaccgagccttggtgcggaccagggatgaggccatcgcggacggattgtttggaccggtctgcgagcgagtccggccgatgctcggcgatgtggtcgtgcaggcagcgggagccgtgaccctcgtcgattcgcgtacgcaaggagacaaagccacccacctgccgagcgtgcatggctcccaaacggcattggaaatggatattccctgcctgatcgatatggcctgattcggaaattcagtctccgaacagaatctcgtcccagcttggtacggccgaacgtcctgatttacgcttggccggtttggctggtgcctcgtgtttggtggcggcggattcggccgcccgctcctgctcggtggctaccagctgtgcattggggccacgccgtacggtctcgtccgaaatattgtcagaaccctgctctggtgccgtggcaggcgattgctgcaatcctgcggcagatgacgaaacaggtccggcggtctgcgaagagaccgggctgggggccgtagcgtcatgagcctggttcgtggccggtgagatggacgtggataggtccaccgggggcatggaacctgtggaagtgacggagggccggatcgcggcaggccgtgcggccggaatcgaaggcgtaggcgccgcccaagcagacacggcgcgctcgatacgcgcggaacgtacggagtcgccgggcagttcaggaatcgtcggcttgagtttggaatccgtggctgattccggattctgttcgccgagcagttttcgagcggcattgttcaggctcatcacggaattgtcgtgcatattccacgtccattcggcatggatctcacggcccgcggaagtgaatatcgccacgatgcgccaaggctcaagtccgcgccgggtggatttccaggtcactgattccatgccgattccagcagaggccagcgtgcgttccaccagttcgctgatggtgcgcaccctgctgtctttgggtgccgccacggcaaggaactgttcgatggcatactgtttctcggtctccacggccatggagaaacgacgtaccagcgtttcgctcagatgatatttctccgcgacacgggccggatcggcaccggcgcgaatcagcgactgtatctgggaaatcggcaaagtggactgctgatgcggctggggggcctgtcgcatctcgcttctgacctgcttggcctcaagaatcgcccgttcgagcgtgtcgtccacgctcacggccatttccctgccgccaatggagaatacgaggtcccccgtcttgctcacgcgcacgaaacgggctttttcaagccgatcatctggcatattcgcaccactttccgtcgcaaagacattacttcttttaagtatgccccacgtgtcgaactttacgagtatttcaaatcgtgtatcctatgggcgagtacggcgctgaccgtgctatatatatcgacttacgaaccaaagacgacgaaaggactatgatggctcaggattatgattccccccgcaataaggatgaggacgaggaatcgctgcaggcgctggggaagtcctcgcagaacgcctcgagcgacatcgacgacgatgagaacgccatcgccgaagactacgaactgccgggcgccgatttgagcaacgaggattcctcggtgaccgtcatccccatgcagggtgacgagttcatctgctcgcagtgcttcctggtcaagcatcgcagccagctcgcctacacggacgaggatggccagccggtgtgtgaggagtgcgccgcctgatggcgttcgacgagacctacaacgagcccgaatccaccgaggtcctggtcaagagcctcgaccccgaacatccggcccagctgcactatgcccacgcgggcgatgccggtgccgacctcatcaccaccgtcgatgtgacgctgaagccttttgaacgggtactggtgcccaccggcgtggccatcgccctacctgcgggctacgtggcgttggtgcatccgcgttccgggctggccgccaagcagggcgtcaccgtgctcaacgcgcctggcaccgttgatgccggctaccgtggcgagatcaaggtgccgctgatcaacctcgatccggaacgcaccgccgtcttccatccgggcgatcgcatcgcccaattggtgattcagcggtatgttgaggcccggttcatcccggccgaaaccctgcccggatccgatcgcgccgaacgtgggttcggttcgacgggagtggcgtcctgaccggattgggccggttgaatgaccaaggtgatgacggcaacgacggttgcggaaccaatgatggcgaacaggtgcatgcacaaggctccggttcgcggttacaatgaacttcatgacgagggaggtgactggcatggcagagattgatggcgagcagtacgccgcccgtaagttgggttgtgagatcagtgccgatccgctcaatccgctggatccaatcaagaaggtatgcaagtcccaccatcccggtgaggatttgtccatcctcgaccgcgcgtaccggcgcgccgtcatccagcattgcacgcaacggcgcaagtcgggcgaaccatacatcatccatccgttggccgtttcccagattctcgcggatctgggcatggggccgattgtggtggcggccggtctgctgcatgatacggtggaggacaccgactacacgttggatcaatgccgtgccgagttcggcgacaccgtggccggtctggtcgatggcgtcaccaagctcagccagcttgaagtgggcgactccgcccaagccgaaaccattcgcaaacttgtggtggccatgagccgcgacgtgcgcaccttggtggtcaagctcgccgaccgtgtacacaacgcccgcacctggcgctatgtgaagaccacgtccgcccagaagaaggcgcgtgaaaccctcgacgtgtacgcgcctttggccaaccgactcggtatgaacgccatcaagacggagctcgaggaactgagcttcaaggtgctctacccgaagatctacaacgagatcgtggtgctggtggctcgccgagccggccagcgcgatgtgtacctgaagcagattctggcggagatcaacgaggatctcgacgagcagaacatcaaggcatacgtcaccggacgcccgaaggactacttctcgatttatcagaagatgatcgtgcgcggccatgatttcgcgaacatctacgatttggtcggtgtgcgcatcatcgtcgacaccattcaggactgctatgcggcgcttggtgccgtgcatgcgcggtggaacccggttcccggccggttcaaggactacatcgccatgccgaagctcaacatgtaccagtcgctgcacaccacggtggtgggccccggtggcaagccggtggaaatccagattcgcacctgggacatgcaccgccgcgccgagttcggcatcgccgcgcactggaaatacaaggaaaacggccaggccggccgcgccctgagctcgccggacaagtccgaccgcaggcgtgacgagaagaaccaggagctttccgaagccgacaatctcaaatggattcagcagcttgccgattggaccagcgaaacccccgactccaacgagtttctgggttcgctcaaggaggatctcggctcgtccgaagtctacgtgttcacgccgaaaggcaagatcgtatccctgcccgctcatgccacgcccgtcgacttcgcgtatgccgtgcacaccgaagtgggtcatcgcacgatgggcgcacgtgtcaacggacgtttggtgccgcttgacaccacgctcgacaacggcgacaccgtggagatcctgacttccaagtccgataccgccggtccttcgcgcgactggctgagcttcgtcaagagcccgaaggcacgaaacaagatccgccagtggttctcgaaggaacgtcgtaccgaggctattgaggaaggccgcgacgaactgacccgcgctatgcgcaaacgtaacttgccggtcaatgcgctgctgaccaccgaggcattgatcggtgtggccgacgacctcaatttcccgaacgccgacgctgtgttcgccgccatcggtgatgggcagatctccacgcagaacgtcatctcgcatctggtcaaggatgccggggccgacgaggtcgatgaggaggtcgagcaggaggctctgccgctcaagcccgtggagcgcaagacttccagcagctccaccggggtatccgtcaagggcgtgggcgatgtgtggatcaagctggcccgttgctgcatgccggtgcccggtgacaatatcatcggcttcatcacccgtaatcagggcgtatccgtgcaccgcaccgactgccagaacatgatcgatctgaaaaacaagcagcctgagcgtgtggtcgaagtcgaatggaccagcaccaagggtctgttcatggtcaagattcaggtcgaggcattggatcgccgcaacctgctgtcggatgtgacgcgcgtgctttccgaccatggcgtgaacatcatttccggtacgatcgccaccggttccgatcgcgtggccaccagccagttcagcttcgaaatggccgatccgcagcatctcaactcgttgctggcagccgtgcgcaagattgatggcgtgttcgacgtgtaccgcatcaccggtgccaaggaatccgccgaacctcgactgcgcaagatgaagtagggatgtgggtggcatacggcggggccccggtccgaatcgtcggatcggggccccgccttgtggcacttgtggcatgaaggtgtgggcggtttttaccgcttcacttcgatggagaggattcctgcgggctcgagcgggcggtcagatgaatcggtgtccagtgcttcgagcttgtcgacgaccttcttggaggcgtcgtcggcgacttcgccgaagatggtgtgatggccgttgagccaaggggtcggcacggtggtgatgaagaactgcgagccgttggtcccgtggactttgccgtccatgccacggcggagcccggcattggccatggccaacaggtacggcttgtcgaattgcaggccggggtcgatctcatcgtcgaattcgtagccgggtccgccggtgccggtgcccagcgggcagccgccctggatcatgaaatccttgatgatgcggtggaaggtcagaccgttgtagaagggttcatgggaaggctgtccggtgtacgggtcggcccattccttctcgccggtggcgaggcccaggaagttggccacggtgttcggggccttgtcgtcgaacaggttgatggtgatatcgccctcagtggtgtgcatgattacggtagtcatggtcctaagtgtctcatgggcttgagaccggccggaaaccccaatcccgtcatgcttcgaggggctggacggggaacccgagccggacgggaccccgaacggcacgaaaccggccaaggcacctttagctgcacctgagattccaccctcgaccggggcgtcggggttgaagggactgacaaggaacctgggggagccggcacctaccaaagcacctggcttctcggcaaaaactccatactcggccgattttgcatatccagcctcggctttgctgagaattgtgtcatccattagagcgctcggcgtgacacctagaaaatcggcggtcgttacaagatcgcttactgaccatccaactttgccacacattttcatggacatagcactcttggtaatgcccaaagcttctccaagtgccttttgtgtttttccgcttagtcctagataaactctcacgttggtcgggatcgccgcttcagcacgctgtcctttatccaaaggtgtttctggtgagacttccgatgtggacatatgatcacttcccaaaatagttcagaatttcttaattaagtgtctcatacgatttgcgttcagtcaaactgtacgctatagtgaagtacagtaaaaatgaaccaagtcagaaagaaagaactatgaatggagtgacccaaaggataagtgctctggtaaagagtgaggggcttacttgtgcccaacttggttcattgcttggtttatcgaaaacttcggcgaatggaaaactcttgggacgcattggctggacaacttcagacatcgttgtgttgtccgagcacttccgtgtgtctaccgactatttgctggggcttgatgctgatcatgaggaggttgcgtgatggctggtggaatctacgaacagtccgaatggccggacagccggtgggattgcgtcacggtgtgcgatggatgccacacagtggtctggggcacgttctgggacgactacgattcggccgcccgcgacgcttatttcgcccgtaacggctggcgcaactactgcgtgccgggcgacacggagattttggagctctgcccggcctgcgccgtgcgcgccctgcgccgcggcgagacccgcggactggccgacacctggctccgccccacgcatgcctacacgcatgccttccgggaggtcgatgcacagctctccgcccgcgaacgggtggtggcaaacctgctgctgaccgaggggagaacggcatgagcgacgaagccggaagactcgtcttctcccgcgacccgtcgggaacattcatcgacggtatggtcttcggaacttcaggaggcggtgagaacgccaatctcgaagtgctgtgtgcgttgccctacgagcttgtacgcccacatgctagtgcctctgtcctgggtccgctggtcggcgtagggaatgtgaagaggctgttcctgagcgtcaaataccttgatggtgagatatccgtcgggcggtacgaccgtgtatccggctttctcgttgagcaggcgcgcgccctcgttggtggggatgctgagtatcagttcagcgccgtggtctgccgcccaggagtcgcagaacgccttgatctgcgatccgaagccttcgcgccgatgctttctgacgaccgcgatcccttcgatgatggctgcatgctcggcgaaagcctctcgtatctgtgcggcatggaccccgctcgtcccggtgcggtatatgagcgtctcggctacgcaaagggctggctggatgagggccgcgcctatcagacggtcctgtccccatacgcctatgtacgtaggcctgatcgttccatcgtcgtgtctgacgactgctgggacgctttgatcaaagtctttgatgtccctgatgagcaggctcttgattgcctttgcctcgccatccgttgcggcggcgcgtggcccgtcgacggcgagggaggtggtgcgatggtctgatcccattcgattttctctctttctctgcaactaaaagaaaaacgcccgttcccgatgctggaacgtcggggacgggcggtgcaaccaatattccgagcggccgcggatcccgtatcttgccggatcccggtccgtggccgcccaatgcattgtcttggagtagtgatcacacatgaacgactttactaaagcattccgcatgtcttgctctgtgtttcccgagtgtaaccgggatttccaggcaccggtttggacgttcccggtcgtggtggcattcgcccgccacaacggtccgggctccgttgattcccgtcgcctggcgtcgatgatggcgcacccgtccatggaagggagactcgcgtgaactggattgcaatcgtattgatcgtgttcgtcgcgttctcgtggctgatgacgttggccctgtgccgggcggcacgtctcggcgacgagatggccgccagattggccgacgaacgccgtgccgcccagcagcgtgaggaggaccgaccgtgagcaacatcgcactgtcatgggccttcaaatgccatgtgggcaacgccagcgcgaaggccgtgctcgtctacctcgcggaccgcgcggacgacgacggcaccgcagcctatccgaagatcgcgaccatcgtcaacatcaccgaactctcggaacggaccgtgcgcaccgcgttgaagactctccaggaacgcggcttcatccgccgtggcgaccaacggtacgcgcgcctcggcaagggcggcaggaaccgtctgccccagtactgtcagatcgtgtgggacctcgcggtcgaatccgacccgtcgaccctcgaatggatcaaggagacgcacacggcggaacacgacccgaagaccatgggcaataccgtggaccccgccgcctccaccatcatggaaaacggcgaatccaaggacgtgactccggaaaacgctggaacgaagccgattcccagcactgcaaatctcgcagggctggaaaacgaaccgaaaccggcactgcaaatcccgcacctccagcactgcgagagctgcacccccagcactgcaaatcccgcacccccagcactgcaaatctcgcagggctgtatatataaggataaaaccctcctagtaaaccctcctagtaaaccctcctagtaaaccctccttcccctctgcccctacggggcatctccccgcaagcggggcggccgccgccgaaaagaataaaaccgaacaactcgacgaggacgacaccgagatcgccgaagcggccggacgggtcctcgcctcgctcggtgagcagcgctcgatgctcggcctggccacgccctcaccgaccaaagccgaccgcaaggccatcatcggcctgtaccgcaggctcgtcgaccagggagcgcaatggcccaccctcgtgatggtcgacgcgatcggcttcgccatgaacggcgattggtggcccaaacgcatccgcaccggccgggccctcgccagacactgggacgaactcaacgacgacatgatcctcgcagccggccgcacagacggcgacgcacacgcgcagacggttccgccggccgagtccacggagccggatgctgcgccatggctgcccgactgggccgtgaagacgctggccgaattggacggccaggacgcgacggccggaggggaggcgacggcatgaccacgcgcatcgactgttccgaggcgggcttcaacgaattcctcctcgccaacccgcagctcgacgggcacgcggacctgatctggcagctgcacgccgtctactggcgcaacaagcgcttcggccatcccaaggccgtcggcctgctgatccaatacgcccgggcatgggccgcccgcaatcccggcgaaaccgccataggacgcctccaggcccgcaagacgccgatgacgcaaggacggcggccatgaacgggcgggacatgatgccggcctgcgcgagaatcgccgcagtcgacccggccatggcggatcgcatgtggaacacgacgaccgacgacgatggccgggacctggtcgacgaacggatgcgcggcaagggccgcgtgctgtgtgccgcgtgccccatgcgcctcgactgcatcagccgcgccctcgtcaacggctggaaggacaaggccgtgtacggcgggctcgaatacgcgagccgctggaccctcgcccgactgatcgcccgcgacctccacatcgccgacggcggcctgcaccggatcccacggagtcgggtccgtgactggctggccgaacatccggactgggccgaacgcatgcgccgtgatggccgcgactactggcgacgggccaaacgccgccaacgctcgtgccgcgaatacgcgaccgacgatccgctgttccttccgaccgaacccgtgccgaagggcctggtccagggcagcctcttctgaccgcttcccgccgcgatccgtgtgggacgcggc

SEQ ID NO: 1929 - DNA, 5121 bp, Unknown
  R17_18m  MAG No. k141_4293
gccttccgtaccggctggcagcctgactacccgtccgccgagaactacctgtggcagctgtactccaccgctgctgctgacggcaacggctccaacgacggtgactacaagaacccggccttcgacgacatgtgcaagcaggccgctgccgcttccagcaccgatgacgccaacaagctgtaccagcaggctgaggagatcctcctcaacgaccttccggccatcccgctgtactactccaacgcctccggcgcggcttccctcaacgtgaagtccggctacgccttcgattggcataacctcccgacctacaccgagatgtccaagaagtgagtctgattcactgaacggataccgttaggcagttcggaaataaagggcgaggatcgcaagatccccgccctttttgttgtgtgaggggtgcttgctcacgccatcgggaaccaagttaaagtatccactatccgaccgcaaccatggacatatccaccagcattgcccaatctcaaaccttgcgttaacgcaaatttacatatcacagtccgggcatgcggtaaactgtcggagtatttatcgaccggcgggggcgtactataccctttctggccggtctaggaaataaggagcaaccgtatgggtaagtatcttctgcgacgcattctgcagatgattcccgtggttctcggtacgactcttctggtatatgcccttgtattcgccctgccgggcgaccccgtcaaggccatgttcggagacaagcctgtcaatgaggccgtcgcagcccagatccgcgcagaataccatctcgaccagccgttcatcgttcagtacttcatctacctgaagaatgcactgaccctgaacttcggcgataccttcgccggccagcccgttctcgacgaaatcacccgcgccttcccggtcaccatcaggctcggcttgatggcgttcgtgttcgaggcgattttcggtgtggtcttcggcattatctcgggcctcaagaagggcaagtggtacgacaccgttatcctgatcgtctccctgctgcttatttccgtgccgaccttcgtcaccggcttcgtcatgcaatatgtctttggtattcagtgggcgatattgccggtgacggcaggcgccgaccccggcttccttgatctgctcatgccggccatggtgctcggttcggtgtcgatggcctatatcatccgactgacccgctccgaaatctcctccaacatcgccgaggattacgtgcgcaccgcacgtgccaaaggtatgtcgaacggtcaggtcatgctgcgccacgtactgcgcaactccctgattccagtcgtcacttacctcggccaggacatcggcgccctgatgggtggtgccatgatcaccgagcagatcttcaacatccacggcatcggcttcctcacctaccagtccattctgaagggcgaggcaaacctggtggtgtccatcgtcacgttgctcatgctgattttcgtagtgtgcaacctcgttgtcgacatgctgtacgcggccctcgatccgcgtatccgttacgcgtgatagggaggagtgagtcacatggcaaacgaaaccactgaaaacgagctcaaccagaccggcgagccaggaaccgaatacttcatggaaaccctgcccggtcaggaccgttacgtagctcctctcgacgagaccccgttgcaggacgtcgattccgtcgacgaatccgcaccggccaccagcatgtgggccgacgcatggcgaaccctgcgccgcaacccgctgttcatcatctccggcttgctgatcctgttcatcatcgtggtggccatcgcccccggtctgttcaccaagcaggatccgaacgcctgcgatctgggcaactccttgagccccgcctccgccggacaccccttcggctacgacctgcagggctgcgacgtgtacacccgcgtggtctacggcacccgtacctcactgtccgtcggcgtgctctccacgctgctggtcgtgattgtcggtaccctgatcggcgccgtcgccggcttcttcggcggttgggtcgacgcggtgctgagccgtatcaccgatatcttcttcgcgctgcctatgctgcttggcgccatcgtggtgcttcagatgttcaagacctccaagtccatctggaagatcgtgctggtgctgacgctcttcggctgggtcggcgtatgccgtatcgcccgaagcgccgtgctggaatcgaagaacctcgaattcaacaccgcttccatggccctcggctccacgcctgccagaaacctgttccgtcacatcctgccgaactccctggccccgatcatcgtcatcgccaccacctcgctggcctcctacatcgtggccgaagccacgctgagcttcctcggcgtcggcctgcccaccaccacggtgagctggggcggcgacatctccagcgcgcagaccaacctgcagaccgatccgatggtgctgttctacccgtccgccgcactggccatcaccgtgctcgcgttcatcatgatgggcgacgccgtcaaggacgccctcgatccgaagagccgtacggcctgagcgaggggagtggagaaacattatgactgacaacaccaacgccaagatgctggctatgcagaaagagcatggtccgctgctcgaggtcaaggatctggccatcgacttcaccactgacaccggcaagccggtgcatgcggtgcgcgatgccaacttcaccgtctaccccggccagtgggtggccatcgtgggcgaatccggctccggcaagtccacctccgccatggctgtgctgggcctgctgcccggcaccggtcacgtggtcaacggttccatcaagcttgacggccaggagatcgccggcgccaagcagagcgagttcgacaagctgcgcggtaccaagatgggcctcgtgcctcaggacccgatgagcaacctcaacccggtgtggcgcatcggctcccaggtcaaggaagcgctgaaggccaacaacatggacgtggcccacgagaagcgctccgccctcgccaaggccctggccggcgacgaggtcgaagtcaagggcaacgacgacgagaccttcctcggcaccaaggaactgcccgagctcatgaccgaggccaagaaggccctgaccgaagccggcgtgtccggcgaggccttcgacaaggccgtcgcccgcttcaccaacgaatgggttccgggctccgaaacccgttggcgcgtggccgacgacctcatcaaggccggtgtggccgatgatcaggcctggtacctcgccaagaagtacgtcatcggctccacaatggatgaccgcatcgcgggtctgctgtccgaggccggtctgcccgacgccgctacccgtgcccgtcagttcccgcacgagttctccggtggtatgcgccagcgtgcgctcatcgccatcggtctggcctgccgccctgacctgctgatcgccgacgagccgacctccgccctcgacgtgaccgtgcagaagaagatcctcgaccatctgcacatgctcactgactcgctgggcaccgccgtgctgttcatcacccacgatctgggtcttgccgccgagcgcgcccagcacattgtcgtgatgtacaagggtcaggtcgtcgaatccggtccgtccctcgaggtgctgcagcacccgcagcacccgtacaccaagcgactcgtggccgccgccccgtcgctggcctcccagcgcatcatctccgccaaggaacgcggcgagaacgcggacgccctgctcgaccatcacgtcgccggcgaacgcacgctcgagaaaagcgagcacatcatcaccgtcgaccacctgaccaaggaattcaagctgcctcgcaagaaggagatgttcaaggccgtcgacgacgtgtccttctccgtcaagcgtggcaccaccctggccatcgtgggcgaatccggttccggcaagtccaccgtggcgaacatggtgcttcacctgctggatcccacttccggcaaggtgttctacgaaggccgcgacacctccacgttcaaggccaaggatctgctcggtttccgccgccacgtgcagccggtgttccagaacccctacggttcgctcgacccgatgtactccatcttccgttccattgaggagccgctgcgcatccacaagattggcgataagaagtcgcgtgccaatcgtgtcaaggaactgctggacatggtcgagatgccggcttccgtgatgggtcgttacccgaacgagctttccggcggccagcgtcagcgcatcgccatcgcacgagccatggctctggatccggacgtcatcgtgtgcgatgaggccgtctccgccttggacgtgctggtgcaggatcaggtgctgcgtctgctcaacgacctgcaggccgagaagggcctgagctatctgttcatcacccacgatctggccgtggttcgccagatcgccgacgaggttgtggtgatgcagcacggcaagctcgtggagcacgccaccaccgacgaggtcttcgaccacccgcagaagcagtacacccgagacctgctcgacgccatccccggcggcaagctccaactcggtctggactgataatctgcgtttgagcgcattgtattgggttctttccatccgtggaaagaacccaatattcgtatgcgcaggtttgcatgatggttcgcgtgggacgaaaggcaaaaattggtgttttcccgatgttgtcccacaaattgtgggacaacatcaacatcaatcgatggacatgagtgttgtccctcagcagatttctcacgaagcccggaattacgccattcttagtgtggtcgataattactcatgctgtggggcgtgggacgacccgcgaaaatcgtcgattttcggatgttgtcccacggaatacgtcatacctcgtatgtgatcgtgagtggggcgtgatcggaccagcgtttgtcatacgtgggagccttgtcgatgacgaatccgcgtgcggtctccgccagctcgggcgtggcgaactggtagtcgattctccagccgacattgttgtcgaaagcgcgccctcgctggctccaccaggtgtatggcccctgaatgtcgcc

SEQ ID NO: 1930 - DNA, 4533 bp, Unknown
  R17_18m  MAG No. k141_4444
cagctgggcgatggagatggcgagcgtgtagccgaatgacttggtcagggagccgaactggtcggcgagcagcgacggcatccatgtgaacgcgccgtagtaggagaagttcacgaagaaccacgtggcccagatggcgatggtgcgggccaggtacttggagccgaacagctcgcgcgtcttgatcttcggcagcggcttgcccttgggagaggttaccggggccactcccccggcttcctcgaagtagcgcacggccttttcggcttcgtcttcgcgacccttggcttcgaggaatcgcacggattctgggatgtgcacacgggtgacaatcgcgtagagcagtggcagcgcgccgatggccagcgcccagcgccagccccagtcaccggtgttcgggatcacgaagtagccgattatggcggcgatgatccagccgacggcccagaaggattccagcagcacggtcatgcggccgcgctgtttggtcggcgaaaactcggagaccagcgtggaggcgaccggtagttccgcgcccaagcccagtccgatgatcagtcgggcgccgagcagcatgccgagcgaccaggacagcgccatggcgccgttggcgatgccgaagatgatcagcgtggcggtgaacacggttttgcggcccacgcggtcggcgatgaagccgcccaccgccgcgccgatggccatgccgacgaagccgatggacagcacccacgacttttcggtcggggtgaggttgaagtgcgggtcggctgcgatggcggcgaccacgaaggaaacgaggccgacgtccatggcgtcgaatgcccagccgatgccggaggcgacgaggagtttacggtgcgccttgttgaagggcagccggtcgaggcgctcgttgcgggtgagctgcgcgggttgcgctggagtggtggtgctcacgtcgtttcctttctggtaagtggcgtcagatttagtgtcgggtcaggtcggtgtaggactcttcgatggccaagctgatgcgttcgacttgttcgcgggtcagcggcttgcggaaggtcatgcgtaatgccgatttggcgacggacggttcgaggcccatcgccagcaacgtggcaggaatctcgtggcgcccgatggcgcaggccgagccggatgaggcagcgatgccgcgcgcgtccagatcgaccagcagcgcttccccggtgacgccggggaagatgaaggaggcgtgaccgggcagacggcgcacggggtcaccggtcaggtcggcgcggggcacgacccggcgaaccgcatcgatgagcatgtctcgggacgcgaccaattcacggcactgcacctgcatgcgcgcattcgattcattgagtccgatggcgagcgccacggcaccggccacgttctgtgtgccggagcgcaggccgcgttcctgccctccgccggacagcaccggttcgatgggtgtgcggccgcgtaccagcagtgcgcccagtcctttgggcgtgccgaatttgtgtccggatacggacagggcgtccacatcccagtcacgaaaacgaatcggaatctggccggcggcctgtacggcgtccacatggatgggcacgccgtgcgcgtgggcgatgcggaccagttcctccacgggttccacggtgccgacctcgttgttggcaagcatggtggagaccatcgtggtacgttcgctggcctcgccgtcgagctcgcgttcaagtgcgtcgagatcgagatgtgcttgcgcatccacgggaatgcgcacgacttcgaaaccgaaccattcgtgcagccatgccgccgattgggccacggccgggtgctcgatagtggaaatgataatgcgcgggcggctgcttgccagttgtttgccatcggtttcgtcgagtccgtagaccggccgcaggcccagtttgcgcatgcgcgccatggcgatgcctttgatggccagattgtccgattcggtgccgcctgaggtgaagatcacgtcatccggccgggcgcccaacgccgcggcgaatgatgcgcgggccgcgtccagcgcgcgggccgcggttttgccgggctggtgcacactggccggattggcgtaggcctcagtcaggaacggggtcatggcctcgatgactgccgggctcactggttcggtggcggcggcgtccaggtacagttcaccgggttcaccggatgcgttgggggtatcggccatgactagttccaatccaatccaaggtcgatgctgcgcaccgagtgggtgagcgcgcccacggagatcacgtccacgccggtggcggccacggctggcactcgctccaggctcatgttgccgctggcttccacgatggccttgccgtcgatgagctccacgccgcgacgggtgtcgtcgagcgagaaattgtccagcatgatggtgtccgctccgccggcgagcacggcgggaatctggtcaaggcggtcgacttccacttcgatatgcgtagtgtggcccacctgttcgcgcacgtggcggatcgcgccggccaggtcgatgccgcgcgcggcgagcgccgccagatggttgtccttcatcatgaccgcgtcggacagtccgtagcgatggttgtggccaccgccacagaccacggcgtatttctcgaacgggcgcaggccgggcgtggttttgcgcgtatcgacgatgcgggtgcactcgtagcggcgtggccgggtgacgggtccgtcatagtcgtcgccgtagatggcgttcaccgcgtccacgaaggcggcggtcatggtggcgatgccgctcatgcgctgggtgaagttgagggcgatgcgctcggcggtgagcaggtcgcgtaccgggccttccacggtggcgagtatctggccgcgctggaatcgctcaccgtccttgacggtgacggtgacggtgacggccgggttctgtgcggcgaaggctgcggcgaacacgtcgatgccgctcatcacaccgttttcgcgcgcggtgaggtgggccgagccggtttcgtccgcggggatggtggtctcgcaggtgatgtcgccgtagggcgcgtcttcggcgagcgccgcttcgacggcggtgcggatgatgtgtgatgtgagcatgggtcagtccttgatgtaggcgacggagtgggcccagttgtcgactggctcgctgtagtcggtgcgggcgtgggcgcctctcgactcggtgcgggcgagcgcggcgatggcggccacatagcctacggtgaggatgttgcggttctccaaagcctcaacgctgcttgcagcgccatcggcgtttatatcagcctgggcgtttgcggcggcgaggccttggccgagttcggcgatggcggttttcagtccggcctcgtcgcgcagcacgccgacgccatgccacatggtgttctggatgcgggtacggtcccagaccttgtcggcggcggtatcgtcagcagcagccgtagtggcaggagcggccagcgcgatcggcgcatggtcgaacacggcaccggtggcggagttcaggaacggttcgggtgcccagaccgcgtcgtcaccgtccgcgacggcggcaagaccggcgcggcgtccgtagacaagtccttcgagcagcgagttggaggcaaggcggttggagcccatgacaccggtacgagcgcattcgccggccgcgtacaggccgggaatggaggcccgggcgtccagatcggtgcgaatgcctcccatgtagtagtgcgcggcgggcgccaccgggatcggctccttgctccagtcgaagccaagcgaacgcgtataggcatcgatggtcgggaatcggtgggccaggaagctggctaggtcggggttctcgcgggtcatcggcgagacgtcgagcatcacgggcttgccaccttgcgcctgcatcacgcggaagttctcgcgggccacgacgtcgcgcggtgcgagttcggcgcgcggatcgatgtccgtcatataccggtggccgtgttcgtccagcagcaccgcgccttcgccgcgcacggcttcggagacgaggaagtgctcgcccacggccatggcggtgggatggaactggtagaactccagatcggcgacctgggcgcccgcacgccatgcggcagcgagaccgtccgcggtggcgaccggcggattggtggtgtacgggtacatacgacccgcgccaccggtggccaagatcacccggccggcggccagatccttgtcctgcccgtcgatcagcaggcggacgccggcgatgtggccgtcccgcacgatgagatctttgaggaaggcgttctcgatgatgtggatgcgcgggttcttgcacaccatggcggagacgtccagttcaagcactttgccggtggcgtctcccccggcatgcaccacgcgggcgcgcgaatgagccgcttccaggccgcgcagcatgtgtccctgcgcgtcgcggtcgaagtggacgccggccgcggcgaactcgcggacgcgctccgcaccctcacgggtgaggatgtccacggccttcgggtcgcacaggcc

SEQ ID NO: 1931 - DNA, 8223 bp, Unknown
  R17_18m  MAG No. k141_4488
gaatacacgcaaaaacttgaagacaagatcatcgaagacctgaaagcgccatgggtgcaaggcattacgttccttggcggcgagccattcctcaacactcccgtgctggtgccgctcgcacaacgtatccgccaggaattcggtcataccaaagatatctggtcgtggaccggctacacatgggaagagctcatgcgcctcggagaaacaccagacaagcttgaattgctgcatcttatcgacatcctcgtcgacggccgctacctcaaagaccagaaggactcgctgctgcaattccgtggctccagaaaccagcgcatcctcgatgtgtccaagtccctagaagccggcgaaccggtcatctgggccaagctccacgatcaagaacgagatatccccgaaatctatttgagagaccgcgaagccggcgaaggccaacaggcctcgtagtagcaggtccggaatgccgcactcagcaatatcgtcggaactgttggggaacgcccttcccgtgagcgaaatcaccatgcccggcgtcacgttgggcaggtggtcggactaatattccagaagaagtagccgggcgaagccgtccgcaggtatctgccagccgtcccgaaacggctcatgatgcctgaaggcgcacatacccggaagtcggaattaagaggaacacatggttgacatcgtcactgacgcgagcgtaaagcccgcttcacacccgaagcccctgcgtgtgggattggacatcggttccaccaccgtcaaggccgtggtgcttgatcagtccgattccctgaaagacaccctcttctccgattaccgacgccaccacgccaacgtgcgtgccaccgtggccggcctgttggtcgacatccgtaaagagctcgtggaactaggtcgaggcgatgagccgattcgcctgtctatcaccggttccggcggtctggcgcttgctgacaatctgcatgtgcctttcattcaggaggtcatcgccgaaaccgaggcgatcgacaaggaatacccgcaggccgacgtcatcatcgagctcggcggcgaggacgccaagatcacctacctgaagcccacgcccgaacagcgtatgaatggttcgtgcgcaggcggtaccggcgcgttcatcgaccagatgtccacgctgcttgacaccgacgccgcaggcctcaacgagatggccaagagctacgagaacctgtatccgatcgcctcgcgttgcggcgtgttcgccaaaaccgatctgcagccgctgatcaacgacggcgcggccaagcctgatctcgccgcctccatcttcaccgcagtggccacgcagaccattgccggcctggctgctggccgcccgatccacggtaccgtcatcttcctcggtggcccgctgttcttcatgtccgaactgcgcgccgccttccagcgtgcccttgaaggcaaggtcgacgagttcatcgtgccgaccgacgcccacctgtatgtggcctacggttcggcattgcaggccgacatggattccgacgatcagggccaccatttcgaggcccacacctgcgatgagatcctcatgcgtctggacgagctgaagaacctgccctccaacacgcccaccatgccgccgctgttccccaccgaggccgaccgcgaggacttcaacaagcgccaccacaaggaacacatccacatcggcaccctcgaaggcgcgcatggcccgcacttcctgggcatcgacgccggttccaccaccatcaaggccacgctcgtcaatgacgaccgtgaaatcgtctggtccagctacgccaacaacgaaggcagcccgctgaccgccgccatcaacatcgtcaagaagatccaatccgagctgcccgaaggcgcatggatcgcacgctcctgcgccaccggttacggcgaaggcctcatcaccaccggcctgcacctggacgagggcgtggtggagaccatggcccactatcgtggtgccgaaatggtcagccccggcgtcaccgccgtcatcgacatcggcggccaggatatgaaatatctggccatcactgacggcgtcatcgactcgatcgccgtcaacgaagcctgctcgtccggctgcggctcgttcctgcagaccttcgccatgtccatgggcctgacgattcaggaattcacgcaaaaggctctggcttccacccatccggtggacctcggttcgcgttgcaccgtgttcatgaactcctcggtcaagcaggcgcagaaggaaggcgcctccatcgaggacatcgctgccggcctgtgctactccgtggtgcgcaacgccctgtacaaggtcatcaagttgcgtgattccggcgaactcggcgacactgtggtggtccagggcggtacgttcctcaacgacgccgtgctgcgcgccttcgagctgctcaccgaacgtcaggtcacccgcccgaacatcgccggcctcatgggcgcgtttggcgccgccctgaccgcccgcatgcactatcaggatgaggccgaccacttggacgtggtggttaaggccgatgggtccgaggaacagtccgaggccgagcccgcacccaagtccgagcccaaggccgcagccttcaagaagaccgagccggccaagcccgaagcccatgtcgttgtcgtggacggtgtgacccacaccgccagctccattctgaccggcgaagcgctcgacaacatgagcatgaccgccgagcgtgacgtgtgcaagctgtgccagaaccactgcaagctcaccatcaccacattctccgacggctcgcgcttcgtgaccggcaaccgctgcgaacgcggcggcgacgccaagaagaagcgttccgaccgtccgaacctgtacgactacaagtacaagcgttgcttcgcctaccgccgtttgaccgacaagaaggccactcgtggcgagatcggcattccgcgcgccctcaatatgtacgagaactacccgttctggttcacgctgctcaccacgctgggcttcaaggtgatgatctccggccgcagctcccacgagctgttcgagaccggcatcgaatccatcgcctccgaaaacatctgctatccggccaagctggtgcatggccatatcaagtggctgatcaacaagggcatcaagaccatcttctacccgtgcgtgagctacgaggagaacctcgtgcccaacacggacaatcattacaactgcccggttgtggccaactatccgctcgtcgtcggcgccaacgttcctgagctgcgtgaggacggcgtgcgctacatgcacccgtacttcaacctcgccaaccatgagctcatggttggccgcatcgtcgaagagtttgcgtgggccaacgtgacccgcgaagaggccgaaaccgcggtcaaggccgcctatgccgaagacaaggtcttcaagcatgacgtgcagcaggaaggtttgaccgcgctcgcctatatgaaagagcacaactgccgaggcatcgtgctcgccggccgtccctaccacatcgaccccgaaatcaaccacggcatccccgaaaccatctgctcgctcggcatggtggtgctctccgaggattccatctgcgaactgcagccgggggagaagctcaacctcaccgaattcctctcggaaggcgaagccgacccgcgctccaagaacgccgccggattccgccacgtgggagaccgcacagtcaccaagatgccgttgcgcgtcaccaaccagtgggcctaccactcccgtctgtacgcggccgcacacttcgtggcctcctacccgggcctcgaactcgtgcagctcaattccttcggctgtggccttgacgccatcaccaccgatcaggtggccgaaatcctggcagacaaggcggacgtgtacacgctgctgaagattgacgaggtctccaacctgggtgccgccaagattcgactgcgctcgctcaaggccgccgtcgaggaacgcgaagccaacaaggcccgcgaagccgccgcggccaaggccgtgcaaggccccaagtccgccggattccgcaagaccggctccaccgcgccaacccccggccgccagattctgcttgacagcaccatggccgccaacccgaagctcaccaaggccatgcgcgccgcctccaagcgtgccgccgaacgcgacctgcaggccgcagtcgccagcaagaacggcacttcggacggcaccaccggcgtgacgaacgccaagaacgccaagaagtccggccacaacaacgccaccatgtcccgatacgcgcatcgcgagaagttcgtcaaggacatgaagaagaactatacgattgttggccctcagatgagcccgatccacatgtccttggtcgaagcggtgattcgttccggtgggtacaagttcgacatcctgaagcacgcgagccgtggcgatgtggaaaccggcctcaaatacgtgaacaacgacgcctgctacccggccatcatggtcgtcggccagctcatcgacgcgattctggaaggcaaatacgatcccgaccatgtagcgctcgccatcacccagaccggcggcatgtgccgtgcgaccaactacttcggcctgatccgcaaggccttggtcgatgccggctacccgcagattccggtcatcgccatttctacccagggcctcgaagacaacccaggcttcaaggccaccctgcccctgctgcaccgtgccatcaaggcgctgattctgggcgacttgctcatgaagtgcctctaccgcgtacgcccgtatgaggtggagaaaggttcggccaacaagctgtacgagctgtgggacaccatcgtgcgtgagaccatcgagcatcacggctattccaagaccgcagccaagacgccgagcatcaagaagggctatctgccgtataacgtgctggccaaggagatcgtgaagtccttcgacaatctgccgctgcgcgacatcccgcgcaaggtgcgtgtcggcgtggtcggcgagattcttgtcaagtaccagccggacgcgaacaaccacgtggtcgacgtcatcgaatcccaggattgcgaggccgtggtgcccggcatcatggaattcatgaccacccgcccctacatcaccgactggaacgagaagaacctcggcatgggcggcaacaagacggtttacgccctgatgcgcaagggcctcgacctgtacaacgcgccgatcaaggccgcgctggccacatcgaacggcaagttcaagcaggacgagccgatgcccgaactggtcaagaaggctgctgaagtcacctccatcggcgtgcaggccggtgaaggctggctgctgacggccgagattctggaactcatcgaacagggttgcccgaacgtgatctgcgcgcagccgttcgcctgcctgcccaaccatgtgaccggccgcggcatgttcggcaagatccgccgcctgcatccggaagccaacatcgtctccatcgattacgatccgggtgcctccgaggcgaaccagctcaatcgtatcaagctgatgatcgccgccgccaagaaggctcacaacgccaagttcgccgaggccggcgagccgcagggcttcacctccgcggactgatttatgctctggctcgtccgcaattaaggacgagcttcgctcgcgacatgctggttcgcctatcggctcaccctcgcctacggacagtccactgggctacatgccgaggtttcgcaaggcttggaatcattgggtttttcatgtccaaggcggctatgtgaaccttaaacgatgccgattctagcacatggggacgcttcgtgacacatcacttcgtgcgtaggtcgggccatggcgggggcaggagttcgtcgatggtgacgtcgaggatctgggcgatggcgatcagggtcttggaggtggggttgggcgtgggtccggcgaagcctcccgattcaagccgttggtactgcaccgtggagagtccggcgtccgaggccacgcgctcctggctgaggccgcgttggtcgcgcaggcggcgcaggcgtatgccgagccccttggcgtactgccgccaggtgagttcgtcggatatgcgctcgtgcatggttccatccaagtgcaccactgcatatatgattacttcatagatgtagtattccgtggtctatgatggactcggaagagcagaacgacagaccgggaggaacgatgtccgacgagaccgccgacgaaaccaaggacgtgccagaggacggcaggaacgacgaggcccacggcgtcaggaggaagaccgtcgccatcatcatcgctgtcatcatcgtggcgctggcgggcatcggcggcggctacgcctactggacgcaccacgagggcaacgcctaccatgaggcggtagcccaagccgagaacgccgacaaggcgctctcgaaggccattgagcaggccaccgccaccacatataaggcggatcagctcaaggagccgaagctgctggacaagctcgacgccgccatcaggaaggccaaggcgctcaagggcgtccccgaggaccagccgggcgagtggctggcgtggcagctcgcctccgcgaggaaggccagcgccacggacgtggacgaggccaatgcccaggtgaaggcgctcaacgccgcgctcaaggccgtcaaggacagcaagctggcgaaggagctggacaccgcgaaggaccagctcaagcagggtattgacggcgcgagccagaccctcaaggacacggacgggaaggtggcggacaatgccacccgcgacggcctcgcgaaggccatcgacgaggcgaacaacaccctcgccaagaagggcgtcaccgacccgaaggcctacaccgacgccaaggcgaagctcgacgccgccgtcaggcaggtgaccgattcgaaggccgcgaaggagcaggctgacgccgaggccgcagcccaagcccaagcgcaggcagccgcggcagccgcgcagtcgcaacgctcctactcccagtcctacaatcgttacggcggctccggcagcgggtattcctccaaccgtgggtcttccgccccgcagcagtcctacacgccctccagcaacggcggcgcctcagcccctgcttctgcccccatccaacgtcccaacaatggagtccttggcggcggcaccggcccgctggttgattgctccaaggttgcttgctccatccttggcaactgaccttagtcatttttctccttggaagccccatctcattgaggtggggcttttccatgtcttcacgcatgctcttgctggcgtgggtgatgcttgtggtgtgattgcctactttggggcaagcaggtcgtgcgccgccggttgggttcggtgggtgcgcggcgttgcttggtcaatatagttcgatttaggagagatatgctgaaatacaaagagcatagcaagcccactccgcccaaggaaaagcagggttggctaaggaggggtattgcgtcgcttgcggctgtggcgaccctcgccacgggtggtttggtggccgtttcctctgccaacgccttcgacaactccggcaacggcgtcattatcggcggtggtggcaacaccggcatcggcccgaatgacttcgtcctgtggctcaaagataatctggctcaaactgctgcgggcaagccgcccaccggctggggcacgagggacaacgccaacaccagcgatctgctcagtgatctggccaaagcaggcgtggaggtcagtgactatggcaccaacaagcctctgattcagaaggcctgtaaccaggcggtgaaccgcgccctcgacgccacccatcaaagggcgcgcgtgattggcttcgccacctcgctgcgcggcggagccatgtggggcgacaacgccgcgcactggaagtccctgttcgagcagagatggtctcaggctcaggcgaatccgaacggtggtgtaaggttctttttgaatggttggactgatagcgacgtaaccaagttcgcccgcggtgagttcgacaagggcatggatgagatggccgcagccggcacggtgaataacctggccatctgcgtcgcggtgaacgagtcccagcccccgatggccttcacccccaccatctccaccgaggcccctcacatcattcaggagggccagcccatcaccgacaaggtgacggtcggcgtgaagtcgggtgaccattggatcgacggcacgagcgtgacggcgaaggggtattacttcac

SEQ ID NO: 1932 - DNA, 9271 bp, Unknown
  R17_18m  MAG No. k141_4898
ggcggaattccggggctaatcggtcgggccggcgggatttgaacccgcgaccccttgacccccagtcaagtgcgctaccaaactgcgctacggcccgatggtgcaaaagcaccgagtagataatctaccagatatatgaaatctggcaaattacgcgcgtgtcacttccgcttcttcttctcgcggatgttcacggagatctgaatcggcgtgccttcgaagccgaattcctcgcgcagggagcgttcgatgtagcggcggtagccgtgctcgaggaagccggtggcgaagatcacgaaacgcggcgggcgcgtggacgcctgcgtggcgaagaggattcgcggctgcttgccaccacgcaacgggtgcgggtgggcggcctggatcttgccgaggaaggcgttgagtttgcctgtaggaatacgctgatcccaggattccaaggccttatccatggctcgcgtcagacggttggtgtgccagccggtcttggcggacaggttcacacgctcggcccacatcacacggtcgaattcggtgttccacaggcgttcgagacgctgcttgtcgaactcgtccatcgcatcccacttgttgaatacgagcacgattgcacggcccgcatccacggcggtggacatgaccttcaaatcctgatcggataccggctgcgaggcatcaaacagaatcagcgccaagtcacagcgctcgatggcggcctgcgtgcgcagagaggaataatattccgcgcctgtgagcttgtgctggcgtcgcttgatgccggcggtgtcgatgaacagccagtcctcgccatcgatgttgacgatttcgtcgacggggtcgcgcgtggtgccggccaaatcgttgacgacggcacgttcttcgcgcgccagctgattgagcagagacgacttgcccacgttcgggcggcccaccagagccacgcggcgcaggccggaaggcgtgaggtagccggaagtcttctcggcctgcttgagcttgtcgagcgcgacgtccagcaggtcgcccactcccctgccgtgcatggcggaaatcgagtatggttcgccgaggccgagtttccagaattcggcggcaaggtattcgctggcctggtcgtcgatcttgttgacggccagcacgacaggcttgccggcggcacgcagcatcttgacgatgcgctcatcggtggtggtcatgcccacttgcccatcgaccacgaataccacggcatcggccaaggtcacggcaatctgtgcctgtgaggcgatggcggattcaatgccttccacgtcggcttcccagcctcctgtgtccaccagcttgaagtcggtgccggcccattccgcgtcatagctcacacggtctcgtgtaacgcccggcgtgtcttccacaacggcggcacggcggccgaggatacggttgaccagggatgatttgcccacgttcggacggcctacaacagccagcacgcccaccggcttgggaccggccttgcgcgcgccttccgtgaaaccacggccggaaatcagatcctcatcgccttcgtccagctcatagccttcgagattggcggcatactgctcgtattcttggttctcgatggcgtcctcgaccacaccgatgagcagatcgagcgtgtgggcgaagtccagatcggaattgtcgatggtggtaacgccatcggcggcggtcaggaagctggtgaccttggaatcggccttgtcgcgcgcggccacatcctcagcgcccacgcccttgacagcctggccggcgcgacgggcctgacggacctcctcacgggcggtcagcagcacgcgcacctcggcgtccggggacaccacggtggtgatatcgcggccctcggccacgatgcccagccccccggagaaggagtcggccgacgcctcgcgggcgatgtaggcgcgctgggcggcgatgagcacgttgcgcaccgggatgacgttcgacaccttggagacatggctggagacttcggaggaacgaatggcctcggagatgtcctcgtcgtcggcgaatacgcaggggttgtccgggtccacggagatatcgaaatggtcgccggtgaagaactcgcccaccgcttcggtgatgacacgctcatccacggtttcggcgtccagatcgatgccctgcttcaggcaccaccaagcgcaggcacgatacatcgcgcccgtgtcaaggtaggcgtatccgaaatacttggccagcgccttggacgtggacgacttgcccacgccggcggggccgtcgatggcaacgcgaatcacaggccaacctccttggacagcgaacggacttccgtctgggacagcacgcggtaggaaccgggcttcaaatcaccgagtttgatcgggccgatctgggtgcgcaccaagcgcttgaccgggaagccgattgagccgaagatacggcgcacgatgcggttcttgccggagtgcagcacgaccttgaccatcgtgtggtcgcgtgaggagtcgatgatcgcgcagtggtcgagcttgatccagccgtcgtcgagctgtacgccggtggtcacgagtcgacggcatacggtgccggagatcttgccttccagtgtggcgacgtaggtcttttcgacctcgtacttggggtgcatgacgtgctgcgagagttcgccgtcgttcgtcatgaggataagaccctcggaatcgtagtcgagacggcccatgtggaagatgcgctcgtacttgtcgcccacgatgtcgcgcaacgtgtagcggcccttcgggtcgtccatggcggagagcaccttgcggggcttgttcagtgccagagtgacgtggttcggattgacgcgtacgcgcgaaccgtctacgcgcacctgctgcttatgggggtcgacgcgagttccgagctcggtgaccagttcaccgtcgacctcgacacggccttcggtaatcatgtcctcgcacttgcggcgggaaccgaatcccgcttgggcaagcagcttctggagtcgaatggaattggaatcgtcttgcgctttcgcagcgcgggaatatgcgtttggcatcgttctcccaacgtggccggacagactctgtcatcgcagagactgtcgatttgtatacatacttcagagttggcggactggaatcccagccaattccaacctatatatcataccgcaacgtaggactgctgctagactggcaaccgtttgtgcgggttcgcccgtcttccaacagatgaaaaggaatgaacaatcatggaagaaaccaagcaacagccgctggccctgcgcgtgtgcgccgaattggccggcagcttcctgctgtgctttgccatttacgccttctccacatggggttcggccgtgtatggcatcaatatcgtgttcttcgcgttggctaccggcttggcatatgccgcagtcaccgccatcttctcccgcgtgtccggtggccagctgaatccggccatcaccgtagcctccgtgctggtttccaagacgaaaatcctggatggcatcctctatgtgatcgctcaggtcatcggtgccatcgccgccggcttcgccgtggtcaagctgctgcccacatccgagcaggtagctgccaaagtgtggctgactccggccgttaacggtttcgagaacggctccgtgtcttactcgctgctgacccagtatggcattacgttctcgattacgctggcgattgtcgtcgaggtcgttgcctctctgattgtcgttgccaccgccatgtcttctctgggtgatcacggcgagtcctcggaccgtcatgtcattgccatgggtcttgcctatggtctggccgccgccatcagctacccggttaccggtgccggtctcaatcccgcccgttccaccggtatcgcactggccgcgatgaatgagggtcttacgcaaaatccgctgcaacagctgtgggtgttctggattagcccggtcttggccgccgctgtggtggcgttggtcatgatcatcgcgcagatgatgaccactcccaaattgccggctgccgccgatcttccacagacggatgccgatgcgaacgcggacacgctcgacgatggcgaattcttcgatcaggccgcctcgtctgatggcgattcagcggaaaaagatgttgccgaagagtccaaagaagctgaagtaggtaatcagcaggccgattcccaaggcgatgccgatgaaggagtcgaacgccactgagcgcactttccatgggcttttgtcctgaagaatcaggcgaacaagcccggtgatgatggccgtcacggcaagtatgaccgtggcggccatcgtatatccgaaagcaaccagcagtgtgatgacggcgacgacgccgagtacgcaccattcaaaccatggcttgccctcatgcgcttcggatacatagggatggttgtgcatgttgcgattccttctgtcgaacggttacgtgaccacaatagcaggcgaatagcaaaggtgggattccgcttggacccgttgacgggtcaggcggaatcccacctttgtgcgttttggctgagctgctcccctcagagagtcccgatcagtggaagaagtggcgggtgccggtgaggtacatggtcacgccggccttcttggccgcttcgatgacctcctcatcgcggatggatccgccgggctgcacgatggccttgacgcccgcgtcgataagcacctgggcaccatcggcgaacgggaagaacgcatcggatgccgcgaccgcaccggtggcgcgatcggcaccatcggccagcgtgttggcgcgctcgacggccaaatggcaggagtccacgcggttgacttggcccatgccgatgccgaccgtggcctggtcgtgggccagcaggatggcgttggacttcacgcagcggattgcacgccatgcgaacacgaggtccttcagcgtgtcggcgtcggcggcatcgccggccacgagcttccaggcgtccggatcgtcgccgacggcgttgatcagatcggtgtcctgcacaagcaggccgccatcgatctggcggatggcctcgtggcccttcggcggctcggccaccttgaggatgcgcaggttcttcttcttggtctgcagcagttcgagcgcggccggctcatagtcgggggcgacgatgacttcggtgaaaatcgggcgcacgctttcggccatctcaagagtgaccttggagttgcaggcgatcacaccgccgtaggcgctcatcgggtcgcaggcgtgagccttcttgtgggcctcggccgcggtcgcgccgatggccagaccgcacggattgttgtgcttgactacggccacggcaatggcgggagccatatcccatacggtgcgccaggcggcgtccgcgtccacgtagttgttgtagctcatcggcttgccgccgagctgctcggcgtgggcgaaaccggtctggttgagcgggtcaatgtagagggcggcctgctggtgggagttctcgccgtagcgaagggtgtgggcgcggtcccaggtacgggtgaatcgtgccgggaacttggcggaatcgacttcggtgccctgatcgtccttgtccacttcggcggtgtccagcgaagccggcttgggccagtgcttggcggtccattcgttgatggtggcgtcataggcggcggtgtgggcgaatgccttggcggcaagccacttgcgctcgtcgagggagaagccggtgccgtcggccacacgctcggcgaccaaggcgtaatcggccggatcggtgacgatggccacggtggcgtggttcttggccgcgccacgcaccatggaggggccgccgatgtcgatcttctcgatggtgtcggcctcgttggcgccggagcgaacggtgtcggcgaacgggtacaggttgacgaccaccagatcgaacggcttgatgccgaagccgtcaagctgcttggcatgttcggggttggtcatatcagccagaatgccggcgtgaatgtacggatgcaacgtcttgacgcggccgtcgaggcattcggggaatccggtgacatcggacacctcggttaccttgacgcccagctcggcgagcttcctggcggtcgaaccggtggaaacgacttcggtgccggccttcacgaacgcttccgcgagtacttcgatgccttccttatgaaagaccgagaccagtgcccgacggatcggtcggttcgtgtttgtcatcctgttcctccttggattcttgtggttgtgacgccagggaccgcgcctgacggacgatgacggtcttcggggtcgcggcggtggtgcgggaatcattgatcctcccaaccaaccagcctatcgaaaaaacgagcgctgtgccaatcagcgcgagcagccatgccgcggtaaatcccaatgcggtcgaatgaccgacgactctggtggaggccatgacgtcgacgccaatgtgagcgagacgatgatcgccaagcgatccattggacagagcgaacagcaatgtggatgccagtgagatcagcatcgcgctcaggcagaatgacccggcggagtagatcagcgaaaccagtactgggccgcgggtggacgcattccgtatattcaacggtctgcaggcgaatccttgcggcaggaatacagccagcaggcccacgagcgcagcgatggcgagaggcgcgttcaaggcaacggtacgccatagttcgctgctgaccggttcgggcagaataccgaataccggtattgcaggaagctctttggattggccgagccataacgtgaaactggccaaatcaccgatggcgaatccgccgccgaagagccaggaaacagcccagagcatgacgttgggtagccagatcagcatggcgacggtggtgagaattcgtgaaccggtttccatcccggacaattcgaacaacgatacgacagcggcatggttgcgtaccgaccatacgatgacggtaatcaatccaattgccaggtatatgcccagtatcgcgacggccaagacgacgccgattttcaggcagtggcgtatgtccgccggcacctgcttgcgagtccagtccctgaatgctcgcatcttggctgattccggtacggctgcgcataggaaaccgatcgagaatacgatggctgctttcagcaacaccagccactggtcatcgacaagacctaggtgtacggattgccggaatgcctcgttcaacccgagccaaacattcaatccggcaacatacgcatgcggcccgtatgctttgattcgcatggtgagtgcattgatcagccatatcagcagtatggtcaacatcaatggcgtgatggtgagggtgaacgaatcggttctagagcccgatccctcactcagaagcacaacggcctgtgtcagcgaggttgtgccgacggtgagattgtcgccgccctcttccatggagacaaccaataacatcagcgctgtatagcaacctaatgcaacggcatagatggccatggatgcgagggcgactatggctccccgcacccattggcgaatcacggctttcatcacgattggttggaaccgatcagtcgatgttggccttggcgagtatgtcgcgcatgatttcagcggcctggcccggggtcttgcccacggggatacccgccgcttcgagcgcgttcttcttgtcctgggcggtgcccttgcctccggagacgatggcgccggcgtggcccatctgcttgccttcgggggcggtgaaaccggcgatgtaggcgacaaccggcttggtcatgtgctccttggcccatgcggcggcgtcctgttcggcgaagccgccgatctcgccgatcatcatgacagccttggtgtcggggtcggcttcgaatgcctgcagggcttccagcagcgtcgtgccgacgatcggatcgccgccggcgccgagacatgcggtgaagccgatatcggacagttcgcccatgagctggtaggtgagggtgccggatttggagaccagtccgagcgggccgcggccgacgatgccgtcggggatgatgcccaagttgacgccagggttgccgagcgtgatgaaaccggggcagttcggtccgatgatgcgcacgcccttcttgagcgccagttcgacgaagtatgcggaatcggccaccggaatgccttcagtgatgaccacgatgagttcgatgccggcttcgacggcttcgaccacggcggacttggcgaacttcggcggcacgaacaccacgctggccttggctccggtggcttcacgtgcttcgccgcaggtggcgaacacggggatgtccacgtcggcaccgttcttggcaccggggaaggtgacggatgtgccggccttgcgcgggttcacgccgccgacgatattggtgccggccttgagcatgcgagccgtgtgggtcatgccctgatggccggtcatgccctggacgataacgggagcgccgtcttcgatgaacagcatcagcgaacctccttggactgggtcgcctcaccggcgagctgcgcggccttggctgccgcgccttccatggtttcggacacatggatattcggattgttggcggaagcgaggatatgcagaccctcggcggcggcgttgccatcgaaacgcacgacgatcggcttggaaccgccgagcttggcgaccgcttcgaggatgccgttggcgacttccacgcaggaggtgatgccgccatagacattgatgaacacggattcgacctgagggtcggacagtacgatctccaggctttcggccatgacggctgcggaggcgccgccgccgatgtccaggaagttggcgggcttgatgttggtgccctgttcctcgccagcgccggagacggcatccagggaactcatgacgagtcctgcgccgttgccgatcacaccgacctcgccgtgcaggtgcacgtagtgcaggccgtgttcgcgggcgcgctgttcgaaggggtcgggaacgatgagatccacgaaacgcgcccagccatcatggcggaaggaggcgttgtcatccaaggagatcttggcgtccaaggcgctcagctgcttggtggattcgtcatccgggtcaccgatttttgcgagcggattgatttccaccagtgtcgcgtcgttgtccttgaagcactgccacatcttgagcaggatctgcgccgcctgatcgacatcagcatggtagaaaccaatgctcgctgccatcttggtcgcagcctcgagatcgaagtcgtcgagcgcatcgatgtgcagacgcttgaccgcctcggga

SEQ ID NO: 1933 - DNA, 5165 bp, Unknown
  R17_18m  MAG No. k141_4955
ctgtctaactgcactgagcccctcccgaatcgggcaagtgtctagcaagcgcctatgacctagcaagggcgatacgaaagaaggccggcgcttagtgcgtcggccttcttgatgaacaagagccacccgatagaatcgaactaccgaccttcccacgaacgagggggatgctctaccactgagctaaggtggcgtggctccaagagccaagtagagaatatagcactgcgtttgattcagtgcaagccagacgttcatcatctttgggccattgttctttggaccatcgtggcggcaatagtgcgaacgatgtgcacacctcatctgctcggacgccattcgtcgtgtgcgcgttatgctagcatggtgagcctgattgactcggaggcaaagggaagcatgcgtgattttgtgctggtgaagttgacagacgaagagttcgatgatttctccgccaggcatccacaaggcaatttccaacaaacctcggcgatgggacgccttcgcgccgcgcaggggatcgacgtcgaatatctggccctcaaggagggcgagaagatcgtcgcggcggcgctgttcgaaactcaccgctctcgattctctacatttgcggccatccatgatggcccgatgtgcgactatcacgacaccgaagcattgaccttcttcatggatgcgctgaaacgccatgccaaggcagagggtgcttcacagctggagatcacccctgaatccccatatcggcttcgcgacaccaatggatcttctttgccggatgatcagaatggcgctcccgacaataagctgatagaacagctcgaggcgatcggcttcactcatggcggtttcaccgtgggctacacggcggttccgcgttggcgctacctcaaggatctgactggtatcaccgatgagaaaagtctgctgaagtcctatgataagcgcacccagtggagcgtgaagcgtgcccaatcgatgggtgtgcacgtgcgtgagctgtcggacgacgagctgggggtattcgcacgaatcgagcggcaaacagccgaacgccgtagcttcgaataccgtggcgaagcgtatttccaccgtttcaaggaagcgttcggcagcaaagcgcattttatggttgccgagatccgcatcgatgaatacatggcggacatgacggccaagcgtgaagcgctttcggccaaggtggcggcattgaccgccaaaaacgccgaacgtcccaccaccaaaaccgaacgtcagctgggggaggagacccgcaatctggcggcagccgaaaaacgcctgaacgaggcggccgagttcgccaaagacggggatgtactgccggctgcggcatcactattcgtggagcatccgcgcgaggtcatctacctgttctccggtagtgtcgagcggtacaagcccttctacgcctccgcgctgattcagcatgacgcgatgctgcatttctgcgtggaacacgggctgtctcgctacaacttctacggcatcgacggcgtctttgatgatcccgatgacgaggggcgtggtgtactggagttcaagcagggcttcaacggatatgtcgaggaacttccgggcgagttcgtgctgccggtcaaaccggttgcctatgccatgaagcaatttgcgcacaagctgctgtcgcggtaaacggacgcagcacacaggccattccagagcccagagcaacgatcagagtaacgacaagtaagaaggttcgattatgacgcaatccgatgcaggcgtcgcctcgctcacccctaccaagatcactcctgccgagctggatgcgttctccgcagctcaagtgcaaggtagtttccagcagacctcgcagatggccgccatgggtgcgttcaacggtccggtggactatgtgggtgtcaagcgcggtgacaagctgattgccgcctgctacgtggtgtacacgcggtcccgtttcggtttggaaggctcggtctggtgcggaccgctgtgcgattatgacaatccacaggtggttgaggcgatgaccgaagccctgcgtcgttcggccaaggcccatcacgccatcagcgtatcctgctggccggccgcagtctaccgtctgcatgatctggacggcaagccgaccagcgacccggacaccacgatgatggacaacatggcccgcttcggttggaaacatggcggcttcaccgtgggctacgaatccgtggtgaaccgctggaacttcgtcaaggggcttgacggcattcataatgagaaggaactgctggcctcgttctccaagtaccgccgtaagaacatccgcatcgcccaggattccggtctgcgcgtgcgccggctggaacgcggcgaactgagcactttcgtcaagctgtgcgatatgagcgccgcacgtcaaagcttcaagagccgcgatctggcctactatgagcgtctgttcgataccttcggcgacctgatcgagttcaaggtggtcgaaacccatttcgacgaatatctggacaccctgcaatccaagctgaatgcggcctccaaagacaagcgcaacctcgaacgcctgctccagcgcgcgcaacagcggccggaaggcacggccaagaagggtgcctccgacccggcaacgctggaaaagcgcatcgccaccgcagacaagaagatcacggcgctggaaaagaccatcggcgaagtcaatggcatcatcgcctcggacggcccggtcattccggtggaagccggtgtctacttctggcatccgaacgaggtcgtctgcctgtccagcggcgaggacgatcgtttcatggattactacccgtcttccctaatccacttcgaggcgatgcttgactgcatcgcccgtggcgtggagcgcttcaacttctacggcatttccggcattttcgacgccaacgatccttcctacggcgtctggcagttcaagactcgcttcggcggattcgtggaagagcttccgggcaagttcacgctgccggtggacggactgcgcttcggtgtatccgaagccgcacacaagctgctgcatcgctgacaaacagtggcgagcacggacacagaaataaggcacaggtgacgacgagatgagcgcgactgcgaatcgaacagatacgacgtatacgtttggcgtgattacgcccgaagagttcgaccggctttccgaagccacaagccagggcagctttcagcaatggtccgggcaggtccgtcttgccaagattcgtgggcatgaagccgaatgcgttggcgtgtgcgacgcatccggcaatctggtagccggctgcgtgattctgtacctcaatggtcgtttcggtgcagatggctccgtatatttcggccccatcggcattagcgatgatccggctctgctgcgggccataaccgaggcgattcgtgaatcggcccgtcgccaccatgctgtttccgtggcatgctggcctaacgtcgcctaccgtctgtattcctcggacgggcagcccgacggcgagccgaacgatgcactgctgaccggattcgccgatgcaggctgggcgcatggcggattccataccggttatgacgtggtctgccagtggatgtacgtcaaggatctcaccggcatcaccaacggcaaggaactgctggcatcattcggcaaacgcgctcaatggagcgtcaagcgggcgcagtcgatgggtgtgcacgttcgcgaaatcggccccgacgagttcgacgtgttcgccgatatcgaacggcggaccggtgaacgccgcgggttcgcgacgcgcggcgcggactatttccgccagttcaagcaggcgtatggtgcggatgcgcatttcatgctcgcggagatccacatcgccgaatatgtggcggatatgaccgccaagcgcgaggcattgcagactaaggtcgcacagctgcaggcgaaatacgatgaacgtccgaccacgcgcatcgaacgtcagctgggggaggaatcgcgcaatctcgcggccgccgacaagcgtctggctgaggtggagggatatgccaagaagggcgatgtgctgccggcagcggcttcaatgttcgtcagtcaccccaatgaggtggtctatcagtattccggttcgttggaggagtacaagccgttctacgcctcggcgctgattcagtacgaaacgatgctgcacctgtgtgtggaacagggtgtgagccgctacaacttctacggcatttccggcgtgttcgacgatccgaacgacgagggccgcggcgtgctggaattcaagcagggcttcaacggctacgtcgagcagatggtaggcaaattcacgttgccggtggacaagttccgcttcggcgtgagcaatctggcgcacaagctgctgcaccggtagcagctggcggccgggggacgaacctatgtgggctgcgtctcgcctgaccgtgtgcccgtcgtgtgcccgtcgtgtgcccgtcgtgtgcctactcgcgcatttgctcacacgcccatcagcgcgtgagcaaatgccatcatcaccagtgaaatcatcgcggtgattgccagcgagaagccggccagtttggcgttgccgagtactttgtcggtgaacagcgtggagaaaatggcgattggagccaacgcgcagatcaccatcacggcgcgaatcgaagccgagaacggcagcaggaaccacgagatcaacgcgaaggcgacgctgaacggtatacgccaagcgatgacggccatgacttccttcacatcatgcttggactggggcaaatccatgagcatgcccaccatcagcatcgacaccagcgcgttggcaccgctcaacggctgggttatagaggcgatccaatcgggaatcttcacgttggcgacggtcaacgcgatcatgagcagatacgtgtcgaacggcaccgagccgaagaagctcttgccgatggtgcgcagcaatgcgcggcgggcaagccgtttggcgtcgcgatccttgggcttttcgtacggcaaggtgggaaccgaaccggcgtgttgttcggcaagtgttttgccgggctgaatatgcagcagttgctgggtgagcacattggtgccggcggccaccatcacgcagttgccgatatcgaacatcgcagccggcaccaccgcgcccgcaccccagaatgactggacgacc

SEQ ID NO: 1934 - DNA, 16507 bp, Unknown
  R17_18m  MAG No. k141_5232
cattccgttgattatggcactttggccgcagaacggcgcgatttatgtggcgctgatgtcgatcatcgacaagacgctgatctggacgtacggcgtatggctgtgcgagccggtcgacgaagcgactgacggcaacgcgattggcgcgcgaggtgcggtcgtgaacggttcggtgaacggcgccggttcggtgggcaatgctggttcggcgagcaatgccgcaaacggtggttctccggccgtcgtccgcccctcgccaggcacccgcgtcctcggcctgcttaaacgattcgtcaatcccgccttcgtcggcgtgatgctcgccctgattctgattctgctcggcgtcaaggtgccggacatcatcctgaagccgctgcacaccatcggcaatatggccacgccgatgtcgctaatctacttgggcggcctgttcgcgctgaccaagtggtggggcgtcctcaaacgctacgaactctatgctggcctagtcgccaagatgatcgcattcccgctcgccttctacgcgctactgaccgcgctgaccggcgcattgccgcaactgccgatcacccatgacatggtgctgatgattacggtcatcgccggactgccgaccatgaccaccattgccatgttcaccggtcgcaagaacaacatgcccgagtatgcggtcggcttcgtgctcgtaagcacgctgttctcgctggcctccctgacgattgtgtcggcagttgtgttctgaattgtccccttcgacgaaaagaatgccgggggcctccggcgcttggaatttcatcgacgccgccaacgactcggcatccgaggcggccgtgccgtatttcaaggagatattcgattacgcgcgcacgctcgatccgcagcatcgcccgctgacctacaccaatctgctgatggccgccggaggcaaagacaagtgccatcagttcgcggatgtcatctgcctgaaccggtattacggctggtatgtgcaagatgggtatcagctcatcggagccaagaaggccttcatcaacgagatgaaccaatggatgaacaccgaacccaacaagccgtttctgttcaccgaatacggtgcggacaccgatgccggtgtgcacaagctgccgagcgtgcaatggagtgaagagtaccaatgcgagtacctcaccatgcagcacgaagtgttcgacatgttcgaggcagtggtgggcgagcaggtatggaacctctgcgacttccaaaccggtgaaggtatcatgcgcgtcgacggcaacaagaagggcgtcttcactcgcgaccgtcagcccaaagccgccgcctatgtactcaaggagcgttgggagactaagtagcggcccgcccctggaatattccaggagcaacacacatcgcataacacacaacgcaacatacaaaaaagaacctcgtgaaacgaatttcacgaggttctttctagttacgctgaatgactcccattagactcccacgagggaagagcaatggcgaaatcccaacgttgctaagctctcaaactcagatgtggaagtagagctcgtactcgagcggggtcggggccaggcgagcctggtcgatctcgtcgcgcttgagaccaatccaggtctcaagcaggtcgtcggtgaacacgtcgccggcggtgaggaagtcgtggtcctcttccagggcgtccatagcctcggccagggagcttggcacctgcttgatgccagcgtgctcttccggcggcagctcgtagaggtccttgtcgaccggctccggaggctcgatgtggttcaggatgccgtccaggccagccatcagctgggcggagaaggccaggaacgggttgcaggacggatccggagcgcggaactcgatgcgcttggcagccggggaggtgccggccagcggaatacggatggcggcagaacggttacgagcggagtacaccaggttgaccggagcctcgaagcccgggaccagacggtggtaggagttcagggacgggttggtgaaggccagcacggaggaggagtgcttgatcagaccgccgatgtaccagcgagccagatcggacagaccagcgtagcccttctcgtcgtagaacagcggcttgccgtccttccacagggactggtggcagtgcataccagtgccgttgtcgtcggcgatcggcttcggcatgaaggtcgcagccttgccggccagagaggcggtctcgtggacgacgtacttgtacttcttcaggtcatcgcctgcgtgctgcagggtgttgaagcggtagttgatctcctgctggacagcgccggcgacctcgtggtgggaacgctcgaggatcagaccgaccttctgcaggttggcgaccatatcgtcgcgcagatcctgggtgtggtcaatcggcggaaccgggaagtagcccttcttgacgcgattcttgaaaccgatgttcggggtgccgtcctcttcggagtcaacgccggagttccacggagcttcgatggagtcgacctcgtagaaggagcgctgcatggagttctcgaaacgcaccttgtcgaagatgaagaactcggcctcaggagcgaaggatgcggtgtcggcgatgccggtggacttcaggtaggcctcggccttgccggcgacctgacgcgggtcgcgggagtacggctcgtcggtcagcgggtcgacgatggagaaggccacgtcaagggtcttgtgcttgcggaacgggtcaacgaaagaggtctcaacgtccgggaccagcttcatgtcggactcgttgatggcctggaagccctgaacggaggaaccatcgaacggcatgccgtcggtgaaagcgtccttcaggaattcgctagccggcacggtgaagtgctgctgaacgccgataagatcggtgaaacggacggagacatactcgatgccttccttgttgataagggcctcgacgtcttccttggacttgagttcggtcacgggaccgctcctttcgtatgagatataacggtatatatcgtaaaatagcgcgtttcgccggctcgaaacttgggttacgagaatgtttcgtgactgtggccgacaatcgcgcaggcgcgttatttcaacgaaacatcattacagaatggaaacggagactatcgggggagtaggtagagatgtccgcaacgtggacagtgggtattgacaggtgacgtaggtggatgtaagtggacgcgattatgagacatatgacgaagccccggaaccgattgaacggattccggggcttctgtgcgatttggtggtgtgctgccgatcagcgaccgcgcatcgcgcggcgggagatcttctgcgggcggttcggatccatgcccttggggatggcatagcccttcttggcctgcagcgtgcgcagacgatcgttcagcgtttccatctcggccttggtcagcaggaagcgacggcgcggatgaatcttggcgatcagtgcgttcttgtggtccgtgggctcatagctcttggacttgatcaccgtgctacgcagcttggtcagcggcacctgcttggggccgtggcccacggcgatgcggtatatcggaatggaggagccggcggtgacgcccttgatatcgcgttcctgacgatccatcgccttcatgacgcgaccgtattcgccttcgccgatcaggtagatgccgttcatcgaagtgccgcgccagatggcatccttggtcttcgggtcgatccacaccggttcctgcgggaagtcaaagccggctttctgcatgttgctcagcacgccgatggcggcaccaggcttgccatcaatctgcttgtagccgactgcatccgcgcggcgggtgagcatcatggtggccagcagaatgccgagcatgatggcggtaatcatggtgaagatccaggtcagccaggtccacttgacaatcagaccgatgatgatcatcacgactacaggcagcaggaaagcaccggcctcaagccacggcagggccttgtcttccttagccgtgtacttgtagatctggatgatctgcttgattgtgctctgcttcttcggcttcgcgtccttttccgccatcacttcttcctttgttgggacgaaacacactgggcaatatcttatcaggtgcgctggtccgaacttgcttgtgctggttggtctcagcgtgtgtgcaacggtcgtccgtcggccttgagcagcgcctcgccgagcgtttcactgaatgtgggatgcgggtgaacgaggcgggctgcgtcggcgagcggcacatggttgccgaccagctgttcggcttcggcgatgatgtcggaggccatcggggagaccatgtgcacgccgagcacgcgcggggtgtccgggttggccgcgtcgcagccggagacgatggtcaatgagccggccgtgccgctcatcagcatgcgcgcgttcgccagcatcggatagttggtctccttgatttcgacgaggtcctctctcgcctgcgcctgttcgacggtgagcccgaccgacgccgcttcggggaaggagaacacgatctgcggcacagcggcttcgtccaccggcttgggattgagtccggcgatggtctccgcgatgacgatgccttgctcaaaagcacgatgcgccagtgcgtgaccggccgtcacgtcgcccaccgcccatacgcccggtttgtcggtgcgaccgtacgcatccgtggcgacatgtccgtggtcatcaatcgtcacgccccatgctgggtcggtgatcgggtcacgcccgatggcgacaagggcgatttcgccccaaacgctctgttcgccatcctggccttcgcgcgtgtagtgcacggtggcaccaaggttcgcgccggtgtccacatgggtgacgctggcgcgggtgatgatgttcacgccatgacgtttgagctcacgggtcagcgtggtgccggctctccggtcccaggctgagagcacgcggtccttgcgaatcagcagggtcaccttcgaaccggcggcgttccacatcgaggcgaattcaagggcgatggccccggcgccgataatcaccgccgaagagggaaattcgttgacttccagcgcctgtgtggagtcgatgagggcgccggcgaacgggttaccgggcaatgggtgtggcttggcaccggtggcgatgacgatgttcgtggccgtgaggtccatcgtggggccgctgggttcggggacatcggccttgtgataggtgaggatgtcgctttggtcgggggagggaacgaggtggacgatgtggttggaagttgctggagcgatctcatccgcatggaacgcggcattggctcggaacacggtgatgccgcgatgggccagcagtccggccagtcctcccaccatcgtcttgaccacgcgcaggcgatagtcgcgcagcgtgccgaagtcgatgccattcaccgaggcgttgacgccgagttcggccgcacggtgcacggtgtcgatggtgtgggtggcggtgatgagcgccttggaggggatgcagccacggttgagacaggtgccgcccacggtggcgtcacgctcgacgagtgccactttcatgccgagttcggcggcgcgcagggctgtggaatagccgccggggccggccccgatgatgaccagatcaaactgttcgctcatgattgcctccttggtgcatataagtatggctcccatgctagggagccatatgcggctatcgccgccacttcgcctaaaaacagtccactggactgttttctttacggctcagcccctcaacgaggggagccagagtatatatggacatcagtctgccggccagtgaccgcgcttcgggtaacgcggcttgggaagcctccaacgacgcatctgaatcgaacggctccaagcgtaggagaaggagcgggagcccttggacacggactgttcgccgtacttggcgatgagcttggccttgagcttgcgccacatcagccatacgtcgatgatcacggcaatcaggtaaccgtacataagcgccatcatgatgatggaagcccactggttctgcatcaaagaagtgacgaacatggagacgatcagaatcgcgaaggccaccgggatgaaccattcgccaaggttgaaacgggcatccacataatcacggatgtagatacgccaaggcaggcgttccgccttgggcatgtggttgatatcgcccttctgcatcgcctcgtactcggcgttctccttctcacgcagacgggctttggcggccttggcgctggccttgcggtccaccggaaccagcggacggataccggcggcctgagcctgcttcatcttcggggtaggacggccttttttctcagaaggatcggcggtcttcttcggggcctgctcaacgggaacttgggcctcttcttttttcctaaacggattccatgtcatgctttgaggttacggtgacgttcagacacttgtatactggcgcagccattgcaatgacgccgctcacacacatataaaggaggaccatcatggcaacgctcaccgctgacgagattcgttcgcgcgtcgaaaccgattggaaccgcatcgtcaaggtgctggccgaaaaggttgcgctgcagtcgatttccgccaagggcatcaccgccgaacatatgaagcgctccgctgaattcgtggcagacgaactgcgcctcgtgggtgtggatgccaaggtggtccaggcttccaatgccgacggcactccgggcgcatgggaggtcatcggctcgcatatcgtttctccggacgcccccaccgtgctgctctacgcccatcacgacgtgcagcctgttccggacccggccgagtggaacaccgacccgttcgtggccaccgaaatcgacggccgtctttacggccgtggctccgccgatgacggcggcggcatcgccatccactccggtgcgctgaaggctttgggcgacgacctcaacgtcaatatcaaagtgttcatcgaaggcgaagaggagatgggctcgccaagcttcattcccttcatcgaggctcaccgcgacgaattcgccgccgacgtgattatcgtggccgattccggcaactggtcggcggacattccttctttgaccacctcgctgcgcggcaacacctgcgtggacgtgaccgtgcagggccttgagcacccggtgcactccggtcagtacggcggcccgattctcgactccaacacgttggccgccatgctcatcgcttccatgtacgacgagaacggcgatctggccgtgcccggcgtggccgcggaagagccaatcggcggtttgcaacgcgaccttgacgaaaccaccgtgcgcgaggattccggcgtggtggccggttacgagttcgccggcaccggttcgctggcctcacgcctgtggaccaagccgtccgtgaccgtgatcggcttcgacgcccacccggtcgagggatccttcaacgtgatcgccccggagacccgcttccgtctgtcgctgcgcaccgcgcccacccagcgccctgaagaagcgcaggaagcactggctgcattcctcgaatcccacgcgccgttcggtgccaaggtcactgtcgaacgcggcgaaaacggcatgggctgggccatggacccgactgccgtggccaccaaggacgcgctggaagccatgaccgaggccttcggcgttgagcccatcaacaagggcgagggcggctccattccattcatccccgaactgcagcgcattttccccaacgctcaggtgctggtcaccggccccgaagacccgaaggccaacgcccacagccccaatgagtccatctccctgcccggcctcaagaacaacgtgatcaccgaggctttgctgctggacaagctcggcaagtaaccgaaccgcatcggtaatggtggcgagctgccgtcaggtaggtcacggatgtggctattgcctttgacggcggcttgctttatagtcggggagttgacacgggagctgccgttaggcggctgagaggagattcatagtctcgaccgatggaacgtgaccggataatgccggcgcacggaaatgtcgctcttacccacccgtgcctgaaccaacccgcgcgtggccacgaacatgtgcatcatgtgcgtacatatatccatgtatgttcggcctgcgtacgagcagaagaaaggcacattcatgactgaagctgtggccaaagccaattacaagtggcgcgtcgtcgatatcgtcgtcgccgcaatcatcgccgtcgcatccggcgtcattttctggggctgggacattgtctgctccgccccgctggccctgttcgagggcgtgacccccggtttcgagggtctgctcaacggattctggctgttcgccggcccgctcgccgcaatcatcgtgcgcaagcccggtgccgcactgtttgccgaaaccctcgccgccttcctcgagcttacgctgggcaaccagtggggtgtcggcggctcgctgatcgtcggcatcatccagggtctgggtgccgaaatcgccttcgccgtcttcgcttggaagaagtggaacatcggcaccaccatcctgtccggtgcgctcgccggcgtgggctgctgggcctactactgggccaccaacccgggctggaacggcctgcgcgtcacttggtatctggttggctccatcatctccggcgtcgtgatcgccggcgtggtggtctggtacttgtctcgtgcgctcgccgccaccggcgctctggaacgctttgaatccggccgcagcaaggcgcgcgtctgatgcaggttaatccggctgcggtagaggccagcggctggggatggcggcacgccacgcgtaaggacttcgcgttgcgtgccgtcgatttcaccatccggccaggtgaacgtgtgttgctgctcggtgcttcgggggcgggcaaaagcacgatgatggccggtctcgcaggcgtacttggcggcgatgaggaaggcgagcaggagggctcgctcaccatcgatggcgtcgatgcgcgcgaggcgcgaggccgcgtgggactggtgcttcaggacccggactcgcagatcattcttgaacgactaggcgatgacgcggccttcggctgcgagaacctcaacgtgccgcgcgaggagattcggcagcgagtgcgcgaatcattggatatggtgggactcggcggactcgaactggatcggtccacccgccatctgtccggcggtcagcgccaacgtctcgcgttggccggcgtgctggctatgaagcccggtctgctgttgttggacgaaccgaccgccaacctcgaccccgaaggcgtggtcgaagtgcatgacgcggtcaaaaaggtcatcgaggccaccggacagaccatggttgtggtcgaacatcatatcgatgtatggctcgatctggtcgatcgcgtgatcgtgctcggccgacccgatgcaagttcgcccacgggcgcggtcatcgccgacggcaagccggacgaggtgttcgccgagatgggcgacgtgttggccgccggtggcgcgtgggtgccgggccgtgcgattcccgattactcgccgaagcgggagcctgcgcacgatgcgccggtgctcagcaccgagaacttaagctttggccgtggaaccgctcttggcgttggcatcaatctggatttctatcccggcgaagtaacggctctgatgggtccgaacggcgcgggcaaatcgaccttggccctgaccttggccgggctgctcgagcctatcgccggcaaggtgctcatcgccgacaacctcaagcccgcgcatgccgggcgtgagccgattgactggaaaagcaaggaactgctgggccgtatcggcatggtgttccaggagcccgaacaccagttcgctgccaatttcgtgcgtgacgaagtcgccatcggccccaagtcgatggggcagagccaagacgaggcttatcggaccgccgaccgcatgcttgagcagatgaatctcacgcgcttcgccaaagccaacccgtataccttgtctggcggggagaagcggcgactgtccgtggcctccatgctggccgccgcacccaaagtgttggtgatggacgaaccgacattcggacaggatttcagtacgtggaatgaaatggtcaagctgatcgccgccatccgcgaccaaggctcgtgcgtggtcatggtgacgcacgatgaggcgctggtggatgcgctgggcgcacgacgcgtgatgttcgaggaggcgaggcatgagtgacgtggtaaccgtcagcccgcaggaaacgcgcgtggagccggtcaaagcctcatcgccctcatggttcatagcgcgcatcaacgcggtcagccgcatcatcggtgcgctgttgctgtgcgttccgatgttcatcagtctggatgtggtatccgcatccacggcgctcggcatcgaattcgtgctgctgtggattggtggcgtggctccgtggaccgtatgccgtaagacctggccggtatggatcgccgccgccggcagttttatctccgtgtttctctacggccgtacctcgggcgagatcctgtggcagggtggctggattgtgatcagtgagggatccattaatctggccatcgccacggctatcagggtggcggccattgccgtacccggcgtgatcctggccctgggcctcgatcccactgatttggcggacggtttggttgagattctgcacttctcaccgcgattcgtatacggcgggttggctggattgcgcatgtttacgctgctgcaggaagattggcgcgcacttggcttgtcccagcgttcgcgcggccttggcgacggtaacgccatcgcccgtgccctctcccaagcgttcggactgctggtgctctccatccggcgcgccaccaaacttgccaccgccatggaagcgcgcggcttcggctccagcgccccacgctcccaagcccgtatctcgcgtctgaagcctatcgactggatcttctacgtcatctgtctggctgtcccgctggcctccataggcgtagccatcggcaccgggaattggcacttcgcctttcaaggtgtctgaaaggcgacagactggcacagtgcctttcaaggtgtctgaaaggcttacgatgcctccgccagcgggagcgagccacgactgacgtaatgacccggcagtagggtagtggctatgcccatcaacgcccagattcttgataatccgaaatccgaccgcgttcgccgcatcgccgatctgacccgcaccaaaggccgcgaacgttcgggccgttttcttatcgaaggcccgcaatccgtgcgcgaggccgtcacttggcggccggacgtggtgcaggacctctatgtggaggtttcgcaggcgttggaacatccgcgtatcatctcctccacgttggagaagatcgtcgaaacctcgcaggatgccacgatttatgtgcactactgcaccggcgacgtgatgcaccgcatcagtccggacgcccagggcatcgtggccgtcggcaatgccgagtccatgcacgccggtgccgatgacgtcgaacttggcaagaacgggcggggcccgcagatcgccgccttctggcaggtgcgcgacccgggcaacgccggcaccgtgatccgtgcggccgatgcggccggttgcgacgccgtaatcttcgtggacgactgcgtggacgtgctgaaccccaaggtcatccgctccaccgcaggctccctgttccatctgccggtactcgccatgagcaccgacgaattcttcacctggacaggcgaccataatatgggcgtctgggccgccgacgtatacggcaccgaagaatgcaagccggaaagcctgcccgcagtactggcggacaaggcggcggtcgaggctccgaaagccgtgctgttcggcaatgaggcgcgtggcttggaaccggacatcctcacacgctgcggccgcatcgtctccatcccgctgtacggcaaggccgaatcgctgaacctcggcacctcggccgcggtgatgttgatgtcgctgtctatgtcgggtcatgttgaaagaatgtgaaaccggtaaaaacgctgtgaaacgctgagaaaacatcagacgaaagggttctcgtggcagaacaaatggtgttcgacgccgaccaggtgaccgctgaggttgccaagggcatcgagaaaatccagaacgcctccaacctggaggagctcaaggccatcaagacaacgtacgcaggtgccgattcggcgatgaccaaggccagcaaggccattggctccctgcccgtcgaccagaagaaggaagccggcaagctcatgggcaagctgcgcgccgacttcggccgtgcctatggccccaaggaggtcgagctcaaggaagccgccgagaaggccgcactcgccgctgaaaccgtggacatgacgctgccggtgaaccgcaagcctctgggcgcccgtcacccgctgcccaagctgatggaagacgtcgaggacttcttcatctccatgggctggcagatctcctccggtccggaaatcgaagccgaatggtacaacttcgactccctgaacttcggcccggaccatccggcccgccagatgcaggacaccttctacgtcaagggcaatcaagccaaggacgccgccggtttcgtcggctccaacatggtggtgcgtacgcagacctcctccgatcaggtccgtgccctcctgacccgtggcgtgccgctgtacatcgcgtcccctggccgtgtgttccgcaccgatgagctggacgccacccatactccggtgttccaccagtgcgaagccctcgccgtcgacaagcacctgaccatggccgacctgaagggcgtgctggacaagctcgccgtcgccatgttcggccctgaagccaagacgcgcctgcgcccgagctacttcccgttcaccgagccgagcgccgagctcgacctgtggttccccgacaagaagggcggccccggctggctcgagtggggcggctgcggcatggtgaacccgaacgtgctgaagtccgccggcatcgacccggacgtctacaccggtttcgccttcggcgtcggcatggagcgcacgctcctgctgcgcagcgacatcaacgacatgcacgacctggtcgaaggtgacgtgcgtttcgccgaacagtttgtgatgggggagtgattcagccatgcctatgatcgatatcgattggctcaaggaccatgtcgaggttcccgaaggcctgacctacgaacagctcgccaaggaccttgtcaaggtgggtcttgaggaagaggagatccactcctcccaggtgaccggcccgattgtggtcggctacgtggtcgacgccacccccgaaccgcagaagaacggcaagaccatcaactggtgccacgtggactgcggagacgaatggaacgagaccgacgaagacggcaacaaggtgccgcgcggcatcatctgcggcgcgcccaacatgaaggccggcgaaaaggtcgtcgtcaccctgcccggtgccgtgctgcccggcgacttcaagatcgagccgcgcaagacctacggccacatctccaacggcatgtgtgcctccgaacgtgagctgggtctgggcgacaaccacaatggcatcattctgctgcgtcagtacggcttctccgaggctgaatatgaggctctgaagcctggtcaggacgccatgcacctgctgcacctcgaccagcctctgcttgagatcaacatcaccccggaccgtggctacacgctgtcctaccgtggcgtggcccgcgaataccaccactccaccggtgccgcctacaccgatccggccgtggcactgaacgagaaggccccggaacctgctgactaccagcccggcaccccggtggacatcgatgttgaaatcgacgataacaatccgattcacggcgtgcccggttgcgaccgctactacgcgcgtatcgtcaaggacttcaatcccaacgcccacactcccaactggatgcgccgccgcctgattcgcgccggcatgcgctccatctccttggccgtggacgtgaccaactacgtgatgcttgacctcggccagccgatgcacgcctacgacctcgacaagctcgaaggcccgattgtcgtgcgccgcgccaacgagggtgagaaactcaccaccctggacggcaaggaacatgacctgagcgtcgaagatctgcttatcaccgattcgccgaacggcgaacgcggctcgcgcatcctcggccttgccggtgtgatgggcggcctgtatggcgaagtgaccgctgacaccaagaacattcttctggaggcagcgcacttcgatcaggtgaccatcgcccgttcggcccgtcgccacaagattccatccgaggcctcccgccgcttcgaacgtggcgtcgacaccgcgctgcagcccgccgccacccagatggccgccgagctcatggccaagtacggcaatggcgagcccagcgaacacccgaacgacgtgaacaacacgccgcgcgccaaggtcatccacttcaaggcctccgaagtggcccgcgtggccggcctcgacgtggacatcaaccgcatctccgacatcctgaccgacattggctgcacggtggccggcggcggcaacggcgagttcgccgtaaccgcgccgagctggcgtccggacttgaacgagccgtgcgacctggtcgaggaaatcgcccgactggtcggctacgaccagattccgatcaccgtgccgccggcaccggtcgagggtctggtgggcctgaccccggaccagcagcgtcgccgtcgcgtggcggacgagctcgccgagttcggcatggtcgaatcgctgagctacccgttcgtgggcgacgacgattacaaggccttcggcttcgacccggaagccaccaagaaggtcagcgtcgagatcgccaacccgctctacggcgaccgtccgtacctgcgtcgcgagattctgccgaccctggccaccaccgtgcagcgcaacatccgccgcggcatcgaaaacgtgtccctgtatgagctcggccacgtctacctgtgggatccgaacgcgcccgccatcccggcactgcccggcggcgtgcgccccaccgacgaacagctcgccgcgcttgacgccggtctgcccgaacagcccgaccatgtggccggcatcctgaccggtctggccgaggacgatggctggatgggcggcaagcgcccggtcgactggtccgacgccgtcgaggccgtgcgccgcatcgccggccgtatcggtgccgcaatcgaactcgaccagcccgccgccgacgatgtgcccgtccaatggcaccccggccgcgtcgcccgcgtcatggtgggcgacgtcttcaccggctgggttggtgaactgcacccgcgcgtcaacgaggcgctcggcttcccggcccattccgcggccttcgagctgaacctcaccgcgctgttcgccacgctgaccggtaagcccgtccaggccaagccgatctccacgttcccgccggtcaagcaggatttggccttcaccgtggacgagaccgtgaccgcaggccagcttgagaacgtgattcgcaaggccgccggcgcgaacctcgaatccatcgaactgttcgacgtgttcaccggcgaacaggtgggcgagggcaagaagtccctggcctatgcggtggtgttccgttcgccgagcaagacgctgtccgccgaagacagcgacgccatccgcaaggccatcgtggctgaggccgccgaaatcggcgcccagctgcgcgcctgacccaaccgatcatccgaatcgaggagcgtcatgagccaaccggagcaggacaagccgaaatacgggcagtaccagcagcctgaatatggtgctatgtctggccaatacgggccgaattacaacccgtatatttatggcgctcccgagccggataccaagaaggattccgccgcagccgctggcatcaacggtggcgcggcgcaatcccagcaggccggccagccgtacggtcagcagccggcgtggcccggcaatcagcaggcgggcggctggccgtatgctcaaggcggccaacagtccggtccgggcgggtacccgggcatgcaggggcagtcgtatggtcaacagccgaacggtcagcctcaccagccgcattattaccacggcatcgacctgaacgatccaaaccagaacccactctacgggcactgggattcgtatgcgatcatctcctttatcctcgccctgttcttcccggtgccagtgctctcggcactgatgggcgcggtggcaatgtggcgcacgcgcaccttccatatgaaaggcttcggtttggctgtggccgccgtggtgatcaacgtgctgtacaccatcgccgtcatctggatggccttcaatggctatgacgccatgagcctctaccaggaagccctccagcaactcaccggcggcaccggctcctcctccgactccatctccgcata

SEQ ID NO: 1935 - DNA, 6990 bp, Unknown
  R17_18m  MAG No. k141_5454
ccgccgcatccacggcggtaggtgccgtatacgaagcatcaggatgaggaaggggcgtgttctcatccgagccgtcctctccctcaaccttcaacatcccatgcaccatattcatgccgcacgcaaacggatactcgcccgccggcaacgccggcagtttcacgtcggtggtggcgttgcccggcagcatggcgtcaagtcccagatcagcaaacaccacatgcgaggtgcattcgccggtctcctgccggtcgaaggtcagtgtgatcggcgtacccgcacgcatgctcaccacggcgggggagtacccgcccttgacggtgatcgtcgcggattggcgttcgccggaagcatccatggccccggccgttgccttctgcgttccgaagaagaaccgcaggaccagccatgtcaatgcggccgccactatcagcgccgcgacggtcgagaagatgctgaactccataactgttccttcccactcctgatgtactgaacaacagtgtataccctatacccctagagggtatataatagggtgtgttcagctgacggataagtatcagggggtttgcgatgcatggttatgacgaagacaaggccaaggtcatcgcacgattacgccgtatcgaagggcaggtgcgcgccatcacacagatggtggaggatgacaaatactgcatcgatattctgacacagatttcggcgtcgaactcggcgctgaaatccgtggcgttattgctgctggacgatcatctcaaccattgcgtgcggcaggcgtcggtccagggcggcgaggtggccgatgaaaaacttgcggaggcttccgcggccattgcgcgtctcgtcaaatcgtgacgagttctgccgcatgatgacgcgcgctggcaaatcatgaaaggccgtctgacgctcggatacgacacagcataataacggttgatgctcgactgtgataaggccaagcgtccaatgtgggctgctgagcgtccgtttaacggcttgaaatcgtcgagttcggtaaaaatttaccgtcattcaccatcgatgacatactgggtaccatgtttgagcaaataggaaccgtggttatcgtcatcgtcgtgctagtggttggtgcagggcttggcctcttcgccggcttcgtgctggggcgccataagggtcaggagatggctcgaggcgtcaaaagcgaggagctggaggagaccaagacctcgctggagaatgcgcgattcgagaatgctgagcttagcgcgcgcaatgctgccgcacaggctcagattgaaggcgtgaaccagcaattggctttcgccaagtcacaacttgcccaggcgcagcaggctgagcagattcgcattcagcaggaacgtgagcgtgcagctgcggaggcggaacggaagcgtcaggcggatgctcaggccgccgaggccaagcgtgctgaacaggaagcacgtttgaaagaacagagcaaggtgctcgaggcgcttgcgccagtggccaagaatcttgataccttgcagaacaaggtcacgcagatcgaagagggtcgcaagagggaaatgggcgcattgggagcccaactcaaggggctcaacgaccagcaagcccgtttggacaaggaaaccagttccctgtccgccgcattgcgcaacaacaaggtgcgtggcgcgtggggcgaggcccagctcaagaacattgtcgagtccgccggattgctggaacatgtcgatttcgacattcaggtggtggtcacggatgccgatggacgtacgttgcgcccggatatgatcgtgcatctgccgggaggcaagaccattccgattgatgccaaagtgccttatgccgattaccagcgtgcctgcgaaatcccggacaccgccagccccgaggatattgcccgccgcgatgatttgctgcgagcccatgccaaggcgttgcgcgagcatgtacgtgctctcggcgaaaaggcctattggaatgcctttgatgtggcacccgattttgtggtggccttcatccccaatgaggcactattgcaggccgcgctcgaagccgaccccacactgatggatgatgcgttctctcgcaaagtggcgctcacctcgccggtcacgctgtgggccgtgctgaaatccgtcgcctatgcctggcagcagcagtcgctcaccgatgacgccaagcagctgttcgatttgtcccgagaactttacgaacggttctccacgttgggtgattatgccatcaaattgggcacccagatcaccaagacagtcagcgcttacaacaagttcgcgtccagtttggaacgccgtgtgttgcccaccgctcgcaagctgcaaaaaatcgaaccgaccaagatcatcgaggaagtaccgatcatcgaatcagacaaaggcaatgtgagcgaactgtccgcccctgaagtggtgccggccgatgaaggtgatactcatctgactgcctcaggcgatagtctggagtcatgactgaatctggattccgccccactggtaccccggacctcgccgtcgcgaagaaccgcaatgactttgccatgctggagccgcgtgaacagctagccaccttgctgagggagcatgtggtgggccgtccgttctccgaacttgccgcggtgacttttgaccaccgtgccgccaccgtcatgggccatgtactgattgacgctttggaagatgcgggctattcggttgatgacttcgatgctgttggtgccttgaccgcagcatctgtgcccatggtgtccgccatgatccaggccgccgcctctcgtggcgaggacctagacggattcgtgatggacttcgtctacccgtccatcaagggcccctccatcgaaggccgccgtgtggtgctgttggatgcttggctgtccgaaaagtcgtacgtgcagaccagctcgctggtcaccctgcgcaacggcaatgagctgagcctcgactttggcatagtggagcagctgggtgccaaggtcgtggccatcgcctcgctggtcggtggcggtgccaaagacatcaatgtggtcaacccctccaccggcgacgagcaaacgctccccttcatccaggtcttcgacgaatccgaactgcggtaaatccacctttgacttccctcgcataaagtcagccgggctgagccgcgaagttgactaagaggaaccggtgaatagcgttatcgaggagaaagattgcacgcacccaaccagatttctttggctgccaaagcttcaggtgaaccggaattccgtgaaatcggccttgggccgtggtctgagacccatcccggcgagcctcgtcccgacgatccgacttctccgaattatgacggtcgtttcgactcggtgctgttgaatgacggcgaccgccgcaacgtattggatcgttaccgctactggaccgtcgctgccattaaggccgatcttgacgctcgagggcgtcatgacttcgaagttgcggtggaaaactggacccacgatttcaacatcggttccatggtccgcaccgccaacgccttccaggccaagcgcgtacacattgtcggtccacataagtggaatcgcaagggcgcgttgatgaccgaactgtaccagcacgtcgaacaccacccctccatcgccgaactggtggaaagctggcatcatcgcatcgccggtgaaatcgcctatgaacgagccaaggccggtgccgccgccatccatgcgcatgatgtggctgtggatggagacaacaagcaccttcatgagctgctggccgaaatcgatgcttgtgatgcgcgcatcaaggagcttcaagccgcccgcgtcatcgccctcgatatcattcccggcgcagtgccgatggaaacctataccttccccaagcggtgcctgctgctcttcggtgcggaaggccccggattgagcgagaaggccctcgaattggccgacgatgtggtctacatctctcaattcggttccgtgcgctccattaatgcaggcgctgcggcggccgtggccatgcacgcatggattgcccaacacgccgtatcaggcgtgtagccatgcgacgacaatcctgccgcatctgcccaatatgggccacattagaggcatgatctacgccaccaaatccatcgccgcggcattaattcgcatttgccgccggcatcgtcggcatcctgctcgccgcaggcatcagcagctccgcgcagtccacactggccgaagccgttaaaccggactactggattcccgaatggtggcagtccggcctgattctcatcgcctgggctgccgccgcatggatcggcggtctcatcatcaccggaaaagcggatatcggatatcaaataacgcgggttactgctttggcggttctgcagtgaccatggttctggtgactctgaccccatggatttgaccactgtggttcactgcgcttaaccagctcccatcactgttccagcatgaggtatgccggctgcccgcagcttattgagtaaaggatgttgttgcatcacctcctcataggtgaatcggacaatggtgtcgactttggcccggtacagtgccgtctcccgttctttctccgcctgaactgcaccacgaacacccttgcggtcattcatatccgggttcacatatttttcatagccatcgaattcgcccacgataagccgattctcaggtagccgccagaggaaatccacgcgatacagagcaccggtttgcgggtcggtgatgttttgttgcagttctggggctaataggccgcctgcgatgatggtgcctcgtccaagtgactcgccaccattctcactcgccggattggcataatgcagtaggcggaatatcggcgtgcaatcacgtcgcatagtgctgcacacattcagaatgtccgtgatggcgacgccgttgcgcagcgccgaatcgataatgggcagtgcaaatcggaagtcgacggacagcccgcaatccaccaccgttctggctttgctggtcaccgggagtccattggcatattctggcgtgctgcttgacgtgaagatgcgtttgacctttgcactgctggcgttggggcctcgtgatgttgtggcgagagtgatggtgccagcatgaagatgccattggtgttcaaaatcgtggatggccgctgccgtgaccccggcgaacacccaatccggatgtctgttatgaagagttcgtgcaatatgtctgatacgttcgtcgggttgcagcgaatcccagtattccgaagcggcgtacatgttggggaatacacgtttgagttcgcgcgcctgcacgcgccgagccagcgccgagcggtgtgccttggttgttccataagcgcactgttgcgttgcttcagccttcgtgatgagtatgtccactgctttgtgatgtttcatgattcgacggtatgccaatggtgaacacggtgtctatctgtctggggttatgtggttctagcttcggtgcctagatgtgtgtttttgcctgattatcaggcatctgaccgtattggactgattatgtggattcttttgggtgggtatgcaaaatgtggataactggcgaggtgcgcagggcgattgtcgttcatatgttcgatgtaggtgtgtttgggctcattgtgagcttattagggtggccatgcagatacttcagtggggcacatttgcggttgggccgtggcgttgcctcgctgcggggcgtctcagcggggcgttttattggttggaccgcggttttgttttgctgggatggctgagcggggcgtttcatcggtcagctcgcggttttgctctgctgcgagtcgtctcagtaaggtgaacttgcggtccggcaacggttttgccccgccgaagaagccagcagcggggcaaatgctcgaccggcttgagcttctgattcgctgaagggctccagtaggcgggaaaatgaggcttcccgacaactgcgtgtcacatacggctcatatagttatggccatgccaacattttcacgtgaagaaatcgtgcatttgggcgatctggcccgaatcgcgctcaccgatgaggaaatcacccgtctgcagggcgaactgaacgtcatcgcagactccatcaacaaggtccaggaagtcgcctccgacgatgtgccgccgaccgccaacccggttcctctggaagcctacctgcgcccggacgtcgccgaaaccccgctcacgcaggaagaggcgctcgccggtggcccgaagaccgaggccggcatgttcgtggcaccgcgaatcctgggaagcgaggagtaatcgatgagcaacgaaaccgcaactctcgtcaaactgtctgctgccgagcaggccgctgccatcaagaagggcgacgtcacctctcgtgagctcgtcgaagcccacctcaaggtgatcgaagccgccgagccgtccatcaaggccttcctgaaggtttccggcgatgtggctctcgagcaggccgacgccttcgacgccaagtccgccgaagacaaggccgccctgcctgagctggctggtgtgccgatcgccatcaaagacatgatcgtcaccaagggcattgagaccaccgccgcctccaagatcctcgagggctgggtgccgccgtacgacgccaccgtcatcgaaaagctcaaggccgccggcatgccgattctcggcaagaccaacctcgacgaattcgcccagggctcctccaccgagcactccgcctaccagaccacccacaacccgtgggataccgagcgcgtgcccggcggttccggtggcggctccgcctccgcagtcgccgcattcgaggcaccgatcgccctcggcaccgacaccggtggctcgattcgccagcccggcgccctgaccggcaccgtgggcgtcaaacccacctacggcggcgtctcccgtttcggggccatcgccatggcctcctcgctcgaccagatcggcccggtctcccgcaccgtgctcgactccgcactgctgcag

SEQ ID NO: 1936 - DNA, 5431 bp, Unknown
  R17_18m  MAG No. k141_5573
cggcgctcgtcaaacggcagtccggccgcgagaatcgtctccttggcggcccgcatacgaatatcacgcgagccgggaatgatgttgggattgttgggatcgtgattgtcgccgacgatgccgatgcgcgcacagccacgcgcgataaggtgttcgattgccgcccgtgagccggcgtcgctcggcgcgttcacggtgtcgatgggcaggctggtgtcgtagttttccagcatgacggccgggtgccgcttcaggatatcgaccgcacgtggcgcattgatggcgatgatgccgtccgaaaacgtgtacgacagatcgttatcgtcggtaagataccgggacagttcgatgagcatgtgcgagtcgcgcttgtgcacttcctcagccacacacatggccagatgggagaaatagtcgccctcgaggcccgaggtaaggaaggtgatggtatcggaccgcccagaacgcagggaccggccagacaggttgattttgtagccgagtttgcgggcggcgtcacacacgcgttgcgtggtttcgggcttgacgtaatccttgcctcgcagggccgcggaggcggtggtggcggtcactccggccagttcgccgacatcctttaaggtcaccatcgttaccatctccgcatatcacgaaccttatcgataagaatccatagtaccgcccacatctcagccgaggatgagaccctcggtcgaggccctgcccggcgactcgaacgccgcggtcaccgtggtgagcaccgacgctgcaaacgaaaacatgtcaaaccaagaaatggacatgacggagtcattgttttccgagagggatatgccgcgtccacgggcagacgtcacgtatcaatcacgccgataccgtcatataactgttttcgatgtgagaaagctcatagcttccgaccacagaaatcagccacagcaaccccataacagcgttatagttctgtttgtcggcgtcgacaagagccagcagcgccgatgaaatgcacaccaaggatgtttagcgaattgttcgcagttcgcacgattcgatttgattcgattcgtgcagcccggatggttcacgggggcatgccgtcgtgatgtgcgtggatatgggcgatacgactctcgttcgggtcggcaggtcatcgtacaccagttacgaaaggatccgtccatatatggcaaggtttaccgagaatcgttggaccagcgcgattattcccgcactgctgattcatatcccaatcggtaccgtctattgctggagcgtgttcaagcagcttatcgctgaccgtctccacgccagccccgcctccgtggaatggggcttctcactcgccatcttcttcctcggcatgtccgccgcgtttgccgggccaatggtggagaaaaacatcaagaaatccgcactcgtctccatggtctgcttcgtggtcggcttcgccggcacgggcgtgagcatcgccctgaacttcctgccgggcgtgttcatctgttatggcgcgatcatgggcatcggcctgggcgtcggttatctgactccggtcaagaacctgatgctttggttcgccgacaacaagggcctcgccaccggcatcgccgtcgccggcttcggcctggccaaggccattgccagcccactgatggaatatctcatcggcacggttggcctggtcagcatgttcttcatcctcgccgcggtctacgcggtgatgatgttcgtcggcttcctgctcatcaagcgtccggccggctgggtgtacgatcccgcgacctcacacgtcagccgcaagacaatcctcaagaagcccgtgttctggggcatctggatagccttctatatcaacatcacctgcggcctggccctcatcagccaagagaaggacatcctgcacgatgtgctcagggccttcccgcagtatgccaacctgagccccgccaagtttgccgccgccatctccggcatcatcggactggtgctcgccgtggactccgtgttcaacacggctggccgcgtgggcttctccacactctccgaccacctgaagcgccgcgagaccgtctatcaggtaatcttcatcatgtcgattgccgtgtgcttgctgcagatcttcaccaacagcatcggcaacgctctgctgtgggccgtgctggccatgctgttcctcgtcaacgcgggctatggtggcggtttctcgacgctgcccgtgctgcttgatcagcacttcggcaccaaaaccgtctccaccacgcacggtctgacgctgagcgcctgggcgttcgccggtctgtccggcaaccagttggcctcgttcgtagttgcccacgcgcctgatcaggcccaccgctacgccgcgctgattccggtaatcaccggcctgttcgtcgtggccctgatcagcatcagcctggtcaagtacctcggcgacagaaacgccacgaaggccgtcgaagaccgaggctgagctgccgcaaaacaacgattctgccggagtcgggcgcatcgatcgcatcagtcgatgtacgtcacgattttggcagaatcgttgttgttgctgttgagtacctgagatcgtgcggcttacgcgccgaccagttcgagcatttgggggatgctctttttgccgaattcgacttgctgggtgccgtcggcgtgggtgatgacgatgcagggcacgctcatcgcgccgtactggtccttgagttcggggaagtgcgagacgtcgtaggcttcggcgcgcacggccgggctcagggaggcaatgcgctgggaagcaagcacggtttccggacacatcgtgcaggtgagcgagacgaggatcatgatgttcagcgggtccgtgatggacttcgcgcgttcgaccaggtcatcgcccagcggctggccgggaccggccgcattgtacaggccaagcacgaacgagttgaactcgtggccggaaggtacgccgtggaaggccagaccggtgaagaccagtgaaccattgccgtccttgccggccttgccgtcgccctcagccggcacgcagatgcgcacggtcggacgggcgagcggcaggacgccggcgacgtcgaatgtggcgcggccggaatcgtccaacgaaccataagtgggcagttcggtgccgtccggcaaggtgacggacagcggttcgccgaccaccaaagaagtaggcacagaagcaccatccaccgccgtgatcagccctgcggcatcgacggcgaccgagttcagcttgccattcgacaacgcgactatctcgccgatgaagccctgcaattccgccgaaagcggggtgctgtccagctcaagggcaagggtgaccgggcgggtcatgcggccgaagaccacgccaagctgctgcttgatggcggcggagaacagttcgccgggcttcttggcggcgctggctgcgactgcggcatcggcgctgcgtttggcgggagccggggcgggcgtcgtgccagcggccgaggcggcggaggcggccttggcctcggactcctcataagcggaagcagtgggacgcggcggcaccaagccggttttctcgctcatctgcttggcgtaacgctccagttccacggcggcaatcgcaccgtcggcggtggcggtgaccacctggcgcaggttcttgacgcgcagatcgccggccgcgtacacgcccggcaccgaggtttcgaggtagtcgtgcgtgaccacgtaaccgtgatcatcgagctccactacgccgcgcaccaaatcggtggcgggcacatagccggcgaacacgaagacgccgaaggtgccggcgtcggcgggcttccacgtttcggtctggccggtggcaaggttcaggatcgaggcttctcgcaggcctccttggccggcggtgacgcccttcagctcgacctgataacgcacgtcgatcttcgggttgttcttggcttcggcggccactgcggcgtcgcatgtaaagtccggttcgcgcacgagcacggtgactttggaggcgtatttggtcaggaacacggattcctcggccgcggcgaatccgccgccgaccaccagcacttccttgccggtgaagaactcgccgtcgcaggtggcgcagtaggccacgccgcggccggcgtattcggcctcgccctcgaagcccagcttgcgcgggctggcgccggtggcgatgaggatgccgaacgtcttgaggtcgccgcgtgaggtgtgcacggttttgatgtcaccatccacgtcgagaccggtggcttcggcggagaggaattcggcaccaaagtcctgagcctgctgacgcatggtctgggtgagcgcgcggcccgtggtgcggcccacgcccggatagttgacgacttcgttggtgatggtgatctggccgccgaaatcgtccttttcgagaatcagcacacggtagcgagcgcgggccaggtacaggccggccgtcaggccagccggcccgccaccaatgacgacgacgtcatagagattgttggtctgagtcatgaaaactcccttacatacactggctcccctctctgaggggagctgtcgtagtgagactgagggaagcatatcggatcaggctagctctcgcgagcactccccctagtcgctttcagcgacagctcccctcagagaggggagccaaggttaccgcctattcagtgtcgatcacagctggccgacgaggtcgaggctgggctcgatggtttcctcgccaggggtccagttggcggggcagacctggtcgccgtgctcgtggacgaactgggaggcctgcacgcggcgcagcagctcctcggcgttgcggcccacgttggaggagatgacctcgtaggccacgaccttgccctccgggctcacgatgaagtcgccacgctcagccacgccatcggcctcgttgtaggtgtcgaggtccttggccagcagggcggtcgggtcggcaagcatcgggtactcgatcttggcgatcttctcgttggcgtcgtgccaggccttgtgcacgaagtgggtgtcgcaggagacggagtagatctcgcagccgatttccttgaacttggcgtagttcttggccaggtcttcaagctcggtggggcacacgaaggtgaagtcggccgggtagaagaagaacagggaccagtggccgagcacatcgtccttggtcacttcgtggaactcgttgttctggaatgcgttcaccttgaaatcggtcagttcatgctgcagaagagtcattttcggtcctttcaggattcttcaggcgattaccagaacccatcgtagtgtggcggcacagggctcgcacggacagaacatatgagccttatcacaccagccacagcccttgtgctgactatcataacggcccacccttaaacaggattgagattgtgagcgttctcattatgctttgggcaaagccagtttatgc

SEQ ID NO: 1937 - DNA, 28642 bp, Unknown
  R17_18m  MAG No. k141_6215
aggagaaacaagataatgagccagacggcttacagaacacatcatgccactgaagtgaccgaggccctggtcggccagaaggtcaccctcgccggttgggttgaccgacgccgtgatcacggtggcgtggccttcatcgaccttcgtgattcgaccggcctcgtgcaggtcgtcatttacgacgaggatatggcccgcccgctgcgcagtgaattcgtgattcagattaccggcgaagtgcgcctgcgcccggatggcaacgagaacacccatctggccaccggcaagatcgaggttgtggccgagaccattgagatcctcgccaagtccgacgctctgccgttccaggtttccaccgctctcgagaatgagtccgagaacaagctgccgggcgaggacgtgcgtctgaagtaccgttacctcgacctacgccgtccgtccatgcagcacaatctgaagctgcgttccgacatggctaaggccgcccgccacgcgctggaagacatggacttcaccgaggtcgagaccccgaccttcattaagtccaccccggaaggcgcccgcgacttcgtggtgccggcccgtctggtgcccggttcctggtacgccctgccgcagtccccgcagctcctcaagcagctgctcatggtctccggtgtcgagcgttactaccagctcgcccgctgctaccgtgacgaggacttccgcgccgaccgtcagcccgagttcactcagctcgatatggagatggcctacgtggaccaggaagatgtgatggccatgactgagaaggtcatcgccgccatctggaagtccgccggctatgaggtccagctgccgctaccgcgcatcacctggaaggatgcgatggacaagtacggctccgacaagccggacctgcgcttcggcaacccgctggtggaactgaccgagtacttcaagaacacgccgttccgcgtgttccaggccccgtacgtgggtgccgtggtcttcaagggcggtgccgccacgccgcgtcgtcagttcgacgcttggcaggattgggctcgtcagcgtggagccaagggtcttgcctacgtggtcttcggcgaaaacggcgaactcaagggccccgtcgccaagaacctgtccgatgaggagcgcaacggcctgcgcgaggccgtcggtgccgaggaaggcgacgccgtcttcttcgccgccggttctcgcgagtccgcccagctgctgctgggtgccgtgcgtgtggaactcgcctcccgcgaaggcctgctggatccgaagaagttcgctttcacttgggtcgtggacttcccgctgttcaagcccaccgacgatccggatgatgacgatgtggctgtcggccactccaagtggacctccatgcaccacccgttcaccatgccctccaaggattggatcgacaagttcgacaaggatcccgagcacgccatgtccgattcctacgacattgtctgcaacggtgaggagatgggcggcggttccgttcgtatccaccgtgacgacatccaagcccgtgtgctcgatgtgctgggcatcaccaaggaagaggccgacgagaagttcggcttcctgcttgaggcattcaagtatggcgctccgcctcacgcgggtctggcccttggctgggaccgcaccgtgtccatcctggccggtgctgactccatccgcgacgtcatcgccttcccgaaggccggcggcggccgcgacccgctgaccggtgctccggccccgatctccgacgagcagcgcgccgagaccggcgtcgactacgacccggacgccgacgaaaactaatctacggagcgtataccgcctttcctcagcactcgacgcaccttagtgcgccttcggcttcgaacggcggtctccgcatgcgtagattaattttcgaggagtaatgctccggtgctattagccgcaaatggcccttggaataattccaagggccatttgctttttgcgggtggggcccaatgtgccaaatacctgccaaggggtgccaaatactccgcccgatggcacctccgccatgcggcaaacctcgcaccatgcggtgtcccccttggcgtttgccgattatcccccccatggggcggtaactttctcatggggcggtaaacaacccatggggcggtgaaaaccccatggggcggtaggtcaaaatggcttaattccgcggtttcacaatttcttcaaaccgccccatgggcaaattaccgcctcatgggggaattgccgccccatgagaagtaatcgcaactccgtatttgatcaatgttgtgaggctttgttgtgttttgcttgtttccgcctcctgtattcccctttgcgcgcattgatggtaaggctgccgtctattaatacccggcatgaaggttgaggacggccaggaagcggtatttgcatcgcggtggcaacctcttgtgcgaaggcacgttgtttggcggtattccacaggtcatcggcgaacacctcgatgacggtccagcccaattgccgcagacgtcgacgtttttgctggtcccgcacatattgtttgcggaagcgacggtgatgatcgccatcatattcaatagcgactttgtattgtggataagccatgtcaacggtgtaggtgtatccgttctctgaatcggtaatgccatattgtgtttgcggtatgggcaggccgaaaagcataagcgccaagcgtgtacgagtttcctgaacggaatccgatggttttacgagcttcagcgccgcctcacaacgcgcacggccaataacgcggtgaaaggccgttagtcgttgagtgaattgttcaatggcatatccataacgtctgatgagcgcttcagccagcaccactaattcagtgaggttgagatattgggcaaactgtatccacgcatccatgggatgcatgcaggttacgccgtttgagaaagcgatactgttgaactttgcattccatatgcgatagtcgacattgtccaatgaagagcgggtccccttgctcctcaccgtcacataaaaatccttctgcggcaacgtgctgtgcctcggcaactccacgccgcataattccaatgcggtatacagcgagaaacacaacgtgcgtttcgtgcgcactttgcccagcagattccaacaggccgtgttcttggccgtggcttgggcgtcaagatctttgcgcagatagttgttgatttcgccattgtgcggcgcttcgttgtatccgttcatgcgccgagcgtagcgcattccacggtggcacaggggcaaaaccgaaaaatggggataacttaagcggcgcgaaccggttatccaccggcatatcgtgtgccgcgcccggttatccaccgcgcttcgggagtgtcgtccaccgtataacagcactcatcgtgtgcgaacagctagccacgctcaaaatgcctagcacatttatacgaatacgacatgggaaacggcgagaccagccccacacaatacaaagtgaccgccagccatgcgcccgactgcggcatacacggcagcaacgccaacgacaccaaggccaaacatggaatcagcagataggacaacacgtgcccgctttgccgtcgcagcaacgtctcagccaccacgcagcaggcaatcagcgcacagcagacgccgagcgatgcgcgactcagcgagaatgtatgccgatgcccaatgccgccttcacgatgtctgatgcggaaatgagacatcgactgagcaactgtgtggacatactgtgaacacgttggaaacgtcggtgtgttatcctcccactcatgtctgaaacgaacaatgaaacagcagtgcgttcgcgcacgacaagcacaacatcaccaagcaaggccaaattgaccccgctggttcccggcaaagaggacctgaaccgtccgctagtcgaactgacccacgtcgaaaagcacttcggtgctttgcacgtcctgaaggacatcaacctgaccgtcaccaagggtgaggtgctggtggtcgtgggcccgtccggctcaggcaagtccacgatgtgccgcaccatcaatcgcctcgagaccatcgattccggcgacatccgcatcgacggcaagcccctgccacaggaaggcaaggagctcgcgaacctcagggccgaagttggcatggtgttccagtcgttcaacctgttcgccaacaaaaccattcttgaaaacgtgacgttggccctcatcaaagtgcgtcacatggacaagaaggaagccgagcaactggccatggacctgctcgcccgcgtgggcgtcgactcccaagccagcaagatgccctcccagctctccggcggccagcagcagcgtgtggccatcgcccgcgcgctcgccatgcgccccaaggtcatgctgttcgacgagcccacctccgcactcgacccggaaatggtcaacgaagtgctcgacgtgatggtcgaactcgcgcatgaaggcatgacgatgatctgcgtgacccacgagatgggcttcgcgcgcaaggccgccgaccgcatcgtcttcatggcggacggccagattctcgaagagaacacgcccgacgagttcttcgagcatccgcagaccgaccgtgccaaggacttcctctcgaagatcctcacccactgacgaacccactgaaagacgggtacgcaatccaatgacattcaccaatacgttcaaacggaaggtttgccgcgtgatcgccgcgctcgccgccgtggcctgcacaatgtcgctggccgcctgcggcgcggacgaaaccggcaagatccgcatcggcatcaaattcgaccagcccggcctgggcttcaagaagtccggcacctacgtgggcttcgacgtggacgtggccaagtacatcgccaagaaactcggctattccgaagaccagatcatctggaaggaagctccctccaagcagcgtgaggccatgattcagaacggcgacgtggacatgatcctcgccacctactccatcaccgacgagcgcaagaaggccgtctccttcgccggcccgtacttcgtggccggacaggatctgctcgtgcgcaaggacgacaactccatcaacggccccgaagacctgaacggcaagcgcctatgctccgtcaccggttcgacctccgccgccaccgtcaaggagaagttcgcctccgaagtccagcttatggaacagcccggttacgccgaatgcgccactgccctgttctccggcatcgtggacgcggtaaccaccgacgacatcatcctggccggcctggcctccgcctcgcgcggcaagctcaaggtggtcggcaaaccgttcacgcaggaatactacggcgtgggcatcaagaagggcgacacgcagctggccaccaaaatcaacaacgccatcgtggacatgattcaggacggctcgtgggagaacgccatcagcgataacaccaagggcaccaactacacgcccgacgtacgctacaacccgcccaccccggacgaaggagaggaggcctgatgagcggattcctggaactcttcagccagtatgacgtgctcggcgcgtttctggtcaatatcgaactgaccctatggtccgccctgttctccctgatcctcggcgtgatccttgtggtgatgcgcatctcgccgatttcctcgctcagggccgtggccggtgcgtatgtggaactgttcaagaacctgccgctgaccatcatcatggtgttcatggtgctgggtgcctacgcgcagctgaagctcagcttctccgacaccttcaccacgaacttcttctggctcgcggtcaccggcctgagcctgtacacggcggcgttcgtgtgcgaatctctgcgttcgggcatcaacaccgtgccgattggccaggccgaggccgcacgagcgctgggcttgggcttcatgcagtccgccaccgagatcattctgccgcaggccttccgaggctccgtggcaccgctcggcaacacgctgatcgccctgctcaagaactccaccgtggccgccgccgcatccgtggccaccgaaacatcctcgctgatgagcgagatgatcgagttccgtcccgacgtgatcatccaaatcttcctgatcttcgcgctcggctacgtgatcctgatcatccccatcggcatgctcaccacgtacctgtccaacaaactcgccgtaaggaggtgacggatatggccgatacttcgaattccgtgctgttcgacgcgccaggtcccaagggccggcgcaccattcgcatcgtcaactggatcgcgggcattctgttcgcggtggtgctcgtgtttatcctcatgcgcctgcacaacccgccggacggcgagaaccagctcagctgggagctgtggaagcccgccgtcgaacgagaggcgtggaccgacttctacctgcccggactgtggatgaccatcaaggccaccatcgtggccgtggtgggtgccgtggtgttcggcttggtgttcggcgtgggccgactgctgccgaacccgttggtacgtggcgtctccgccgtgattgtcgagttctgccgtgcggttcccgtgctgctgctcatgatcttcttctggcgatggttcgcgttcgcgggcctgcccagcccgtcctattgggccgtggtgctggccttggtgctgtacaacggttcggtggtcgccgaactggtgcgctccggcgtcggcaatctgccgggcggccagcgtgaggcctcgctcgctttgggcctgaccgaaacgcagtcgctgatggagatcgaggtgccgcaggccgtctacgccatgctgccggccgccgtcacccagctggtcgtggtgttgaaggacaccgctctgggctcgatcatcatgtataccgacctgctgcaggaatcgcgccgactcggctcgatgtacttcaacatcctgcagacgctggtcatggccgcggtgatttacttcatcgcctgctggctgttgtcgaggctcgccgaatggctgccttcgcgcatgcagcagcgtacggccgcacccgccgaacccgagcccgtggcgccgatcgccgccggcgacccgtccaatgtcaaccagatcgctgtggccaaggaggtcgaagagctgccgctgggcggtacgccgcgcaaataccatgtgcatcaccgtggcaccaacgcctcgattcgcaactggcggcgcacccgctacgaacagggatatgacgccacccagcccgagtcacaggttgacccggaaaccggcgaattccaggagtctcaaaagcctgaggacaagccagaggcctgacggtcagctcaatcgccgctaagccggcacgaagaatttactgagtgtttgactgggctccggctacgtagccttcacggaggataggttggaacatatgaagatgttccggcacctatcctccgtttttgctattgcgaccattgcgccgctggcgttggcggccacgctagccgtgacgcctgcaatcgcacaggccgaccagctgcccaacctggattgggtggcattgctctccgactacgaaaagaactattggcaggcccccaccgatgccgaacacggtggcaaggtgctcgacgccgatacaatgaaactcgacgaagatttggccgtggccattaaccacaaagccgccgaaaatctcgataaggatggcctgaacgcccaacgcaagcgtgcgctcgtcgactccgatctgcaagccgaggaagccatgccggacgcgctcggtccggtgcttggcaaatatatgagcgaagggctcaaatccgggaaactcaacgccgtcgccgatatcttctcctttaacgtggcctccacctacgcctcaaaacgtgcggccatgcatccgcgcccctatctgaaccgtgcggaaagcagctacggcggcactaacgatctcgccggactgcccgccacgcttgacatcaagcaatcaccctcatggctcgaacacgtgcccggctactcgaacttgcagaaaaacagttcctacccctccggccacactaccggcgcctattcgtggggtatcgcgctggccggcatgattcccgaactcgcgccgcaaatcatggcccgcacttcggaggccggcaacaaccgcatcgtgctcggcgtgcattatccgcttgacatcatgggcgggcgcattggcgcatccgcccagaacgggcagtactggcataacgaattcgcttcgtccatcgtgcccgcgtcccggcagctgcgggactatctggtgtcccgctgcgccgcggacggccacggcactaccctcgccgcctgcatcgccaacaccaaggcctccggttcgggcggctacaccaacgattttctggacccggtggccaccgagccggtcgcggaccaggcctcggccgtgcgcgtctacaccgcacgcctgacctacaccttcccgcaagacaccgcccagtccggcgctgatttcgtggcaccgcgcggggcggcggacgtgctgcgactggcctatcccgaactgcacgccgatcagcgcaacgcgattttgaaagccactgccttggattccggataccccctatggcaatcgagcgacggctggcagcgtatcaactgggccaaagccctgtgcgcccgcgtcaccttggataagcacggcgatgtggccaaggtcgagaccgccgaccaagtggcgcttaccggcccgagtgtggtcaatgcccagtacaccgacgcgggcaatcacccggcgtcggatagctcggcgggtgaaaacagcgccattgcggccgggccggatctcgccaccctccatgccgcgcaacgaccggcgttgatcagcgtagccatcggtaccgctgtaatcgcgattgtcggcggaatacggacggttcgacgcaaatccaagaaccagcttcagcggtaattcagccaaagttcagtttggagatctgccgagtttgccttcatacggtgtcggcttcatttctctctcatactctcggggtgtcatccgccgaagagcatcatgctgcggcggcacaacccgaggaaggaacgggagtaatgttccacaccaacaatttcaccgcgatgtcgcggcgcgccatcgcgctgctcaccgctgcggtgacactgagcagcatcgccctgatcggcgtgcccgctgcggctgcggacgagcagcaggccactgccgaacagaacacggctgccaaaccatccgtaatcatcaacgaggtctatgccggcaatacgaaagctgccggagacccggatagcaagcgttgcgattgggtcgagctcaagaacaccggctccacagacgttgacgtgaagggctggggcatctacgacagcggcaagaaagccaagaagcactacaccatcggcaccagcgaagtaacgaatacggacaccgtcatcaaagccggcggatatctggtggcatacatcgaccccgacaaggccgagcccggcctgggttccgatgccgacgaagcctatctgaccactaccagcggcgactttaccgatagcgatgtggtggattccacgtcatggaataccgatacaaccggcgtgaagaagatgagcgacagtcagtcgtggtcccgtaaggacgatggcactttcgcgctttccgatacgcccacgcccggtgcacagaacgtgttcgatgacccgactccgactccgcccgccggcgagaccatgaccgtggacgcatggtcgggattggccgatgtgaccacagtggatgccgaaggcgaatttggcgccaaaggacaaggcggcgaccacactgacggcaatctgtctggtctggtgtatgaagccggtaaagacggcaagcaaggcgtgctgtgggcggccgacaacgatctgaaccccacgctcggcaacaccgctgataagggccctggctccatcaacaagttcgtctaccagaacggcacatggcagcaggatcccactgatggctggaccttcaccaacaacggtcagaccaagggcggcaagcagctgcacttcaaggacggcaagggcggtgtggactccgaaggcatcacgctgatcaacggagattcatccaagggcatattcatcggcgccgagcgcgacaacgaaaacaagaatgtgccgcggccttccattctgcagtatgacgtgaccgcgaaaaccaccgacgccaacggcgacggagcgcaagagctgaccgctacgcacgagtggaatctcatcgcagcactcacgcagttcggcgtgacgctgggccacggagcggacgccaatcttggggtggaaggcatagcctttattcccgactcggtcctgaccgccaacggattccagtccaaccttgacccgaagaacgtaatgacctacgacccggacggtttcggcaatgatttcggcggtctgttcttcgccgcactggagaaaaccggtcatatctacgccttcgcactgcaaaccgtgaatgatgaggacctggtgcatccggtggccgacatcgacctgccgcagtccgcggtgaacgccggctatgatggcccgcgcgatctgacttgggacgccgagcacaaccagctgctcgcccaaagcgacaatgacgcgaacaccggtgccaaaatcggcacctacgaattcaagaacggtgtgctgcagctgaccaagctgaccgacactccggatgaaatccgtacgcagaacaccgaaggctttgccatcacccctgataccgaagccaccaaggtagtaaatggcaaggtgtacaagccggtgttctgggcagacgacggcgtgaccaatggccattcattgcgtatgggctatatggcaaccaatcagccggttcccgccagcaccaccatcaatctgctgaacttcaacgatttccacggccgtatcgacaagaacctcaccgtgccgttcgccgccaccatcgagcagctcaagggcgaataccctgactcatcactgctgctgtccgccggcgataatatcggtgcttcgctgttcaactcttcggtgcagcaggaccagccgaccatcgatgtgctcaatgctttgggcgtcaaggcttcggcggtgggcaaccacgagttcgaccaaggctatgccgaccttaccgatcgtgtgattggcaaggagggcgcgcgcaacgcccaatgggattacctcggtgccaacgtgtacaagaagggcaccacaaccccggctctgcccgagtacagcattcaggaggtgaacggcgtgaaggtcggcatcatcggtgcggtcactcaggaaaccggcacgttggttgctcccggtggtgtcaaggacatcgaattcggcgatccggtggaagccgtgaaccgtgtggccaagcagctcaccgacggcgacgaatccaatggcgaggctgacgtgattgtggccgaataccatgagggtgcagcctccaatgaagatgacgccacggccaagcccacgcttgacgagcagaaggccgccagccccgtattccagaagattgtggacgataccgatgcggcagtgaacgtgatcttcactgcacacacccacatgaagtactcgtacaccgatcccgcgcacaacaaccggccgatcatccagaccggtagctatgccgccaacatcggccaagtggtgctcacctacaacacggccaccggtgcggtgtcttacgacaagtccggtaacacggccgtgcaggtggcttcgcagcccgccgacaaaaatgatccgcactacaacgattacgccgaatacaacgatggcctgctcgccgccgcgaacccgactgtcgccaaggtgagggacatcgtgtaccaggcccttaaggtggccgatgaaaagggcggcgagaaggtcggcaaggtgtctgcggatatcaccaccgcattcaaggacggcaagcgtgacgaccgcgcctccgaatcgaccatgggcaatctggtggccgatgcgctgctcgattcgctcaaaagcgaggaccacggcgcggccgaaatcggtgtggtcaaccccggcggtctgcgtgccgaattctgcaagtccggcaccaatgacgcctgcacgctcgatgccgacggcaatatcacctacgcccaggccaacgctgtactgccgttcctgaacaacctgtggaccaccacgcttaccggcgcgcagttcaaggaagcgctggaacagcagtggcagacgaacgcggacggcagcacgccatcgcgcgcgtatctgcaactcggactgtcccacaacgtgagctacacgtatgatccggatgccgcgcaaggccatcacatcacctcggtgaccgtcaacggtgagcctctggacctgaaacgcaactaccgtatcggttcgttcagcttcctgttggagggcggcgataacttccgcgccttcgcccaaggcacgaacaccaaggacaccggtttggtggaccgcgacgcctggatcgactatctcaaggacaacgatccggttgccccgcgctacgaccgccgtgcagtggccgtcaccggcatcccgaccggtgcggtcaaggccggtggctcgttcaccctgcacttctcgaagctcacgctcacctcgctgggcgtgcctgacgagacgaagctgaccgccaccatcggcgagcaggtggtcggcgaagcgcaggttgcgaatggcgataccgccgagctcaaggtcatgattcccgccggaaccaagaccggtgatataagcctgacagtgaccggtgcgaccaataagaccacggtcgctctgcccgttgccgttaccggagtgtccaccgggacggacgacaaggataacggcaaccatagcggtagcgtcaatgccaatggcagcaccaagccacagcagaccgaacgtacggccgataccggtgcctcggttgcgttggttgtggttctggcgacgctgttcgctgcgggtggcgtcaccatcgtggtcaagcgtcatgatgcggcgcgcaagtagcgcttgaagccgcgtgcgctggtcggatgcttcagcatgatgccgacgatttgccggtcggtgatgatctctttctcgtagcagatcgtgccgtcttcctgatagctcaggtatgtttcgggccgtttgccgcttctttatgtactgcaaacggacgggggattggccgatagggacgagggagaacggagagagtatgaagtgccaggtttgcggaacggagatgccggagggaagccgattctgcacggaatgcggtgcgccgatggcacagtttgcgccaagcccaagtcctcagtcgatggatggcccgacgctggtaccggctgctccccagcaggtgccagtgggttcgatgccgctgcccccaagtttcaacacggcgaccgcacctacttcggcattgtcgacggcgccaggcaacggtggcgctgcgcagccgcgttccggtgggtctgccggaaagaagatattgctggggatcgtctgatccaggcgtgataagcggcagcaacgttacggatgacgaagccgaaaataatgcaagcaaggcattggattggcaggtcgagcacgacaaggactccgcagagctgttctattccacgtataccgcacagctgtccagcaagcgtaagggtatggaggctgaaggcaagacctggaactaccgcgatattcttgcgcaattcatcacgatgcacaacaagaattcaaacgtactgcttatctggtcgggtgactggcccgcctacagcagcaattccgacaaatactatgtgattcttgccggtgagggcttcgactcgacagatgaggcttggaattggtgcaaagccaacaattacggtccgaacgactgcatgcctatagatttgcagtaacaggcgaaatgtgaatgtcgctacgttgctaggtctcctgagttacaagacgtacaatcgggagcatgaccaaggacgacgacagaaccaacgagcctgaagaggccggcaagtggggtacggccggaaaatcctcaggaaagaacaacaagaacggcaagggaaaggaatccaaaaccgatcgacggatcgacaaggtattacagctcgcggtggatcgcatagacaccatcgactccagtgccagcgtgcctgaacgactggcgcgtgcggcgaaatccagtgaactgctcagcgccgtatggtcgttgccgcccgctcaacgtcttatgttccaccacggcatgcaggtcactgatgtcgaaggcgattccactcccggattcgacggcaataaagaggacgccgagacgttcatttcgatcagcgcctccgaaatcgcccgataccagcggctcatgtacgcgaatggcgtcaaaggctcgacacggcggctgctcatcgtgctgcaaggcatggatgcctccggcaagggcggcattgtgcgccacgtgttcagccaaggcgacccgatgggcatccattaccatggcttcggcaagcctgcggccgaggagctcgaccacgacttcctctggcgtgtgaagcgtgaattgcccaagccggggtggattgccgtattcgaccgctcccattatgaagatgtggtcatgccgcacgtctatggcacctatcccgaagacgtatggcgtgcccgctacgaccagatcaacgatttcgaacgtgaactggccgccagcggatgcgccatcctcaagatcttcctcgtggtaagccaggaagaacagaaaaaacactttcttgggaggctggatgatcccaccaagttctggaaattcgatatctccgatctcgaggcccgcgaccgctgggatgagtatatggccgcatggcaggaggtgttcgagaaaaccagcacggccgccgcaccgtggtacctcgttccggccgataaccgctggtattcgcgagccgtggtctccgaactgctgcgcaccaccttgaagaacatgaacatgacctggcctcccctcgaacccgaggtggaccccgacgaggtgcgccgccggttggcgtgagcgatcctcccattggcggagccaagcgcatggcacagctcttcgcatggctccgcccgctggcgggaggcgtcgcatagcgacggagggcggctcgtgccgtcggaataggccactaggtagactgagcattatgactgacgagaaggaatacggatccctggggcggctggcccccgaatgggacggcgacggacgcgaacggaatcttacggccgacgacatctacgaacggttcttcggctgggtggaagacgtcaagggcatcgagccgtggccgcatcaggaagaggccattatggacctcttggccggcgaccatgtgattttgaataccccgaccggttcgggcaaatcgctggtggcgctcggcatgcacttcgccgccctatgcactggccgccgctcctattacaccgctccgatcaaggcgctggtgtcggagaaattcttcgacttggtcgaagtgttcggccgcgacaatgtcggcatgatcaccggcgacagccacatcaacgcggacgcgccgatcatctgctgcaccgccgaaatcctcgccaatcaggctttgcgcgaaggcgcccatgccgatgtgggcctcgtggcgatggacgaattccattattacggtgatccggagcgcggctgggcgtggcaggtgccactgctcacgctgccgcagacccagttcctgctgatgagcgccacactcggcaatgtggacgccatcgccgacaagctctccgatctgaacgacaccccggacgtggatgtaatcgccgacgcgccgcgaccggtgccgttgagctacgaatacacgctcgacccgatggaaaaaaccgtggaactcgccttccgcaacggcgaaaccccgatttacgtggtccacttttcgcaggacgccgcattggagaccgcgcaagcgctcgcctccaccggtgtatccagcaaggaacagcgccaagccatcgcagaagccatcaaaggcgtcaagttcaccacagccttcggcaagattctgcagcgactgctgcgcaccggtgtcggcatccatcatgccggcatgctgcctcgctaccgccgtctggtcgaacagctcgcccagcagggtctgctgccggtgatttgcggcaccgatacattgggcgtcggcatcaatgtgccgattcactccgtggtgctcacggccctgaccaagttcgacggcaccaagatgcgccgcctgcgcgcccgcgaattccaccagattgccggacgagctggccgtatgggattcgataccgagggactggtgatcgccgaggctcccgaatatgaaatcgaaaaccagaaagccatcgccaaggccgggggagatccgaagaaactcaagaaggtcaagcgcaagaaggcgccggaaggttttgtgacctggaaccagagcacgtttgataagctcatcgacgctgaaccggagaccctggtcccgcacctgaaaatcacgcattcgatggtgctcaatgaagtggcgcagggcggtgacgcccgtgcccgtatcgacgatctcatcgacgattccgcgcagacccccgaccagaaggagcatctgcaccagcgggccgacgagatcttccaaaccctgttcgataccgaagtcatcgaaaccgaggaccgcaaggacggcggcaaggactactacatgacccttgatatgccggacgacttcgccctcgaccagccgctctccccgttcctgctggccgcgctcgaactgctcgaccccgagtccgacacctatgcgctggacgtgatctccatggccgaggccacgctcgaagaccccaagcaggtgctgcgtgcccaggagcgtcaggcccgagacaaggcgatggccgatatgaaggccgacggactcgactatgacgagcgtatggataagctgcaggagattacgtatccgaagccactggaagacatgctcgaagccgcgttcgaccagtaccgccacgatgtgccgtgggccaacgactactggctgtcgccgaaatccgtggtgcgcgacatggtggaaaccgcctccgacttcaccggatacatcacccgatacaacatcgcccgctccgaaggcaccctgttgcgctacctctcggacgcctaccgcacgctggcgcgcaccgtgccgcccgaaaagcgtgacgagcaactcgaagacatcatctcctggctgcgcgtgctagtgcgctccatcgactcctcgctggtggacgaatgggagaacgccggtgactcggctgaccaatccgaggctgcggcatccttggccgcgcccggcgcaaaaagcgcggtggtcgaggaccgtcgtggtcttaccgtgctggtgcgcaatgccttgttccgccgtgtgcggcttatggaccttgaccagccggacaagctcggcgcgctcgacaaggactggggctacggcgtgcacgaatgggaagatgtgctcgacgactactacgacgagcacgagtacgtgggcatcggcgccgaagcgcgctcgcccgaactgttcatgttggatgacaagcatgagaacgacgagcatacgtggaaggtgcgtcagattatcgatgattccgatggcgatcacgactgggccatcgaaggcatcgtggacctcgacgccacccaagacaccggtgaagtagtcttccatgactacaaggtgagtaactgattcctttcttggctcccctctctgagggaagccaaggtgtagctcgaacgtctgttcgaacactggggtactataggacgttatgagtgagaacgatttgtttggggtggctgatgcgccggagtcgatgacacggccgttggcggtgcgcatgcgtccacgcactttggacgaggtgattggccaaacgcaggtgttgggccagggctcgccgctgcgccgcctcgccaatccggccagcaaaggcagtctcaccgcgccgagctccgtaatcctgttcggccctccaggcgtcggcaagaccacgctcgccaccatcgtggccggccaatccggccgcgtgtttgaggaactctccgccgtgacctccggcgtcaaagacgtgcgcgacgtactcacccgcgctcacgaacggctcgtgtcacgcggccgggaaaccgtactgttcatcgacgaggtgcatcgcttctccaaatcccagcaggatgcgctgcttcccgccgtcgaaaaccgcgacgtgacctttatcggcgccaccaccgagaacccgagcttttccatcatcaaaccgttgctctcccgttcggtggtcgtcaagcttgagtcattggagcctgatcagctcaccgaactggtgcagcgcgcgctgactgatgaccgcggtctcagggacgaggtcaaagccacggacgaagccatcgccgatatcgtgcgcatggccggtggcgacgcacgcaagagtctcacgattctggaggccgcggctggcgcggtcaccggcgacgaagcccgcaaaaagggcgcacgccgacccatcatcacctccgaaatcgtggctacggtaatggacaccgccaccgtgcgctacgacaaagacggcgatgaccattacgacgtgatttccgcattcatcaaatccatgcggggctccgatccggatgccgccatccattatctggcgcgcatgctgaaagcgggtgaagatccgcgcttcatcgcccgtcgcatcatgattgccgccagcgaggaagtcggcatggccgccccgcagattttgcaggtcaccgtggccgcggcgcaggccgtggcgctggtcggcatgcccgaggcacgtattattttggccgaagccacgattgccgtggccaccgcgcccaaatcaaatgccagctataacgccattaaccaggcgctcgcggacgtggataccggcaagatcggcgctgttccgctgtatttgaggaacgcccccaccaagcttatgaaagagtggggcaaccacgagggctacaagtatgcgcacgattggcccggtgccgtggcgccacaggaatatatgcccgaagagctgcgtggcaccgagtactaccatcccaacgatcgcggctatgaacacgaagtcagccagcgtcttgccaagattcgcccgatactgcatggtggggaacccgaacagaaatgaacataggggagtaaagtgtaacgcaacaataacagtggaaaaaggggaggcaaacaccatggcgaccatcttcatcgtggacgatgatcaggccatcggcgaaatgcttagtcttgttttggaaaacgagggattccagactgtgacctgcctggacgggctgagggctgtggaaatgttccccatcgtcaagcccgatttgattctgcttgacgttatgctccccgggctggacggcacggaggtggcccgccgcatcagagctacctctaatgtgccgattatcatgctcaccgccaaatcagacacacttgacgtcgtggccggcttggaagccggtgccgacgactacgtgcccaagcccttcaaagtagccgaactgctggcgcgtatccgtgcacgcttccgcatcgccaagccggccgccgaagacggtgccaccggtggcgcaagcggtggcaatgcaaacgtcaaccatctggaacgcggacccatcgtcatcgaccgtttggaacacaccgccaccaaggatggcaaggacctgaatctcactccgatggaattcgagctgctgttcatgcttgcggccgccgccggcgaggccatcagtcgttccagcctgctcaagaatgtctggggatacgagaattccggcgatacgcgcctggtcaatgtgcatgttcaacgccttagggccaaagtggaggacgaccccgagaacccgcaaatcgtgcagaccgtacgcggtatcggctacaagttcgtcactcctgaacaatgaacctgcgccctcgattcagcctcaaacgcttgctgcgccacggacgcgctgaagttcgtcgctcactgcaggcccgcaccgtggccctcaccgtgattcttacgctggccgtggccatcgtcttctctggcgtatcgatggtatcagtgcgcgcctcgctgcttacccaaatcacttcgcagtcgcgtgccgactattcaaacatggtgcagcaggcccaaaccagtctggacgcggccgatgtctccgccgtagtgcagatccaacagctggtcaatgacttggcgtcctcgttgcaatccgaggggtcctccaacctgataggtgtgtatttgtggagtcgtgataccaactcgcgtgccatcatccccgtatccaccgaacccagctatcaaagtctgatttctgacgacatccgttcgtccgtggcttccgacttggatgacagcgtgttctatcagccggtcgaaattcccggtgattccggcatgccgggcagcgggacgcccgcagcggtgctcggcaccgtattggactttggcgtggccggcaacctcgaattcttcgccatttattcgtacacgttccagcagcagtccttgacacagattcagctcagtctggtggtcatctgtgcgttgctgtccatcgtggtgggcgtagtaatctggctggtgattcgtggcatcgtgcgcccgattggacgagtggcagcggcctcggaaacactggcctccggcaatctcgatatgcgcgttaccgtggatcgtaaggatgagcttggtgtgctgcagcaatccttcaatacgatggctgatgcgctcaaccagaagatcgatgagctggaggaagcaagcgttttccagaaacgatttgtgtccgacgtcagtcatgaattgcgtaccccggtgaccaccatgcgtatggcttccgacctgctcgaaatgaaaaaagacggcttcgacccctccaccaagcgtacggtcgaactgttggccggccagatcagtcgattccaagacatgctcgccgatctgttggaaatctcccgctacgatgccggttatgcggcactcgaccttgtggaaaccgatttatgcgaaccaattgaaacggcagtggaccaagttgacggcatcgcccaagccaaacgggtgccgattcacacgtatctgcccaatgtgcaggttttgactcgtatcgattcgcgtcgagtgattcgcatcgtcagaaatctgttggccaatgccgtcgatttcgctgaggaccggccgatcgaagtgcgcgtcgcggccaaccgcaaagccgtggccatcagcgttcgcgactatggcgttggtatcgacgaagacaaagtcgctcatgtattcgatcgattctggagaggcgacctttcacgttcacgcgttaccggcggcaccggattgggcctggccatcgccatgactgatgccttgctgcaccacggtagtatccgtgtacgttcggcagtgggggagggcacctggttcttggtattgctgccgcgtgaccccgaccaaggtgaggtggcggacgctgaactgccggtgaattttgcttctgaaacgccggatgacctgcgtgttaccggtgggtttggtgtggccaccagccaagtcacacatgattatcatgaggttcgccgcgacacgatgatggggaggccactatgagacgagtgaccagaacgattgccgccgcaggcgcggccatagcctgttgcatcacgatgacggcatgctcaagtccgttcggtttgccgattagcggctcggtgcagactctggcaccggtggaacagcagacccagcgtgtttacaccaatcctcaggggcctgcggacgatgcacagccggaaaccattgtcaaagggttctatgacgctatgcctgctggcgtgcagtccgatggctatcgcgtggctcgcgaattcctgactggctcggcttctgccgggtggaatggagattctgcggcactggtatacagcggcacccctgatttccgccgacgcgccaacaccataagcgcgccacaaggtgcggaaagctcactgattgtggaagtggaacttcaggtggtgggttccttggattcgcatggcgtatacacgccgtcaaacagcacccaaacgcgcaggcttccctatacgctgatgaagaaaagcggccaatggcgcatctcgtcattggaaagcggcgtggtgatttccaccgcagattttgaacaggtgttccgccaagtatccgtgtatcaggtgagtacttctggcaagcaacttatcccggatattcgttggttgagctggcgcaactggcgcacccaggcagtcggtgaagtgctctcggatgcaccctcctggttggaaggagtgctgcgaggcgccggcttgtctaccatcaaactcgcggtcgacagcgtgccggtgaagaacaatgtggtggagatacacctcaacagcggtatcaatgcgttgaacgaggaagaacgaggcctgctggtacgtcgcatccgtctgactatgggcgacggcaatgccgaatacgcgctgaggattaccggcgatggagtggactattccgatgccgacgcaaatgtgaaacttactaccgagcagccgacagcgggcgtatacacgctgaccggtggtcatatcgtttccctggccagctccagtccgttgcgtgtaggggaggcccccggatatgacgatgctcggggcttcgttttttcctcatccggcggcgcggtgttgcgtgcggacggcgtggtcgaatgcctgaaatctgatggtgcgtcctgtggggtgatgttctccggcgagccgatgcgatcgattaccgaaggtctggatggcgaagtatgggctgtatccgagaacgggcgcgaattgcatgtgtcagatgggggcaaggaaaccgatctgaagcttgattggcttggtgctgccgacagcattgtggcattggcggtttctccggaagggtgccgattggcgttggcagtcaggggcgaggacacgaacggcgtgatgatgaccggtgtggcgcgcaacggtgataaaacactgagcggtctgagcaaagcggccacccaagtgagtgtgctcaggcacgtcaccatgctcacgttctacaatgatctgaatctggtgtacgccaccacacctcctgagggaaacagcgaacaacaagaggcatggcgtcaaatggcaccaggcccggccaatgcgcagcgtttacccaatggaatcataacgtcgatggcatcggggcagatcagcctgtctcgtcgcctggccattgtggacgatttgggtattgtgcgctccgtttccggctcactcgacggttcctggaccatcgccgatagccaggtcactgccctcggtgcgcagtagatggtataagaaaaacggtgttcataataacttttcttgtgttgtgatgcggcggctttgtcgctcggctgacgagcggcattgccgccgtgcaaccacctcttattatggcttaataacaaggcaaaacggcgctgtgaagccgttttttgaactactgttatcaaactgttataaacctgttatcaaactgttatcgcatgcgattgaacatttggcctgtgagcgtcacactagagattgtcgatgacgaacagtcaccaaacaggatggaagatcatccaaaaaataaacactgctcgaggaggagtatttatgaagaattggaagaaggccattgccctcgttgcttctgctgctgcgcttgtcagcgttgccgcatgcggttccagcaacgcaggtggcagctcggactccggcaagaagacggttggcttcgttgctgtgggccctgagggcggcttccgtaccgccaacgagaaggacattcagcaggcattcgaggatgccggctttgacctgacctactctccgacccagaacaacgatcagcagaagcagattcaggcgttcaacaagttcgttaacgacgaagtcgacgccatcatcctgtcctccaccgaggattccggttgggatgactccctgaagaaggccgctgaggctgagattccggtcttcaccgttgaccgtaacgtggacgtcaaggacgccgaggccaagaaggccatcgttgctcacatcggaccgtccaacgtctggtgcggcgagcaggctgccgagttcgtgaacaagaacttcccggatggcgccaacggcttcatcctcgaaggccctgccggcctgtccgtggtgaaggatcgtggcactggttgggacaacaaggttgcctccaacgtcaaggttcttgagtcccagtccgctaactggtccactgatgaggccaagaccgtgaccgctggtctgctcgacaagtacaagtccgacaacccgcagttcatcttcgctcagaacgacgagatgggcctcggtgccgctcaggctgttgacgccgcaggcctcaagggcaaggtcaagatcatcaccatcgacggtaccaagaacgctctgcaggctcttgttgatggcgacctctcctacgtgatcgagtacaacccgatcttcggtaaggaaaccgctcaggccgtcaaggactatctggatggcaagaccgttgagaaggacatcgagatcgagtccaagaccttcgacgccgcctccgccaaggaagccctggacaacaacacccgcgcctactgataagtctgctgcgactcattgataactggaccaaataattggtgtgatggtgtgagaaggatgttccttccacaccatcactcatgtgtggctcaaatatcacaaaacgataacatctcattctcgtttaaggcaaagacatgacagataaaaaccccatcgtcgtaatgaaaggcattacgattgaattcccgggcgtcaaggccttggatggtgttgatttgactctctacccgggtgaagttcacgccctgatgggtgagaacggtgcaggcaagtccaccatgattaaggctctgaccggtgtgtacaagatcaacgccggctccattatggtggacggcaagcctcagcagttcaacggcaccctcgacgcacaaaacgccggtatcgccaccgtgtatcaggaagtgaacctgtgcaccaacctttccgtcggtgagaacgtgatgctgggccacgaaaagcgcggccccttcggcatcgactggaagaagacccacgaggccgccaagaagtatttggcacagatgggcctcgaatccattgacccgcacactccgctgagctccatctccatcgctatgcagcagctggtcgccatcgcccgcgctatggttatcaacgccaaggtgctgattctcgatgagccgacctcttcgctggatgccaacgaggtcagggacctgttcgcgatcatgcgcaaggtgcgtgactcgggcgtggccatcctcttcgtctcccacttcctcgatcagatttatgagattaccgatcgtctgaccattctgcgtaacggccagttcatcaaggaggtcatgaccaaggacacaccgcgcgacgaactcatcggcatgatgattggtaagtccgccgccgagctgtcccagattggtgccaagaaggctcgccgtgaaatcacccctggcgagaagccgatcgtcgatgtcaagggcctcggcaagaagggcaccatcaacccggttgatgttgacatctacaagggtgaggtcgttggcttcgctggcctgctgggctccggtcgtaccgagcttggtcgactcctgtatggtgccgacaagccggattcgggtacctacacgctcaacggcaagaaggtcaacatctccgatccgtacacggctttgaagaacaaaatcgcgtactccaccgaaaaccgtcgtgatgagggcatcatcggcgacctgaccgtccgccagaacatccttatcgccctgcaggcaacgcgcggtatgttcaagccgattcccaagaaggaagcggacgccatcgttgacaagtacatgaaggaactcaacgttcgtcccgccgacccggatcgcccggtcaagaatctctccggcggcaaccagcagaaggtgctcattggccgttggctggccacgcaccccgagctgctgattctggacgagccgacccgtggtatcgatatcggtgccaaggctgaaattcagcaggtcgtgcttgacctggcttctcagggcatgggcgttgtcttcatctcctccgagcttgaagaggtcgtgcgtctgtccgacgacatcgaggttctcaaggaccgccacaagatcgcagaaatcgaaaacgacgacaccgtctctcaggcgaccatcgtcgaaaccatcgctaacaccaacgtaaacaccggaaaggaggcatgagatggctgaaaaggcaaaagccgagggcaacaactttgtcaagaagctgctgagcagcaacctgacctggtcgatcgtcgcattcattcttctggtcatcatctgcaccatcttccagcatgacttcctggctctgagctggaacagcaacaccggtggtctggccggcccgctgatcaccatgctccaggaatctgcccgatacctgatgattgcaaccggtatgaccttggttatctccaccgccggtatcgacctttcggtcggttccgttatggcagtggcaggtgccgccgccatgcagaccctgtccaatggcatgaacgtgtggctctccatcctcatcgccttggctgttggtctggccattggctgcgtcaacggcgctctggtttccttcctgggcctacagccgttcatcaccaccctgattatgatgctcgccggccgtggtatggccaaggtcatcacctccggtgagaacaccgacgcctccgcagttgccggcaacgaaccgctgaagtggttcgccaacggcttcattctgggcattcccgccaacttcgtcatcgccgttatcattgtgattctcgttggcctgctgtgccgcaagaccgccatgggcatgatgattgaggccgtgggcatcaaccaggaagcctcccgtatgaccggtatcaagccgaagaagatcctcttcctcgtctacgcgatttccggcttcctcgcggccatcgctggtctgttcgccaccgcatccgtgatgcgtgtcgacgtggttaagaccggtcaggacctcgaaatgtacgccattctggcagtcgtcatcggcggtacttcactgctgggtggtaagttctccctcgccggctctgctgtcggtgctgtaattatcgccatgatccgcaagaccatcatcaccctgggcgtcaacgccgaggcaactccggccttcttcgccgtcgttgtgattgtgatctgcgtgatgcaggctccgaagattcacaacctgagcgcgaatatgaaacgcaagcgcgcgctcaaggctcaagctaaggcggtggcagcatgacaacagctacggcaaacaaagtgaaggctcccaagaagggcttcaagctcgatcgtcagatgatcccgaccctcgcggccgtggtgatcttcatcctgatgatcatcatgggtcaggcgttgttcggcacctacattcgactgggcttcatctcctccctgttcattgaccacgcctacctgattattctggctgtggccatgaccctgccgattctgaccggtggtatcgatttgtctgtcggtgctatcgtggccatcaccgcagtcgtcggcctgaagctggcgaacgccggcgtgcccgccttcctggtcatgatcatcatgctgctcatcggcgctgtgttcggcctgctggccggcaccttgatcgaggaattcaacatgcagccgttcatcgcgaccctgtcgacgatgttcctggcccgtggtcttgcctccatcatctccaccgactcgctgaccttcccgcagggcaatgacttctcgttcatctccaacgagatcaagatcatcgacaatccgaagatctccaacgatctgtccttcaacgtcggcgtgatcatcgcactggtggttgtggtcttcggctacgtcttcctgcaccatacccgcaccggacgcaccatctacgccatcggcggctcccgttcctccgcggaacttatgggtctgccggtcaagcgcacgcagtacatcatctacttgacctctgcgactctcgccgccctggcctcgatcgtgtacaccgcaaacatcggctctgccaagaacactgtgggtattggctgggagctcgacgccgttgcctccgtggtcatcggcggtacgatcatcaccggtggcttcggctacgtgctcggctccgtgctcggctctctggtccgctccatcctcgatccgctcacctctgacttcggtgtgccggccgaatggaccaccatcgttatcggtctcatgatcctcgtcttcgttgtgcttcagcgcgcggtgatggcggtcggcggagataaaaaatagcgggcttgcccgctcggtctccgcaccgaatacgacacacaccataactgaataggcgggatcagcccggctgctgtgatggcaaggtcacagcagccggcactgcccgccaaagctttctttctccttttcttcctttcattagcgtgtggggcgtgccccggggttctccccgggca

SEQ ID NO: 1938 - DNA, 3197 bp, Unknown
  R17_18m  MAG No. k141_6565
cggggccaacaacagttgcgcccgcgttcgtcaccgtttcgacgatcttcttcgccgattggtcgatgacctcgtggtcataggacttaagcctgatgcggattttctgtcccgccattgccgtccgccctttctagcgatgttcgttgtactgtttaccaacctgcttctagggcaccggcgcgcatggcctcccttggacatacgtcctctggcggtcatccgacatcagtgcgcggtttccggctgtcacttcacttgaagtggcccccggcccgcgctcgctttttttaattccaatttgcgagcccaaatcaggcaacttgtttattcaagcattgaggtgggacagcgcggaggaattcgcgcgtgtcgcgctcatgccgttcgtattacctcgcggcatagccgctcggcgtcgcctaccaacatccttctgagacttacctatatatagtggcacagctcacgttggcgaatatggattgattaattgagttggacggtaacgcgaattactcttaaggctcgtgacacaatcactggcaaagaacatcaaacctattcgtgagcacggtgccaacgtgttatatcagcacggcactttggccttactcgtgccggggctgctggaaggcaccaccaccatcggcgaattgctcaagcatggcgacaccggcatcggcaccggcgagggcttggacggcgagctcatcatcctggatggcgtggcatacaagataggccaatccggtgtggccgaacgcgtgccggacgacttcaccatgccattcgctaatagccatcgcgcggccttccagtaccagtgcgagcgtcatgatatcggcctagaagagctcaacgaaaagatcgtcaaggcgaacggccgcgcgaacacgttcttttcggtaattgtgcgcggcacgttcagcttcatcaagacacgcgcggtcatcaagcagcaggcaccctaccccacgctggtagaggtggccgaccggcaggccgtgttcctgcgccacgacgtcaggggcaccatgctcgggtacttctcccccgtgatgtttcacggcgcggctgtggccggattccacgagcacttcctgtccgacgacaagacgttcggcggccatgtgctcgatgcggtgctcgagcgcggcaaaatctacagtcaggtgttcgataccttggtgcagcatctgccggtggacgaccctgattatcgcaaccacgacttcagccaagatccgatagccgaggccatttccagcgccgagggcgatactcaacgagattagtctcacataaacacaatgtgagccaaatgaacatttccgaacaatcgcacatgttgcataatggcggaagcactggcttctcgcacttcctatgttcgattgtcgcaatgcaggtctcacatctttcttattgagaaccattcgctgcgatatcatgacagatatggcttcccgccgcaagactcttaaacgcgattggttcgacaaccaacctggcgcatgggtaatggttatgctgcccgctgtggctggcttctttatcggcgggcctaatcttgatacgctttggctgttggcgacgtgggccgtgtgctattgcgtgcagttcagcgccgcgcactggttcaaagcacacttttcacgccgttatctgccgccgatgctcacttatgccgtagcgctcatcgtcatcggcttgccattcctgattacgcataccggcatactgcgttgggctcctttatatatagtgctggttgcgctgtcgatgctgtcctcgtggctgaggaaggagcgctcgctgtggggcaatgccgtgtcggtgattgccgcatcggccatggccacggtgatcgcgtcgtttggcaacgctgttgagacggcatgtgttattcccatcaacgcagcacatgcctcgtgcgcagccgctgatgtcaccgccgcacgcgccgcgattcggaatatgccggatttgagccagatattcgaccttcacgcctggtggcctgcgggttcattgcccgtgaacgggctgattgccaccgtgctgtttgcgctgacgcagtatgggtcggttctggtggtcaaaaccatgatccgggaacgcgggaagcgttcgtacgtggcggcttcgtgggtatggcatgtggcgctattgctgctagccgccgtgccggctggacgcagcccgtatctgattgcgatgactgtgctgctgttggcccgcgccgttgcgttgccggtggttacacggcgcacaaccttgaagcccgtggtgaccggcattaccgaggcgtttgccagctttattgcttttggctgcattattgcggtgatttagcgacgctcagcgattccatggggcggtaattccctcatggggcggtaattagcccatggggcggacggtaaaattttaccttccgcagaatagagccgttttcgtacaccgccccatgggcaagttaccgccccatgagtaggttaccgccccatgagtgggttaccgccccatggaggcacctgccggctgagggagcgccacatatgcaaaggagcccggcccctgtaatggggtcgggctccttgtgtccgctatgcagccactaagctgcaacaccgcggttggtggctactgctggtgccagcagccgccaaccgcctgcaatcagcgctcggaggcttcctcagtggcggcctcaccctcgcgctcgatgcgtagcttgtggccttccgcctgggagacgccgtagtaagcaccgacggcgatgtccttcatgtcgttgatcagcgggatgcgcgggttggccggggtgcactggtcctcgtaggcgcgcatgccgatctgatcgagcacggaccagaagtaatcctcgtccacgccgcaatcctggaagctcttgttcataccgagcttgttatcgcggtagtcctcgacagccttcgccaggttctccacggcttcggccggggtcttgccggtgtcgatgccgaggttgcgggcgatgtcctggtagcgctccggggcgatgtacttgttgtacttcggccaagaggtgggctcctcaggaatctggccgttgtagcgaatcacgtacggcagcaggatggagttggtacggccgtgggcgatgtggcacagggcaccgatggtgtgggccatgacgtggcacatgccga

SEQ ID NO: 1939 - DNA, 26814 bp, Unknown
  R17_18m  MAG No. k141_6938
cgattcagtgcgcaccaaccatccctatggcgtgcgtaaggcggcggtgcgcttcctgcaacacggtcacacccgtgtgggcgcggcgttcaccgatacaccgacttcggagctgattcaggatggctggaagcaaatcgtgacggaaagcgacgccatcgaatgcccgttcaccatcaccggcattcagccgtacaacaccagggacgtcaaccaaatcgtggacaccattctggattcgggcgtgacggccatgctggtgcactccgattatctggcgatcgccatcgcgcagaccctggagcgccgcggcaagcgcgtaccggacgatatctcgatgctctccgtcaacggctttgccacgcccagctcccgcccgctgaccgtactgcgctcgtccgataaggatctggccgaggcggccatcaacctgctgatcaaccgcatccaaaacccggattctacaacccgccacatctacgtggacccgacgctgaccgatcgcggctcggtaatcgataagcagtaaccccacctccctctgacgagggaggtggcatcgcaaagcgatgacggagggagaggcaccaggcctctaaccgttacgagcgaagcatcggccagagcaacgcccttactctttacaactccacggtctctttgccgggatcatccttgacatgcgcgaacttggcggccagagcctccttattgcgcttttcgtcttcttccttggcctgacgcttagcctcgtccgggttccagagcacatcctcacggtgcttgttccattcggcaacggccagaggagcgatgtattcggcggtggcggtcagggtgtctgcgtcggcggctttggcacgggcattaagcaacccgaggatctgctcgtcggtcaggcagatgcgcggcaccgagcactgctcgcgcagttcgttgacgtagagcagaatcggcagaatcttggcggcagcattggcgacactgtccgctgaaccatcggccacagcatcaccggacacctcacccaataacgcatcgcacacggcgagcgcggtggcgaaccgaacagccacatcggcgggcttggcagacgtggccagacgaccatcggcttcagcgtcggcctcgacctgggcttccatggccgcgaccgcctccctcaccgattccgccgtcgcggaatcccagtcgattcccaacacgtcggccgcctcaacgatcagcctggcatcaccggactcggcgtagtcggccatcgtgtcgtaggcgtcattggcggcgagcagggcgtccacgatgttctgcggacggccgggaatctcatcggcgccctcatacacgaactcggcgtccggcacggtgacgtcctcgccggtcaggatgcgggcgaatgcacgggtgacgcgcacctgcaggttctccgcgtactttgcgtcattgtccatctgcatggcttcggtcagcggccacaggccgatcagcgccgagccggcttcggcggcctcagttaccgccggcaatgccgcgacctgtgcgattgcctcacgattgagttcaatggtcatctatgctcctttgcgtccaccactcgattgcagtgcgtcttggctcccctctctgaggggagccaatgtcctaacaccagtgtgccgttacttgacgttggctgctgggtcgacatacgtgattgacatcacacggccggtttcgttgtcgtacgtcaccgaggtcacggaggcgagcgccgtgtgccgcaggaacatccagtgctcggggtggccggtctccagataatggcgataactgaaaatcggcgattcgtggctgaccaccacaatctgctcgccggggtgctgggccaccttctcgcgggcgaagtcgtccatacgcgccgcgatgtgctgataggactcaccccagctcggcttgtacaggttggtgacgagcttccagttgccgttcttccacagcgcgccctcgccatggccgatgcgcttgccacggaactcgttgccggcctcaatcacccgttcatcagtggtgagcgtgagcgaagcctcgccacgagcctcgcgcacggggttcagcgcatcgagaatcgcgccggcggtctcgcgcgtacggtcgagcggcgaggagtagacggctgcaatcgtattggtttggggattcttggccaagtacgtggcggtggcttgagccatgcgacggccaaggtcggaaagatggaagtcgggcagtcgctcatagagcagatggtcggggttatataccttgccatgccggacgaaatggatggtggtagcgctcatgagccgcctttctgcttcccgccctgaagggcatgagaacgttgtcttaatatctccaatctaccgcgtgtcgcggagtggacacccgtagagtatccgtgacgcaaatatgcggatgggaaaatccgacgcaaactttgcgcgaccatggacaacacatcattcgatgagggcttcgccggcaacgccacgccagcgggggacatccaatcgggagcggaaaggagcgtagtgctgttatgtccaataactcgtccaactcgaactcgagcaccattctggccggcatcaaggaagtaggccacaaagtctttggtgggtatgcggaactactgcgcattccgcataccgcccgttattccatcggctcggtcatcgcctgcatgccattcccgatggtcggcatgaccatcaccatttccgtacagcattattacggcaactattcgctggccggcatgctcaccgccattcaggcgattgcgctggccgtggccacgccgctgctgggcaagctgaccgacaagttcggccagaggcaggtctcgattccgacgattatcgtttggattgtggccgccatcgcgctggtgacggcgattaccaaccgcgcgccggaatgggtgctgtactgtctgacgccgttcctggccgccattccgccgtggggcgcgatgagccgcgcgcgctggaccaagattcttaagggtgaccgggagcgcacgaaccgcgcgctgtcgctgtgcggcgtgctcgacgaatgcatgtgggtgatcggtaatccgctggcctccacgctggccgtgatctccggtttgctggcgttctcgttcaccggcatgtgcgtggtggtcggtgcgctgatgttcctgaccgagctgaccactgagccaccgtcgcagaccgcgctggcacgtgccgagggcatctcccgcaaggaataccgtgagcgcgaggccgccaaggctgaggcgctgaaggtggaaaccgccgccgaggagacccgccgccgtcttgagcgtgaaggcgtgaccgatgaggccacgattaacgcagccattaagcaggcggtcgccgatgcgcgttcgggcaagaaggcgtccatttggggtccgggtctgattgcggtgtgcgtcacctggttcggtttgggcgcgttccagtcggctacgggcatctccatcatcgcgtttgccaccgaagcgaatatgaagcagtacacgggctttgtgtttgcctgcttctccttcagctcgctgatgggcgcattggtgtatggcgcgaagaactggtcgattgccctgtggaagcgcttctacttctgcctggccgtggtgaacatcggcatcagtacgttcctgttcgccaagcatctgtgggtgatcatgatcatctacttgattattggcgtatgccaggccccgacgtggatcaacggcaaccagctcatgctgcatctggtgccgccctctcgcttgaccgagggcatggcgtggatgggtgcgatgaattctatcggctcctccgccggttcggcgattgccggccagttcatcgaccgcatgggctcgcacggaggcttcatggtggtgaccaccttggcactggcctcgctggtgattgcactgatcggcttcaagcagatcaagggctccaccgagcagccgaccctgactgaagtgagtgtgtgagacgtatgctaagccccctctgacgagggggcttagcatacgtcaaaacgctacttcggccagcctttgggcgtgtgctccaaggaccagatgccgagcttgtgggagaagctgttctgccacttggcttcaagctcctcggcattcagtcgattttcagcggacttcagacggttcatcgcattggtgtgcgtatcgtcgagcagccacttgcgaatcaagaagttccagatcattaccacggcagtggccaccaacttgccgatattggtgcgcaacagatattcggcatgctgcgatacataggcatcatggttcataccataggtggaaatccagataatcgcgtcattcatgaacagaccgactacagcgcccgccacgaagataaggatctccatccagcgtgccatgtcatcacgatgcttgaatacgaatttcatgctcgccagatagttgaaaatcagcgagatgatgaaagagatggtggcagccagcacgttgtgcatgtggaatatgccaaccaataggttgaggataccccagtcgataacaaaggcgataacgcccacaatgccgaacttcatcagctgttcaatcagttttctcacaagagtattcaacactattgggctgactgcggaacgtgtattggctggaaaggccaatatctccccaattggccttgccccggtccgttctgcaagcagcttcctacgtccgcatgccatgttcaacagcagccgctgaggctagactggaagtgaaccgaatcaaggaggaattatgcccgttattcacactcatgtgtccgtgtccaccacccccgagcagcgtgaggcactgaaggccgcctacggcaaggcgattaccgctgtgccgggcaagtccgaaggctggctgatgtgcccgttcgaggacaatatgccaatctacttcggtggtagcgatgaccagcccgccgcctatgtggaggtcaacgtattcggccgctctgtgccgggctctgcttgggaaaagctgaccgaaagcattatggccgcgctgaactccacactcggcattcccgaggaccgcacctacatccgctacaccgccaccaccgattggggctggaatggcggcaacttctagttgccaccattcccctcgcagcatagctgttcgcatcgcctacggaaagcccagtgggctttccgtttaatggctcagggtggcaactagtttgcgtattctggctcccctcagtcagcttagctgacagctccccctcaaagagggaagctcagatgtagaaagcccgccggtggcgggctttctacgtttcaaggggctgatttccaacattcagaagctctactagcgtttcaaggggcttttaaaacaagaaacccggagtataaacattgcaatttcaatggtcatactccgggtttcgcaatcgaagagcccctcgaaacgcagatagacctccggaaaaccggaaatccgcccctcgaaagcgagttacctcacctcatgcctgtcatcacacaatcttgggcatgggggtggtgaggctggtggtcaggttgacgtggaccagaccggcaccggcatgcacctcgaccttcttcagggtcacggtgcgctcttcttcgggggcgcggtcgttgtcggtcatggtcgccggggacttgaccgccacgaacgccagatcatccagcgagatgcctgcgctctggcacagttccatggcctcggacacggactcggtgaagcccggcttgtagatcacgcgctcggccggtacgccgtaggcgttctcggccacccacttggcgttctcggtcagggccatgcccttgtgcgaatgcggttcggccggcatggagccgttctgcagcgcgtcgacgaaaccgtcaagctgcggggccagcgcctcgccgccgtcgcggaacaggttgccgatgatcggcgtgcggaagcccagctcgtcggcggtggccttcagggacggaacctgatcgtcctcgccttcccacaggttgatgagcgggaaggtcggaatgtccaggttctccaggcgctgcacgtggaacgggtagcgccaggccagctcgggatcgtcgcgccaggtggaggcgcgggtcaccacgatggcggcggacggccactgcgcgccatactcgcgacaggcgatgtccagccacttctgggcaccggcgtcggtgccgtaaccggcttcgaccacaaccacgtcatgcagagcgcaggccatttccacggaaaccagcgtcggaatgccgatggacacgttggcgaacgggccaccgtgcacgtagaccggggagccgttcacggtctcggtcttggccggcttgaccgcgtcggccagaatgccggtgatgcgccacaggtccacgaactcgccgaaggtcacggccttgccgtccttggtgccggcgatcatcttggatacacgctcggaaatctcgtccatcgagcgggagagcaccatgatctgcatgagctcgcaggtcggcgtgagcacgaccttctccggcacgttgcccttgccgtagtccacggcggtggagcgcagggagcggctcggcacctcggagacacgcggcacgagaatcgtgtcaagcttgccttcatcgatggccttctcggcgaaggagacgagcaggttctgggccgcctcgatggcgcccatttcgccgcacagaccccagtcgatgagctcggggtgggtcagggatgccttgccgccgccggaggcaccgcccttggaaccggctgcggtgatgcccatgctcggctgacgcagcacggcggccgcatcaatgccacgcttgttcagggcgtcgatcaaggcgatggtcgtggtggtcttgccttcgccgcgcgatgccttgagcggcgtatcggcggtgacgagcaccaccttgccgtgcttgcacggggcgtccgggttctcagccaggtacttcatgtaaccgaatgcgtcgatcttctggaccaggccgtactggctggtgaagtcttcgatggtggtcatttaatgcctttctgtgttgatgatggcggagcggggtggtggggcggccgccgccgcctcttcgcctagaaacagcccactgggctgtttcttaacagcttagcctctcagtccgcttcgcggtcagttcccctcagggaggggagctcaatacggactaaaagtcggacatgtggaagccgttcttcatttccatgctgcgagtgtacagcacggagtcaagcagcttgtcggtttcctccttgagctggtcggccatggtctggttggcggcggcgagaatctcgcgcacctcggggttacgcagcgcggcgatggtctcgtccggggtcatcggctgcacatcgccatccacgttgtcggcctcgaattcctcttcagcggcagactgcgcggcttcctcggcggccgtcaagcccagacgggcgatctgctcgtcggtggcggcgaccaagcggtgacccatcgcaccggtcttctcctggtagcgctcgacggcgttggacgtggagcggaaagcgccatcgcacagggcggcgatgatgcggttggcccagtagaagttctcggacgtcacgcgggtggtggtgtcctcaaggtaagcgggcgtggtgtccacgttcgggaagaacggcaccagcgtgttgaacgggttggagccgtatgccatccactggatggcgcgggaggcctgcgggcggtacgggcggatctgcatcaccgcaagctggctctggcggttgatgccgatcgtgcggtacatgtggcgggtgcgctcatcgcccagctggccgtatggatcgaacggggtgccctggtagtgggagctcaacacgtacttgatgtcctcgatggtcaccttgcgctcgggctggcgggcccacggaatgtcgtcggaggtgggcttgtggtcggcgtccgggccgtcccacacctcgtcgtacgggttgaggaagcgctgcatgtaccaggcgcgcggggtgttgtacacgtggtcggagtcggagtgggagccgaaggcgtcgcgcgggttgaacggggtggtgttctccaccgcgaggtccaggtggttggtttcgatgaattcggcgagatcttcggagcacatgtgcgcttcttggtcgcccagagcgtcctcaaggtcgaattcgtcgataccgagctggttcggcatggtcacgtaggcctcgtccggcactcgcttggcaatccagtgatggccgcccacggtttccagccaccagatttcgttggagtcggagaaggcgacgccgttcatctcataggtgccgaattcctcaagcagcgcgccgaggcgctggacgccctggcgtgcggtcttgacatacggcagcacgatggtcaggaagtcctcttcgccgatgccgccgggcacctcgggctcatcgcccctggccggcgtgtattccacgaacgggtcggcgccgagcacgcgctcgttggtggtcagggtctcggtggcgctcatcgccacgttcgcctcgttgacgccggcctcgccccagatgccttccttgaggtccgcgttcggcacggcggtgtactgcagcgggtcgtccggcagagtgatggtcaggtgggagatcactgatttgtattcgcgcggctgttcctccggtttcacgacgatgaagcgcttcgggttgaactcgccgttcgcggaatcctcgttgcgggcaatgatggtcgaaccgtcatagctcgcgtctttgcctaccagaatcgtggtgcaggccatagtgtgatggtgtcctttctcttattcaagctccccttgtcaggctgagccgttcagcaaacagcccggtgggctgtttgtaggcgagggtgggagataagtcccaccacagatgttgcgggcggtagcccgtccgtaattgcaggacgagctgtctcgcaaagcgagactgaggggtagtcactctagctgtctctcccccagtccgcctacggcggccagctccctcatcagagggagctcacatacgccaactaaaaatcacgccttaccggtcaggaagatgccgtcggtgtcgggcgcttcgccgctgttgcgcagcgcgtgcaacagctcgttgagccagaagccctgattcaagccgggcaacggcttcttggtggcccacacctgcaggtagtactcgtggtccttgtccggcggctgcggaccgttgtaccgcatgatcaccgctgggtcagtgctgcggcccaagaacttggaggccgaagaattgcggccttgcacggtctcgggaatcatggccggcagctgacgggagaagtccggcgggatggccaacgcatgcgaatcattgaagtcgtacatcagcgcgtcaatcggcagattggccacggaccagtgaatccactcgaagccacagaccggaatcgaatccgggtccacgaactcccagtgcaggtaacgggcctcggggttcacatcaccgatgtagaacgggaaggagacgaccggcacgccgccgttgaagtactcaggcgcggcggccttggcaaaatcgtccggaatgacggtgaaatcggcggaaatcttcatatgtcccagtatcgctcatatgtgtgacgtactgggggctgtgcgttacgggggtctctcccccagtctcgccgcgctcgacagccccctcgtcagagggggctggttgcgtcgggttatggaattagggcgcagaagagggattcgaataccagtagcgggttgccgttgccggctagacgcttgcgggcgtgggccacttcgtccagacgggtcacggcaccggcccggttcaaccgcaccgacaattcggtgatcggcgagcggttctccaggttgatgaggcccaccgaatcctccgcattgttctgcagcaccgccacatcccggtagatggaggcgatggagttcagcgcacgatccaatacgtcgcgcgtacggcgggtgaccaaacgcttcacatcgtctttcttggcgatctggttgaacgcgccacgcagtttcggcgggatgcggtcgttcggtgccagtccgttgatgcggcggaattccgcttcctggccggcggtgatgcggcttgcgtccgcctcggcctgggccttggcattgtcgataaggctgccggccagcagcaccgcgtccgaggcgcgagcgaggttcagtacgcccaccaccaattcgtcgcgatccgtcatcacctgctcgtcagtggcgtacaacttggcgatgccgatgtgtccctcggccagacgggccgcacgctgcgccacttttggctcgacattggtggtggaggtcaggaatccggccaccgcctgggtggagggcacggcgaggttcacgatgcgcgtgcgcgagcggatggtgggcagtacatcctgggcactcggcgcacacagcagccagatgcagtgttcagccggctcctcgatctccttcagcagcacgttggtggtgcgctccagcatgcggtccacatcctcgatgatgatgatgcgccatggtgccgtggcaggcatttgctcggaggcggtgatgatctcgcgcacctggtcgatgccgatggtcactttgttggtggccagcactgtgacatccgggtgggtgccagcgagcacctgttgggtgacgcgcgtgggctcatcgttcatgccgtggtcggggctttccagcgccgccgcgaatgctcgggccatattggaacggccggagccgggaggcccgcaaatcagccacgactgggtgatctgacccgggtcgccctgcgcgatgcgactgagcatgtcgattaccggctgctggccgactagtgaatcccatacgctcatcggacaccgcccatcgtcacggctcctgtagacgccccggatcgcgccatcaccgtatccacatctgcaacattgtcccgcagcagtgtctgaatgtccgcttcgatggcggaccacacctgttcgatggactggctggcatcgatcacgtggaaacgattcggctcggccacggccaagccgaggaacgcctgacgggtgcgggactggaagtcgctgccggccgactccatgcgatcttcggcatgctcaagacgattgtgggaaagcgccggatccatatccagcagatatgtgcggtcgggcagcaggttgttggtggcccacatgcttaaggctcgaatctcttctggcgtaagttcgcggccaccggcctgataagccaaggaagagtctaaatagcggtcggtgatcaccacttcaccgcgctccaatgccgggcggatggtttcggcaacgtgctgggctcggtctgcagcgaatagcagcgcctcggcgcgcggtgcgatgtcgacggcgcccccatccacaccgtgcaacagcagttggcgaatggccttgcctagcgcagtgcctcccggctcacgggtaacgaccacggtacgcccctgagcctcaagatacgcacgcagccgctcgacttgcgtggtcttgcccacgccatcgacaccttcaaacgaaacaaacagaccgctcatgctattgaccttagcgttaggcgcagagttgtgcccaacaggcagttaaaccagctctacctccgtttcaaggggctgatttggtcttttctgaaggtctacttccgtttcgaggggctgttgcccaagtagacaacgttccaaaacggcggaatgacgttggcgcggagccgttcatactcgtggttcagcagatgaccagccccttgaagcggaagtagatattctcaaaacgagaaatcagccccttgaaacgcaagtagagcaataattccgctcagccacgcttgggaattacggcggggcgctcgtagccctcgttggcggtcagccagtcgacatccttcttgacggtggcggcggtggagctgagcttttcggcgatgcgctggttggaccagcccttgtttgccagcttcttcacctcggcacggcgtccggcgcgcttggcctcggcggcattggtcgcagccgaagcagcgcccttcttggctcccttggctcccgacttcgcggcaccggcacgcccagcaccgcgacggccacgggtggagggaccagccgcacgcttttcggcgagcagtcggaaggcgtcatcaggggtgatggattcaggcgtgtactgacgcggcaccgtgcggttggtctcgccatcggtgatgtacgcgccgaaacggccgtccttgatggtcacgttcttgccggtgttcgggtccttgcccaaatcacgcagcggcggcttggcggcaccacggccacgcccgcggccgtacttaggctgcgagaacagttctttggccttgtcgatatcgaccgtgaagatctcgtcttccgaggtcagcgagcgggtctccgacttgccgtcggcacccgtcttggtcagataggggccgtagcgaccgttgttggcggccaccgtgcattcggatacctcgccggtttcggcgttggtttcctcgtatgtgcccacttcgcgcggcaggctcagcagctttagcgcgtcttccagcgacagcgattcagggctcatcgtcttgaacaacgaggccatcttcgggcgcgacgcggcggcggccgcggccttcttcgaacccttcttggccgcagaagcaccagcagtatcgccagcagcgccagccgaagcctcagccggcggcaccagcgccacatacgggccgaaacgcccattgcgcacctcgacggtaccgccggataccgggtcaacgcccagctcgcgcggtccaccggagtggttgtcgatcaaatcgcgggccacggccaccgtcagctcatccggcgcgatggtgtccggcagagacgcgcgcttcgggttgccttcgacgtccagatgctccatgtcttccagatacgggccgtaacggccgacgcgcacgtgcaggccgtcgccgatgtcgatggtgttgatggcgcgcgcgtcgatctcgccgagctgcgcgacctgctgttgcaggccttcgtgcgcctcgtcggcgttgcgggcggcgccctcgccggaaccgaagtagaagtgggtgagccagtcgcggccggattcctcgccgtgggcgatgcggtcaaggccgttttccatctcggcggtgaactggtagtcgaccagcttggggaagttcgtctcgagcaacttggtcacggagaaggcgagccagctggggatcagcgcacggccacgctcatacacatagccgcgatccataatcgtggagatgatgctcgcgtaggtggacgggcggccgatctccttggcctccagcgtcttgaccagcgtggcctcggtgtagcgggccggcggctgggtttcatggccgtccggttcgatgtcgcttgcctcgacctgctggccgacgctcatcggcggcagggaggtgttggattcggaggcgtcacccctgacggccttgacgtccgtcttgccggcagcagcctggtccgagccagccccagcgccgggaacggcggccttgggcttgcgtccctcccccgtggccttcataaagccggggaattcgatgacagtgccggacgcttggaacacggcctcgccctcagtggggccggccggcgcagacaggcgcacggtggcggtggagccggtggcgtcagccatctggcaggcgagcgtgcgctgccagatcagcgtgtataggcgcagctggtcgccgggaagtttggaagccagctcatccgggtcgtggaagcgcgagcccgccgggcgaatacactcgtgggcttcctgcgcgccagcggttttggtggcgtactgcttgggctcggcggagaggaacttgtcgccgaaatggtaggagacggcgttgcgggcggcggtgatggcctcctgcgacagcgtcaccgaatcggttcgcatataggtgatgtagccgttctcgtacaggctttgggccgcgcgcatcacgacgcgagcacccatgccgaggcgattgccggcggtctgctgcaaggtcgaggtggtgaacggcggctgcgggcggcggcggtacggcttggtttccatcgacatcacagtgaaatcggcggtcctcagcgcttcagccacggcagtggcaccagcctcatcaagctggcgaacgttcgccgcgaacccgtccggggtcagctggccgtcggcaccgaaatccttggagccggcgagtcgcttgccgccgagcgcgatcatgcgggcggagaattcggcacgctcccccagcgcgtcaggcgcggccaacatggcgacgatatcccagtacggcgcgcgcctgaacgccatgcgttcgcgttcgcgttccacgatcaggcgggtggccacggactgcacgcggccggcggacaggcccgggcccaccttgcgccacagcaccggcgacagctcatagccgtacagacggtcgaggatgcggcgggtctcctgtgcgtcgaccatattgccgtccacgtcgcgcgtgttgttcagggaggcgttgatggcgttcttggtgatctcgtggaacaccatgcgcttgaccggcaccttgggtttcaaggtctgcaccaagtgccacgcgatagcctcgccctcgcgatcctcatcagtcgccagatagagttcgtcggcgttcttcagggccgatttgagttcgctgaccgtacgcttcttgtcgccgtcgacgatgtaatacggcttgaacccgtcgttgacgtccacgccgaacttgccgaacttggccttgtctgccgcgggcacctggctgggctgcgcgaggtcgcggatatgaccgaccgacgccatgacggtgtaccccttgcccaggtagtcaccgatcttgtgggccttggtcggagactccacaatcaccagtttggtagccatacccactccttatgtattgcgcgaaacacacgacgtttctggcgtcataatactcatgaatcatatccaactgccaaattccgccgttgtgccgggcaaattcggccgttcgcacctcatgttttaccgtttgggcggtgccggcggagcgccgatcaggcccagcctgcttaagggcgctgcagtgatctgacgtagggccagcaacagtccgaatgcgagcatggccacacccgtaatgcccacaacagcgctgacattcgccccctgaaccgcccaactggcgctgacattgagccccggcaccacctgccagatcacataaccgctgtaggcgagcaacagcaggcccccggtaatcaacacgctgccgacgatctgcacactcactgaggagacgcggtggcccggctcgtccatgccggacttgcgtgtaaccgccagagcgagcagggccaatcccgccaccagcaggatggacatcgccacatccgaagggcgatgccattgcccgtatatcacagagacaccgacggtcgccgcccaaaccacgccgatgacgcccgccaaagctcgaaccgcgcgaggcacggtaagcagcagaatcaccgcacaggctgcggccagcatcgtgtgtccggaaggcgcggaattagcggcaggcgattcagtgttgatgatgaacggacgcggcaacagacccttgatacgggtgacggccaagcagaccacggcgaacacggcgatttgcccggccaaccaccagcggcgtcgaatcagcgccgtaataatgccgattgcggcaattgtgcagctgacagcgataaccagccaggattgtgcgacggcgttcatcatgccggtggtccaggacggtacatcgttgtgcaggtttttccagaccagttcgtcgtacgattgtccgttttcggtaaacacgcacccccaccacacgccgaagccaatagcgatcaggagcagaccgaataccacgcacagtacgcggctggagattcgcgggcgcacggtaagcgggtcaagccgggccaagccacggtcgatatcagatgccccatccgcatcgtccatgcccagcggcctgaaatcccctaaggagcctgatgtggatgccgatgcatctgaaccggagaccgggccgagcgcagccaatgggtcaacaacgttcgacgacgagtcaggctgcgctgcgcctgagccgaccagattgaccgccgcatgcgggtcgcgaattctaggggtctgtgcgtcattcatacgttcgactgtacggccgcgccccggacagggagccgtgctcgtgccagctcacggccaaatccgcacaaatggaaaacctccacgcacccgtcagaggccacttacccttgctgcattcctgccctgggggagttgggtgacatagcgccgcgtggaggctggggataagtctatggagacgtatggaccagcgcagcgacacgaaacgtgcgcgccgggtcgcacggcaggccaaccagcgcattcaggcaatattcatgcagcatcaaggaacgtgcccaattgtaagaattccggaaaaataccggcataaatgcgtgtggttacgctcacgtcaaacgattgttcaaggccaacagttacggtggacaccatggcttcttatactcgtcgtgcacattcgggaggcaatggccccgctctgaggcaaccgcgcaccgcgcaaagcagagccgaccactccgcacaggagggcccctatacgccccaggagagccgttcccgccacgcaagccacaaggcttccaatagccatcgagccccgaacaggaagaaaaagaacacaggaaaaggcaagcaccgtgtactgaaatgggtgctgggcatcttcttctccctgattggactgggcttgctggccggtatcgcagtattcgcatacctgtacaccaccaccgaggtcccgcaacccgaaaagttcgcgttggccgagaaaaccaccgtgtattacgcggacggcaccaccgcgatcggctcctacgcggaacagaatcgttcaatcatctcttgcgaggggctgccggactacatcggcaacgcgattgtggcgtccgaaaaccgtacgttctacacggataaaggtcttgatctgaagggcatcgcccgcgcattcattaataatgtgaccaagggcacgcgccaaggtggttccaccatcacccagcagtatgccgagcggtattacatgggcgaaaccacatcctatgtgggcaaggcgcgcgaggccatcgtggccatcaaaatcgcgcaaaccgagtccaaggacgaggtgctgtgcaattacatgaacaccatctatctgggccgcaactcctacggcatccaggcagcggccaaggcatacttcaataaggacgccaaggatctgacgctgtctgaagcggcgatgatcgccggcattattccgtcaccgtccacgtgggatccggccgataacgccgatatggccaaatcgcgcttcaagcgtgtgctgaacatcatgcaggaggatggttacatcactgccaagcagcacactgatgccaagttcccgcagactgccgcggtggcgcagcaaaacgaatacgcggggccgaacggttatctgctggatatggtgcgccgtgagctggtgcagtccaaggcctttaccaaagaggatttggataccggcggatacaagatcatcaccaccatcgacaagagcaagcaggaccttatgcagtccatcggcgacacccgtctggacgacatgcctgaatccctgcaaatcggcggcatagcgctggacccgaagaccggtgaagtattgtccgtatacgccggttcagattatctgtccaagcagctcaacaatgccgatcaggccgtattcgaaccgggttcgactatgaagccgttcgctttgctgggggccgcgcaatccggcgtcagcttcgatacgttgttcaacggcaattcccaccagcacttcaccggcttggatcaagaggtgaataacgctctggagaacaactggggcaacatcaatctgtatcaggccaccgccaactcggtgaacacggtgttcatgaacgtcaatgagcatctgacgccgaagcgcacggccgcaatcgcccatgaagcgggcattcagggcgatatcgatgaaaactccatgtacaacgtgctgggcatcaacgccctgaccgtgtgggatttggcgcaaggccattcgaccatcgccaacaatggtgtgaagagcaccttgcacatggtgtccaaagtgcttgattccaacaataaggacatgtacaacgcgcccagcaaaggcaccaaggtgttcgatgccaacgactgcgctttggtgcagaaggccatgcagggcaccaccacgtacggtacggcggccggcacatccaacatgctgggccgacccatcgccggcaagtccggtaccgccaacgacgaaatggcttcgtcgttcgtgggatacacccccagcatgatgaatgtgtgggctatctggaacccggacgataagggcaatccgcaggcggtgccggccttctccggatacggcatctcttccactggataccccgcccacctgttccaggagttcatggctcaggccttgcaaggtaccgaggtggagcagttcccgaccgctaaagacaatggcaagatcggtggacccgacggcacttggggcttgggcaagggacagagcagcggcctgtccaataacaccaacaagcagtccaccgaagacgcgcagaagcaggctgagcaggacgcacagcagaaggcggccgaagaggaagccaagaagcaacagcaggcccaggagttcgcccagcagtgcctcgccaatccgagctattccaccgagtgtccgaattatcccggcaccactaccggcggagatggcaacaatggcaacaatcccggcaataccggcgggaacaacgggaacaataccggcaacgataatggtaattccggaggcaccggcgggaacaacggcaccaacggcgtcacccagtagtaagtaagcacagacaacaaagctccctctgatgcaatcagagggagctttgttttgttgttagcgctcagcgcttgcgctgggaacggttgatggcagagataatcgacttcagagcgctggtggtgatcgacgaatcgatgccgacgccccacacgatctgcgcatcatcggcctcgccgacctggcattccacgtacgaggcggccatggcgtcggtgccgacggacatggtgtgctccgcgtaatccataatcgaggcgtcaacgccaaagttggaaatggcgttgaggaaggcggcgatcggaccgttgccgatgccggagacctcgcgctccacgggcgcatcgaccccgacgttcacgccgcggtcgagcaggcgagccttgagcacggtatcggagccatcctcaccggagctgacggccaccttgagcagcttcaagcggccccacggcgcgagcgaggcgtcatgagtatcgcccacaaccacaccggcggcggtcatgccggactgttcgatcggcaggtactcgtccttgaacagacgccagatatcctcgtccttgacttccttcttggtcgtgtcagcgtagtcctgcacgatcttgtcgaattcaatctgcagacgcttgggcaggtcaagattgtggttggtcttgagcaggtaggccatgccgcccttgccggactgcgagttgacgcgaatgatggcctcgtacgtgcggccgatgtccttcgggtcgatcggcaggtacggcacaagccacacgaagctgtcgagatcggcgccagcgcgctcggcggccacctgacgagcctcgagacccttcttgatggcatcctgatgcgagccggagaacgcggtgaacacgaagttgccggcgtacgggtgacgctcggagatcttgatctggttgcagtactcaaccgtcttgcggatctcgggcacgttggacaggtcaatctgcgggtcgatgccttgggtgagccagttgaggcccagcgtgaccaagtcgacgttgccggtacgctcgccgttgcccagcaggcagccttccacacggtcggcgccggccagcacggccagctcggtggcggccacgcccatgccttcgtcgttgtgcgggtggagggagagcaccacggagtcacggtcgtcgaggtgggtggagacgtactccacttcgtcggcgaacacgttcggcgtggtcatttccacggtggcgggcaggttgatgatcatcgggtgctcgggagtcggcttgataacaccgatcacggcgttgcacacctcgacggcgtactccggctcggtgccggtgaaggattccggcgagtactcgtagtacaggtcgatgcccttggcctcgttctcgaggtccttgcacagttcggcggcgtcggtggcgagcttcttgatctcttccttgttcttgcggaacacgacctcgcgctgcagcacagacacggagttgtagaagtgcacgatggcgcgcttggcacccttgagcgcctcgtaagtacggcggatgaggtgctcgcggcactgggtgagcaccacgatggtcacgtcgtccggaatcagctcacgctcgatgagcatacggatgaagtcgaaatcggtttcggaagcggacgggaagcccacctcgatctccttgaatcccatggagacgagcaggttccagaaacgcagcttgcgctcggaatccatcgggttgacgagggcctgattgccgtcgcgaagatcgacggagcaccagcgcggcgcgcgctgcagtcgcttgcccggccacgtgcgctccgggtaatcaaacgggatctgcttgtcgtaggcggcgtacttgttatacggcatacgactcggcttctgcggatcgccgatgaatcgtgccggaggcagcagcgggtcgttgttccccccattggacgccgcagccactgccgcgagatcaaaaacggatgattgaccctgacccattgttcctcctttactgtgcgaaccattcatacaatcgcttattggatattcgtttacgcattggtaacatgcgtaacttcctccatcctagcgacggcccattccaacaccccgttcatctcacaatatgccagcacacgtagcgcttcccggcgcagtactactagacttgcaactatgcgtggaggcgcatgggcttccacagcgagagaagaggtccattatgacaaatccaagtatgcctccgatgccgcaaatccctcaaccgaacggtcagcggcccgcagctccgcaatttacagcaccgcagccggtcttccagcagcctgcagcaccacgccccgcgcagcccgcagcgccgcagttcgcggcgccacaatatgctcagcctgccgcgccgcagttcccggcgcaggctccggctgccgtacagccgacattcccacagcagcccgcagcacagcaagccgcctataacccgcgcccggtcaaccaactgcgcaccaagcgcagcctgctgaagtacatcctgctcggcattattactttcggcatttacgatatctggcaaatgagcgaagtgggcgagaccctgaacctcatcgcttcgcgccgtgacggcaagcgcacgatgcactactgcctgatgttcttcctgatcggtggcctgacgctgggcatcggctggctggtgtggtaccaccgcctcagcgcccgtattggcgatgagcagcaggcccgcggcatgactcccaccgttaccgcagccaccttctggctgtgggacgtcttgggaattttcatcatcgtgggaccgctggtctacttctacaagctgctgcatgcgatgaacgatctgtccgccgactacaacgcgcgcggctgaaacaatcccgtccttctacacttgccgacatatttgccggggcagtgtttttactgcgtttgccgatggccgcaccagtcagaccattattgttcggctccgcagtctcgttgattcataggagattccatttatgctttgccccaattgccataccgataacgcggaaggtagcaagttctgcgaaacatgcggcacgccgctcaccgccaccgaagcgaatactgcagcgtcgagtgcttccatgacaccgcaggacgcgccggttgcgcccacgccagcgggagcgactcccgctccggctgccgcttcagtccccggccccggcggtgcggcagtgccgccgattcctatgccgcagggtgctgctggcatgtcggctccggcggtcgtctccgcaccggcggctacgcagcccactgcgaccgttgccacggccacgcagacggccccggcaacggcaaccacaaccgccgcgaccaagcccggcccaaacaaactcatcatcatgctggtggcggtgctggcggccctgatcatcgcgggtgtcgctttgttcctgacatatcgttccgaggtgtggggcggcaagtcgctgcctgacccggcatccatcgcctccagcgtcaccgataagaacggcaagaaggcgtcggccgtcaaggccaaggatgtcacggccgcgctgaaggccaagggactcaacgcgaaaacggagaaggtgttctccggcaaggattcgggtgagttcatcggctataagaacgccgctccgggcgctcgtgtcaaggccggctccacggtcgtggtgcaggaatccgccggccccggcgtgccgaaagacactctgggcgcacaggtcaataaggtgactgagacgttcgccgatatgggcgttccggtccactataagaaggtgtttgtctctgacgccaagaagaaccccgaaggttcggttgtggccacctatcctgccgccggcactggggtcaaggacgacgagaaagacaagggcatctacattggcgtggccgccaagggtgacgacaccgctctgcccatcgacgtgatgggtcaggatgtggataccgtcaaatcccagctcgagtctgagggccacacagttaccgttgaacagcgtttctcttccaaggattacgtgggtaaggtttccggcgccagccccgctccgggatcgtccctgtcttccggcgaagacgtgaccctgtatcagggcatcgatgccagcgacaccaaagaagcctttacaggccatgatttggccgaaacaggcggtgacgcgctgctcggtaccacacgcgcagccgacggccagtggtgcactaatgatgggaagtgcatcaccatcgacaattacaaggtgactgaaggcggcagtgataatgctgactataccagcgattacgacggtactctgattgcctgcgacgccattcagcaggcgtactgcaacagtccgaaagccgactacctagtcacacaagattatggcgccttcgagctcatgccgcatatcagcctgaccaacttttgggccaacggcaaaatgtatgacggcaatggcgtgcatatgggtgattcttggcccacatccggcgaataccacatgcaggatctgttcctcgtagtgcctaccggctccgacttgcaggggttggaagataagggctacttcgacaaagacgcgcttgccgcagccaagaagcagaaggcggtggacaccaatcgaccgttcattctgtaccgcgatccgaagctctacgacactaccaccgctccatacaacggtgccgggaacggcgccaatccgttcctgccctacaacggatacaacggcagtaagtccgacatcgtcaagatgaagccggccccaagcgacgccgacgcctactatctggtcgaagcgtccgaacccgattgggattccctgccggacgcggacgtgaaggcgcccagcaccaaggacaagggcaactccaaggattccaaggattccaacaagagcagtaagaaatccggcacaccggatgcggcctcactgaaggtgttttctgatttggccggtgcccaatacgcttacacgattgctggcgatggcagcgccttcaccaccatttcgttggatgatcggggcaacttctccggcactgtggacgaggcagatatgagcagtggcgattccgcagcgaatgcgccacgtatccagaccaagttcagcggtaagtttgcatccgccacatccaattcagatggcacggtaacgctgaagtgtgatgcgtcggctttcaaaattgacgacaagtccaaatccgacaagtcaggattcagcccgtgtggcaccttcaccggatatccatctggaacctccagcgatgcgttgccatctgaagcacaggccatgctcgtcaagcgtggaacgccggatggaccatccgattggatgctgattaacaccgaaggctctggtgtttttatccgcacccagaaataaataacagttaagcagggttcaggcggatccaacgcttaatactcagtgaggccagttcataccggcctcacgtgtttttatcgcttcttcaccaacgagcggatgacggccataaaaccgaggctcatggcaccggccagcactgcgaatacctgcgggcggcgcaattcgttacgcatgctgatggcaccggtcacgcagtggtcctcgaaccagacgcgcacctcgttgctggagtatcggcccaccagatcaccccaggtgagcatgcgggtcacgtagccggccgggttgctttcatggaattcaaacaggcggatgcctcgatagcgcgacttggggccatagcattcgaatccgcaggtgggtgcgtagcccaaatcaatgccatgcgcgtggcccacgaaggcgttcttgtgatcgtgaccacagaacagcgcgaagtagccgcctgcctcacgcaaggcgtccacttcaccgacgttctcgtctgcacagccaatcgcctcacccagccgcgatcccggccggcagatctcatggttgagcacgtagcaatgaccggcgtgggtacgtgcgccttccaccgcgttcggcgtccatgcgggaacctctttgaggcaatcgtagaattcctgcggcggaatgtgctggaaggcgatggcaggcaccggcttaccgtcgccgttgcgttcgccaagttcggactgtacggctcccagccaatcgatcgcctcggggcttggcgtgccatacccatcggaatcagccaaatcaagaccacgcggattgaccacataggccgggtattgggcgtcgttctcttcgggcttgccggcgtaatcgccggaattcaccatcatgacggacatagctacgcgcccggatccgtcggaagcctcaatgggcagggcaaaagtgcctggctcaaggctgtcgactgggttcaggcagccggggaattcgcggtagatgccgtcctgctcgtcggccaggatgccgcactggaaatcgtgattgccgtaggtggcagcgaacggcacttccgcttcgatgaccgggccaaggaagccggcaaacgtgcggcggactttgtcacgggtctcgtccatgagctcgtccaaagtcgtcggcacatcctgcggatcggatgttgtggagtagaccagcgtggacgcggtggacgcggtttgttgggcgtcggaatcgctgccgtcggacttcatggccagcagacgattgttcacgcggtctctggcccgccgcttgattccgtgcagcttggcctcgacttcggtgaccgcacgcacgcgagcgcccggttcctcgccacggcggcgcaggaaagtgtcgatgtaggcaggatcgtaaccgcggatctggtcgccggtgaacaccaccagatccgggtcggctttgcgaatggcttcacggataaggcggatggtatcggggagcacgttggggccgtcttggatgtcggccatttgcagcacgcggaagctgccgtcttcgcggaatcgcaggttcgtcatgcctcaccagtctagggacgtaatgctgtttcgcacagcatacgcgccggtccttcacgttccccgccgctccgcacggcagctgaatcactacgagaaatcgtagaacgtgtatcccttatctgctccgctcgtcacgttgagcaatgccttgccgttcagcgtatcgacgtcgtttcctatgagatagccgtctcccgtggcccccatatccgagtcatggtaggagcctgagaaggtgccatccttattgactttcattacggttccccatgcgccgacaccggaaccgaaactatagttacctgccgcctgtttcatggcctctttgaatgtggcgtctcgtttgccgctgtccttggacttgtcaccggtcgtctcaccggaagcggccttatcgccagtgcccttgacctcggcgtccggcagggaatcccagtcgagatcgccgttctgctccaccagatagtagacggtcgaatcgctgggagccggcctcatcggcaccagcgcgttctgatagttattgatactgctgttggtcggcacaaacgggtccacatccttgccccggctggcgctcacactgatctcgctgtacaggctcttgtcacgaaccagaacgtacgggcggctggtatccacggccttctgcttattggccttcgccagttcggcggcgtcgaagtaaccggaatcatccaatgacttggcatcggaaccggccgggaagtagaccaggaagtccttcatgtcgtaggtcatgccggtcgacccgttctcagccccggccggtggcgtcatttcgccatcgtcgaacgacgcccgttcatagttgccgttcacgcagtactcgcctatcgaagcggacatcacc

SEQ ID NO: 1940 - DNA, 6762 bp, Unknown
  R17_18m  MAG No. k141_6943
cgtagatttgggcttggaggtctttacgggcggtttccatgcgggtgatctggccgaggagggttatcttctcttcgccgtcgggcagctgggccatgcggcgtttggccaagccgatctggcgcatgaagcccatgtccagtagccgggtgagcagttcggtggcatagcgctgctcttccggcgtggcagggcgtagctgtactgcggcggcaccgccattcacgccaacacctcctcccgacacgttggcctgcaccggctgcgcaccgctaccgatgtcgtcgccaggcagtggcaacggcatgacggccagctcgttgatcacctgattcagcatcggcccgccggccttggtgaggttgtgcatccacagcccctgcggggtatcgtcggatggcagtccgccggcggccgcgatcgcctggaacagggtgcggaacaccgaagtcatgaaatggtcgatggtcagctgcccgaacatggtgcggtcgatggcgcgcggcacctgaatcagcacggccatgaactgctgttcggcgatgaatacggcgtcgtcgatcttgaaatatgcctgttcggcggcgtcacggcgctccaacgccttgcgcgtggccggattggcgtatgggttggtgccgggttccacacgcggctcgtcacgctcgaatcgacgtttgggcgtgtaggcgtcctcatcgcgtacatgcatctgccggcgcgcgttcatcacctcgcggcgcatcacctcaagatccacgccgatacggcccgcggacttgcgcgcgtaagcgtcccatagggagcggtcgcgaatctgcgccaccagcggggccacggctttcatcgcacccacttggccgggcgtgtaggtcaggtcgaaccggccgatggcggcgtcgatcacgaagtcatacaacggtttggcgcgggcgatcagcgagcgcaccgcctcgttgcctcgctcgatgcgcaggtcgcacgggtcgagattgtcgtcggccacggccacgaaggtttgggagaggaaggccgaatcaaggccgaaggcatgcagcgcggctttctggccggcggcgtcaccatcgaacgtgaacacgatgcgcgagctcaacggctggtccttgaccttcaacggcccgaccagctggaccgcgcccagcgaatcgtcggcgatcaggcggcgcacaatcttggcgtgctcggcgccgaacgccgtaccgcacgtggcgatggcggtgtcaatgccggccaagtgcatggccatcacgtccgtatagccttcgacgatcaccacctgtcgcttcttgacgatggcggatttcgccaaatcgatgccgtaaagcacctgggttttgcggtagagctgcgtgtccggcgtgttgatgtatttggcggcgatctgatcgtcttcgtatagtttgcgcgcgccgaagccgagcgtgcggccggtcgaatcgcggataggccacgtcacgcggccgcggaaatagtcatagatgccgcgctggccttggcgggccaagcccgcgtcgaggatttccttctgcgtaaaccccttggaggccaagtggcgcacaagattatcccaaccttggggcgcgtagccgcaaccgaaacgttcgcagtcggcttgggagaagttgcggcctccgagcagcttgcgggcgggcagtgcttccttggtcaggatctgggagacgaagaagcgttgggcttcctcgcaggcttccagcagtcgggtgcgcttggagccggtgttctcgcggttcgggccgttgccgctgttctcgtagtgcagctcgatatggtacttgtcggcgagcagttccacggcttcgcggaagtcgatgttttcggattgttcgacgtatttgaatacgtcgccacccaagccgcagccgaagcagtgccacacgccgagtgaggggcgcacgttgaagctgccggttttctcgtcgtggaacgggcacaggcccacgaaggtgccggtgccggagggcttaagcgttacggtcgcagatacaatgtcatacaggtccgcggcggcgcgcaccttctcgacatcctctttcttaatcattccgaccataagtctctagagtaccgcctcacctgagacacggtaaatttttaccgtcggttatcatttcttccgcgaaactcccttcagtcgcctacagcgacagctcccctcacccgaggggagctggctcgcgcagcgagactgagggaagcacccgtccaacacgccctcagcacaagatggagtgcagggccagagcggagttgtcggtcaggcttgcgacctgatcgatggcgacgcgcaggcgctcgttgtcattggtggattcattccaatcggccaggaactggctttccaaagcgtcggatgggagcggcgaatcggccataagcacatcgaccaaatccgatacgatcttgagctcctcctgatggaatggctcgcgctcgcgaggcgccatgacgaagtacacggcgatgcccttcaacgccacgatctcgtaattcgtgtcctcgggaatcacgatgttcgcggaataccgggtcaacggcccgggcccatacgtgtcgcgcgtggcggtttccaccgaccagcagaagcgaccgatcaaatcggacgtgatgttcttgagctgtgccaacgattcgcgcgaaccattgaaatgtgcagggaacaaatgctctcggcgcaatcgcatgaacgcggccagcagcttgtcggcatcccacttcgccccataccatgcgcgcgtctgctcgatgatgtggtccagcatcttcggatcggcgagcacaatcggatcgaacgcgccggtggcgatggaatcctcgacatcatgcacggagtaggcgacatcatccgaaaggtccatgatctggcattccatgggcttggtggcctggggagcgccgattttgagccagcggaacaccggttcgtcatccgggtagacgcagaacttcttcgaccgctcccccttggggtgtcggtcggcttcggccaaggtccacgggtatttgacggccgcatccaaggccgcacgggtcaggttcacaccggccgaacgcccgtccgggtgaaagatcttgggttcgagccgggtcaggatacgcatggtctgtgcgttgccctcgaagccgccgatattgctggcgatgtcggcgagcgcacgctccccgttgtgcccgaacggcgggtgaccaaggtcgtgggccagacaggcgcagtcgaccacgtccggatcacagccgagcaatgcgccgatttggcgaccgatctgggcgacttccagcgtatgcgtcagtcgggtgcgggcgaaatcgtcggtaccggcaatcagaacctggcttttcgcgcccaaacgccgcaaagcggacgaatgaatcagtcgcgcgcgatcgcgttcgaaagccgtgcgcgacttggatttgggcggctcgggtgcccatcgctcctcgtcgaaggcgttgtagccctcatcgctcagcacctgttccccatccaacgttgtttccatatgccaagcataggcacacatatcggccgcagtaatcccgacttcccgaatatgtgccactgacgtcaactcaacggcacatattcgggagattggggccgatttcccgaatatgtgacgctcagcacatgtcagtggtacatattcgggaagaagggattacggggtgccaccgtatggcggtaatgcaccttatagcagcgtggcggggtcgagcttggcgaggtcggcggcgggcagtacttcggcggcatgctcgtaaaggcgcgggatgcggttgcgcaggcaggtgaagatctcgtagctgatggtgtcggcggcgcgggcccaatcgtcggcggtaggctcaacgtaatcctcgccgcggcccgggccgaacagttcgaccgtgtcgccctcgtgaacgccgagttcggcggcggatccgtgcaggtccacgatgaactggtccatgcacacgcggccgcacacgcggtagagcttcggaccttcagtggtcatgatgcgcaccgggccgcccggcttctccacgtgcttggcaccttccatatcgaaaccggaagcggagcggtggatgccatcggcgtagcccagcggcacaatagcggtcgaggtgttgttcggggtcaggtaggtgcggccataagagatgccatggccggcctccacatccttgaccgtgccgagctgcgcctgcaggcgcatggccggggtcagatgccagtcgcgcggggtgcccatcgcgggatcgggctcgtagccgtacaggccgatgccggggcgggtaagttcgaagtgaatctccgggcggtccaaagtggccgccgtgttggccaggtgacggatctccggcggaatgccggcctgttccatgcggcgcgtgaagtccttgaacgttgcgatctgctggtcggtggaggcgacgaattcgggcacatcgggcgaatcggccacggcgagatggctccactgacccacaatatgcaacacgccctctttggcgagcggcacgagtttggcgagcgcggcgtcgaatccagccggcgtgaaaccgttgcgaccgaagccggaatcgaccttgacgtgtacgcgggcgggcttgccgagcttgcgtgcggcggcggccacggcatcgatgccgggcagggagccgaccgatacgtcgatatcggcagcgatcagctcatcgaatggcacttcggtgccgttgtagacccaagtcagaatgcggcaacggtcggggccgatgccgagtttgcgcagcagcagtgcttcatgcgattgcgcggtgccgagccatgtcgcgccgccggcgagcgcggccagtgcggcgggcagcagtccgtggccgtatgcgtcggccttgaccacgcccatcaccgccgtgccggagttcgggccgccgaccacggagaccaggtgggccatgttgtcgcgcatggttttgaggttcacgatggcctgtgcggggtattggcggcgggcggccgcatagttggccttgccctgctcggacgagaatgcgatttcgggtgctgcgttcatgctcataggcacctattgttgcgcaggaatgtgacgtgtggtcacaatcgtttgttttcgcccggcagtcgtacactaatgaccgatatgcggtttctcggaagccgcctttgattcccggcgttgaggcgtgccgggatcccggaaatccgtccggtctagccccatatcttaagtttcatgagagaagaacatggatctgtttcgtaagaaaagcgtggatcagcttgtcgccgaatccactcccctgaagcgcacgatgcgcaccttcgatctgacgatgctcggtatcggcgcgatcatcggcaccggtatcttcgtgctcaccggcaagggcgcgctcaccgccggcccggccctgtccgtatcgttcctgctggccgccgtctgctgcggtttcgccggcctgtgctacgccgagttcgccgccatggcaccggtgtccggctcggcctactcctatgcctatctggcgttcggcgagctcatcgccttcgtgatcggctgggatctgattctggagtatgctctgcaggcggccaccgtgtccgccggctggtccggatacttcaacaagttgttggaaggcttcggactgcacctgccggtcgagctgaccgccgcctacggcaccaacccggacgtcaccacctacttcaacctgcccggtttcgtcatcgtgctgatcatcacgtgggtgctctcgatcggcatcaaccagaccaagcgcaccaatgacgtgatggtgctcatcaagctcgccatcatcgtgctgttcatcgtgtgcgccgtgtggtatgtcaagccgtccaactggcagccgttctccccgtacggcatctacactttccagcccggctccacccagccgtacggcattgtgccggccgcatccatcgtgttcttcagcttcatcggattcgacgccgtgtcctcttccgccgaggagaccatcaacccgaacaagacactgccgcgcggcatcctgctgtccctggccgtttccaccgtgctctacatcgtcatgaccatgatcatgaccggcgtggtgccctacaaggagttcgccaagtacatcgacgccccagtggccggcgtgattctggagaccggcatgaactggctcgcggtgatcgtgaacctaggcgccctcatcggcatgaccacggtgatgctcgtacagctgtacggccagtcccgtatctgctacgccatgagccgtgacggcctgttcccgaagttcttcggccacgtgcacgagaagtaccgcaccccgttcaagggcacctggttcttcggtctgctgaccgcgttcgccggcggcttcatcaacatcaacgtgctgttcgagctggtgaacatcggtacgctgtccgcgttcatcatcgtgtcggccggtattctatggatgcgcaagacccagccgaatgcgccccgcggcttccgcgcgccgggcgtgccggtcaccccgattctggccatcgtattctgcttcgtgctcatcgccggtctcaactgggagacctgggtgcgtttcgccatctggttcggtctgggcctgatcgtgtacttcggctacagccgcaagcgctccaagctcggccttgagcagaaggccggggctgacaccaaggtcgctgcgactgaggactgaggtctatcggctgaccgatag

SEQ ID NO: 1941 - DNA, 31220 bp, Unknown
  R17_18m  MAG No. k141_7230
cgggttcgtcggtcattgcgattgtggcggccatggtggtgctgcttgccacgggtgcggtggtacttcgcgctcgtagcaagacggagtagttcgtcgcaatacgggtgttgatactcgtgccataagcgggatttaggggttgcccaatgggtgcccccctaaatcccgtttgttttgtcgcaggacatatgccgagaccagtgactaaaatgctttagttatttgactaaaattattgatatcataagagttagcgcacggttgatgcatatggcccaatgcgggggtgccgtcaaccgtatcgcaatagtcgcaatgcggtcgtaaaaaggagtgttcatgagatctgctcgcgaggcatcgtcatcgtctgacggcacgcagcgtgtgagcctgaaagacatcgcagatgaattaggcatctcgcagaccgcggtatccttcgccatcaatgatcggcccggcgtttccgcggaaaccaaacgtcgggtcaaagaggctgcagccaggctcggctggacgccggtctacgccgcacaagcactgggatcctcgaagaccatgaccataggctttgcccccgcacgatccacgcaggggctcacggatgaaagcttcatgctgcacttcatggcgggtgtgcacgcctcgctcagccccaaaggctatggtttgctgtaccgcccatgccgattcctgaacgaggagatgagcgtatacaaggattgggcgtcgcgcaagcgcgtggatggcgttatcctcgtcgatttgcgagccgatgatccacgcccggaattgttgaagaatctgggtgtgcgcgcagtgcttgccggaggacccgacccgaacaattatgtgccgtcactgtccatcgatgattcacgcacgatgggaaccgtgctcgaacatttgtcgtcattgggacaccgccgaatcgcctatctttccggcgatccgaacctggattattcacaggggcgtgtcgcggcgttccgcgcatttgccaaacggcgaaagctggaatccatcaacatcgaattcaccgattttgttgcggaacaggccgcgatgctcacgttggagatgctgcattcaccgaagccgcctaccgcgttcatctatgaaacggagatcctcgccgcggccagtcttcacgccatggccgaagattattccgctcggcagatggaggcgggggagggccatgcggaagtctatccgaatgggctgcccgccattgtcagttttgaagacagtttcatttgtgaggcggcgtatccgtcaattaccgccgcgcatcgtgatgccagcgaatacggtgccaaagtggccaaactgctgctcaaagtgcttgccggagagcaggtgagcggcaaccggcgaatcctcaccccgaaactggtgattcgggacagcaccgccaagcccatggataccatggcgtagaacggtcattgcatcggcttgcagacaatgacatgcgaccagtacgacgttggcccccgtattccacggggccaacgccgttgagaaagaggaagaaaaaaaggatatagaggcttagatgctgtcgattattcagcgttcttcacggccgtcgcaatggacacggccgggtccaagaacggaatcagcgtggactggaaggcgtggtacaggtcggacttgcccggccagaccgtgccgatcacgtggttgttcttgtcaagctgatggaaccaggaaccgccctcgtggtcgatgacatgctcatcgacatactgggcgaatgtggcgtaccagttggcgtacatctcctcgccggtggccgcatacagcgtggcggaagtgttcaacgattcggccagcgtccaatgcatgcgatcggtgaccacgggcttgccgttccagtcggtcgtgtaggcgagtcccacggtgccgtcggcgttccatgcgtcggccacggcacgcgcgaacagatgctcggcggcgtcgacgtacggctgtgcgccgtcaaggttggcgaaggagcttaacgcccactgcgtgatcaagcgggcccattcgatgccgtgacccggcgtggcgccgtacggcttgaactgatcatccttcttgtcgacgttgcattcgaggtccagcgaccaatcggacttgaaatgttcggggatgcgccactcgttgtgcttcgcccagccgatcacatgatcgatgatgcggccggcgcgtactcgataggcgttgtctcctgtggcatccgtcacggccaggaacgcctcggtggtgtgcatgttggcgttgagaccacggtacgggtcgagctcggtgaattcggtattccaggtatcgacggccaaaccgatttcgtcatcccagaaatgcttgtcatacgtggcaagcgcctcgtcaagcagttccttggcacccggacgtccggccagcagggcggaggacgcggcgagaatcacgaaggcatgcgcatagcagaccttgcccggcgcatgggtgccgtccgcgaacacctgcgggtaccagccgccgtgctcgttgtcatgcagaatgccggtcaatcccttgagcgccgcatcggccagctccccggcgcccggatatccgagcatgtcgccaatcgaatacacatgggccatacggctggtgatccacgtttcgacgccgtgggatgggtcaagggtgccgtcggcgttcagccagccggaaccgccgttcggcgctgggaagcccttgccgaacttcagcagctcataggtttcggaagccatgaaaatgcggttggcttcggtgccgagcgtataccgtgggttattggtcataatgattgttcctttccttaacgagaacatgcggtgggtgcgcaatgagcattcagcgggcacgtcttagtgcttcacacgaatgtcgaaatagtccatgaccagttcacaaaacatcatattcgaccagctgaaccattcgcgcgtgtacttggtcggatcatccacgtcgatgccttcgtgcatgagatgtgtaccggcgtcggtggctacaagacggtcgaggatatgcgccttgaagtccttgctgtcgctggtcatcgcctcgatagacagggcgatgggccacacatagcgcggcggggtgtgcggtgagccgatgcccttgagatactcgccctcgtagtagtatgggttctcgtcgctgagcagcgtacgtcgggtcgccagatatgtcggatcgtccggtgcgcagtatcccaagtaaggggccgccatcaaggagggcacattgctgtcgtccatgatattgacgtggcccaggccgtcggtctcgaatgcgtagattgtctctccgttgcggttcgtcgttttggcgtgggcttcgatgccttcggtgatggtgcggcgcagctcgccggcacgggcggcgatatcggcgtcatccagaatctcaccgccgaagatgcgttccagatagcccatcaccacggcggcgaacatgttcgagggtaccagatagtggtaggtgcaggcgtcgtcgctggggcggaagccggaccaggtcatgccggtgtacgccaccggcgaccccttgccgtcattgctcagcgattcggtggggatgtccgtgtcgcggatgaagaaatacggggagcgttcatgatgctgctcggtctcgaagacgtcaagaatcttcttgacgccggcaatgaattcggcatcgaagtgatcggcgttgccggtgttcgcatacagcatccaagccaactggatggggtagcacagcgaatccacctcgtacttgcgctcccaaagccaagggctggagaaatcggaccggtcgtccttgtcccaggaggcgccgttcggttcctcgttgaaggcattcgcatacgggtcgatgatgatgtagcggaactgttgccgtatcagaccggcgatcaggttcgcaatatcgctgtcttcggcggcaagggccagatacgggcgcaattgcgcggtcgaatcacgcagccacatggccgggatatcgccggtaagcaggaatgtggtgccgtcgtcatgccgtttgaccgtggtggtcagggtgtcggcaaagcaggcattgaagttctcggcccaggcggcgtgttcggtgccacacaggtccgtgatgtgctgcatgaaatccgagaccgacttcggtatcgcggtggtcgtcataaattcaacttctttgtttgagggatatacatatcaagggaacagcattattctaaaccgctttagttcatgacacgcgaaaggatgtgaagagcatgagtgtgagcgcaccatatgaaaaaccggtgagatttcctgttcggagaatctcaccggttgcgatcagtcgattcgtgaagtcgcacgaatggcggataaggggatgggtggattacttgccgatttcagccagatagtcgggcatctcggccgggtactgcggccaggcaccggcctgggtgcagacgtaggcggcggtgttgacggccttgcggtgggcttctgccagcgtgtcgcccagcaggatgcgggcggtgaaggtgccggagaaggagtcacccgcacccacggtgtcgttcacctcgacgtgcggagtgtccagcgtggagacctcgcccttgcgggagatgatggtggagtaggcggagccggcggtcagaatcacgtagtcaaggccgaattcctcgatgaaccagcgggaggcgtcttcgccggaggtgccgcggatgtcgaacatgtcgcgcagcagcaggagttcctcgtcgttgatcttgaagacggtggccgccttgaggagttcctcgatgaggtccttggagtagtggtcgccacgcaggttgatgtcgaagaacttcatcgcgcccggcttggtgtgcttgagcagctccgtgatggtggcgtgcgattcgggggagcgcagggccagggtgccgaagcagacggcgtcagccttggagaccacgtcgatgagctggcgggtgtacaggatgtggtcccaagccacgcccttgacgatggtgtactccgggatgccgttcttcagcgcgacctcgacggtggaggtcggccaggcgttgcgctggatgacggtgttgatgccggcctcgttggccttggcaatcagttcgtcgccgagctcatcctcgccgaccgcgctgatagcccagccttcggtgccgttcttcatcgcgtggtaggcgaagttgacgggggcgccgccggctcgcttgccgctcggcagcatatcccacagcagttcaccgaggctcagaacgatcggggtagtcatggttggtttcctttcctttgtttcttttaccgggtgtttcgtatggaacatcttgtgatgtcggcgcttggtttaggagacgtcgaagaacaccgaggggtgttcgaggaattgggtcaccgccactgctgcggcaccggagaccgccgcgtcggcggacagggtggataggctgatggaagtggaggcattgatttcggggatggcccgttcggccaccgtggcgcgcacctcatcgagcagtatcgggccggcttcggacacgatgtcgccgatgatgatgtgctcaggattgtatccattgaagatggtgacgcatccgtagccgacgtatcgggcgacttcgcggacaatggcgattgacgcttcgtcgccgtcgccggctttggcgaacagggcgcgggcggcttcggtgtgggtcatatcggccgcgccgggaaccacggtgccatcggcgatgagcatgtcgtgaatggcgggggtggagcagtagcgttcaaggcagccgacgttgccgcaatcgcaggggcggccgttgacgtcgatggagatgtgtccgatttcggtggcggcaccgaggaagccgttgatgagacgaccgttgtcgatgacgccgaggcccacgccttcgccgaccagataataggcgaggttgccgtcggcgtgcaccgacgggtcgaagagataatgtgcgagggctccggcgcgggcgtcctgttcgatgaacacaggcacgcggaaagcggtggcgaattcgtcgatgaagttgattttgcgccagccctgcatgctggacaccacggcggtgcggcctacgttacgcaggtaggggccgggcaccgccatgccgatggccacaatggacgggtcgttgtcaagcagttgttcgacgcgctggtggatggtgacgatggtgtcgttgatggtgttgccgtacaccgtgggcaggttttcaaagctcagggtgttgccacataggtcgaacacgccgatctgcaccagcgagcgggcgaatttgatgccgatgatgcggaaccgcgtggtgtcgagtttgagaccgatggaacggcggttcttggaaccttccaaatcgccggtctcttcaatcatgccggcctcgataaggcgtgcggtgattttggtgatggccgcgggggtgagttccagtgccttggcgatttgcgcgcgggagctgatgccgttgtgatacaggtgcttgacgatgcgggagcggttggattcggagacactggcttgggaagtggcatgggtggtgtttgttgccatcggtcttaagtcctccttgtctgcaccgttgcgagttgttccgctcgtctttgaatctgaacttgattaagatattaacgctgttaattgattgacgcaatcaatatgtcattcggtgtgtcgtgcatgtgagtgtcgtcttgggggaatttgttaagatggttgtcaatagtcggatgcacactgatatcaagcgaaacgttcgatgaagaacaggggaggactgatgtctgaaaacactatgaacaatctcaaaatcggtgttgacgtgggcggaacaaaaatcgaagctgtgctggttgacgcaatgggcacggtattgggttccgcccgtattcccgccaggcatggcaacgatgccgtgatcgaagacatcgtcgctgtagcacatcaggcagcgggtgagcgttttgacgaggtgagggccatcggtgtcggtaccccgggcacggtggattcggccagcgggcatgtgggcaatatcgtgaatctcgacgtggtctcgctggatatggggccgttggtctcgcagcgttcgggcgtgccggcccatgtggaaaacgacgtcaatgccgccgccgtcggcgcggccaccgtattgggcggtgcggacggcatggccggtaccattgcgttcctgaacttcggcaccggactggctgcgggcatcgtcgaaaacggcgtgctgatgcatggctatagcggcgcggccggcgaaatcggccatatcccagtcgaacctcatcgcctcaagtgcccttgcgggcaatacggatgcttggaaacagtctgctcgggcgcatccgtggggcgtctgtggcccaacgccgacccgccgatgcccgacctgattcgtcgcgcgaaaaagcgggaggccaaggccgtcgatgtgctggacatggtagtgcgcgccatcggcgacaccatacaaatcctggctcagtccgttgatccgcgactcatcatcttgggcggtggcatggccaaaaccggcgaaccattggtcgaggtgatcacggctgagctgcgccggcgcgaatcgcaatgccgattcctcgaaacgctggacctgccggcccggctgcgtctggcacctgtcggccaaccagtcggagccatcggtgccgccatggcggcgtagcctggcatagtgccggggcatgggagatgaggcctcagatttgtctccgaggccccatctcccatgcagtcctatatcgctttatgtcgtgctgtgccgcgcttggtcttgcgcgtttcgttgccggggtgaccggcttttatttggccaagtgttggaagaccacggcgatggcctcgccctgtacggtgatgtcaggtccgcattcgcagcgccggattaccgtgtgtttgtggaaggacgaggatgtggcggcatccagatattgctgggccgcgccgatgaacgtcgcgttgatgatgttcggctggccatagacgcatacgtctgccatatccaaaaggcccacaggcatggccagggcttggccaagatagcggcccgcccgagcaaggataccctgatgctgctccacgtctgccgcgctgagttgcttcttcaatgcggttccggaaatcatcgtctccaagcaaccgtgcttgccgcaagggcacagcggcccgtcaagatcgatggaaatatggccgagctcgccagccgcgtgcagttcgccgattaccggcgtgtccgagagcagaatcgccgaaccgatgcctctttcgatgcgcacgaaaagcatattcggcccgccttggccaaagaaacgttcggtgagcatggctgcggtggcgtcgttgctgacgtttacttcaagtccgaaatgttcggcgattggcgtggacaggtcgagattgttccagccgcgcatcgtggaggagcggaccacgccgttgtctaccacgccgggggaggcgactccgatgccgatgacctcgccatcggacatgcccagcatcttctcaatgagctcgatgatcacatccacggaaacgaatgagccggtgttcagggtgacttcggcgtgacgcagcggctggccgagcagattggtgactgcgccgtgcagcaggtgctcctgcgtcaggtcgatgctgatgatgcgcagtcgatcgatatcgatgctcagcagtgtgcctcgtttgcctttgccgccgctgggtgcctgaccggtctcgcgcagcaatccttcctccagcatccgaccgaccacatcggaaacggccacgcggctcaatccggtgcgtcggccgagctcggcgcgcgaatactggttggtggggaacaacaacctgaagataagttggcggttcttgcggcgcacatcggcgggggaagccttggccgcatggtcgtcggtcgttgtgttgagaccgagatatgacatgtttcctcctacctgatggtgagcgagtggacggcgattgttgttccatacacagcttagacggtgaagcgcaatttcgtcgttgaaactgttatgaaacttcactaataaattccagtgtacctgtgtgaagcgtcaggaaacaccgtgagtgttcataaggtccaaaattgttactatcattaacaaatagcgaatcaccaatcggcgctacgccgaacggtggttggaacgccgcgcggcatccggacgtgacaaggatgttgccattatccgcaagacgggcggcggtacagcgactcgcatcgggcgggccgtacggaactggaggaaaccgatgccggaaatcatcattgtcaagaacgaagccgaggccggcgagatctacggccgttgcgtggcggacctgatcaaagcaaagccggacgccgtgctgggcctggccactggctccagcccgctggccgcctatcaggcgctcgccaagatcgtcaaggacgaggccattgacgtttcgggcgtgcgtggtttcgcgcttgacgaatacatcgggctgccgctgacccatcccgagtcctatcatgcgaccatccatcgcaccgtggtcgaaccgcttggcctggacccggccaaggtccatgtgcccggcgacgtactcaacggcactccgctcgaagacggcgacaaagtcgcgctggccggcccggcctatgatcgtgccatcgaagccgctggcggcatcgacgtgcagatcctcggcatcggcaccgacggccacgtcggcttcaacgagcccggttcctcgctggcctccggcactcgcgtcaagaccttggccgaacagacccgcatcgacaacgcgcgcttcttcgacaacgacatcaaccaagtgcccacccactgcatcacgcagggtattggcacgatcatgaaggcccgtcacctcgtgctgctggcgttcggtgccggcaaggccgaagccatcgaggagacggtggaaggcggcgtgtccgcgttctgcccggcttccgcgctgcagatgcacccgcacgccacgattatcgtggacgaggaggccgcctctcgtctgcgccacaaggactactatcgctacgcctacacccacaagccggcctggcagggcatctgagttatcgtgtgctggcttccctctttgtgtgaggggagctgtcgaatgtaatgagactgagggtggttatcggcggcggcatatgtgtattgcttcccgattggaccaccctcagtctcgtttcgcgagccagctcccgttggcgggagcgcatgagcggtaaggagaacaacatgtctgataggaacgagatagtctcgcgcgtgaccgcggcactggagggcaagccggctccggtggcgattcgcaacgcgcgcaaggtggatgcgtgcggcgaacggcgcggatattgggtcgtctccgatgccgccggcgtcatcgtggcggccggcacgggggaggaggccttcgagcactactgccgcacggtggggctcgacccggccgatcgcaacgcggtcatcgacgccgaaggccgtattctgacccccggctacgtggacatccacgcgcacggcgcatgggagaagagcttcgacgacgggtcggatggcatcgatgtggcgcgggccggccacgccgtgcacggcaccacgcgccaggtgctctcgctgatcaccaatcccgtggacgtgatctgccggaacatccgcaccgtccgcgccaagatggagtccggccgccccgacatcctaggctgtcatctggaaggtccgttcctggctctggcccgcaagggcgcacatgacccggaatgtctcaaggatccggtacccgacatcgtcgacgacatgcttgaggcttcaggcgcggcgaacggcaagattggctgcatccgccagatcaccatcgcccccgaactaccccacggcatctccgccatccgccagttcgccgctgccggcgtggtgccggccgtgggccactgcgacgccgactacgagaccgccaaagccggcttcgacgcgggcgcgggcatcatgacccacatgttcaacgcgatgaacggcctgcaccaccgcgagcccggtccgattccggccgcggtggaggatccgcgcgtcaccatcgagctcatcaacgacggatttcacgtgcaggatccgatggtgagcctctccttccggttcgcgcctcatcgtacggccttcgtaaccgatgcaatggccgcgaccgactgcccggacggtgcctacaagttgggtgcactggacgtgaacgtggtcgatgggcatgcgcgtttggtttccaacggcgccattgccggctccactctgctgctggaggtcgccgtgcgccgtgcggtgtgcgaactgggcttgagcccggtggacgcggtcgaggccgccacattgacgccggccaaggcgttcggcttcgaccggccgaacccggtcaccggggtgcctatcggcctcatcgcccccggcttcgccgccgatttcaaccttgccgatccgaccgattggacggtcgaacaggtgtggtgcgcgggccgcaagctcaagtagcagtaggccgaccggttgacgaatggaaagcattcgtctacaagcatgttcaaatggtgacatgatagcatgttcatctcaccatttgaacgttattcacgtcgtaatacaagaatccgtaatactgctcgataccgcataaaaccggccatggtcgccacaagcgaaacataagtcgatggctgtggaaacgcaggggtaacacatcctcaccatagtcaggcggtaatccacgcccgcagtgatggcgtggaaacaagttatgagagaggattcctgttgaattccaagaagattctggccgccgccgtctccgtggccgccatcgcatccctgaccgcctgcggcggtgtgaaggatgacaccaccgcaggcgccgattccggcaacgccatcaccatcggcaccaccgataagatcaccagcctggaccccgccggctcctacgacaacggctcctacgccgtgcagatccaggtgttcccgttcctgtatgcccaggactacaacacctccgagctgagcccggacatcgccgccgatgacggtacctggaacgatgacggcaccgaattcaccgtcaagctcaaggacggcctgaagtttgccaacggcaacgacctgaccgcttccgacgtcaagttctcctacgaccgcatcaagaagatcaacgacccgaacggcccgagctccctgctcgccaacgtcgaatccgtgaccgctaaggacgacaccaccgtggtgttcaaggattccgtgcctttcgacgtgactttgaagcaggtcatgtccagccccgccggcccgatcgtcgatgaggataccttcgacgccgacaagctcaccgacgccgacaccatcgtctccaagaaggccttcgccggcccgtacacgctgaccgccttcaagatcaacgagtccgccgcctacgctaagaacgactcctacaagggcctgaccccggccaagaactccgccgtgcaggtcaagtacttcgccgacgcctccaacctgaagatggccgtccagcagggccaggtcgacgtggcctaccgctccctgagcccgaccgacatcgaggacctctccaaggactccaaggtcaaggtcgtcaagggcccgggcggtgaggagcgcttcatcgccttcaacttcaagattcagccctacggtgaatcccagcccgacgccgacgctaacaaggccaaggccgtgcgccaggccgtcgccaacctcatcgaccgcgaagagctctccaccaaggtctacaagggcacctacaccccgatgtactccttcatcccggacggcctggccggtcacgatgacacgctgaagtccgcctacggcgacggcaacggcaagccgagcaccgagaaggccaagaaggtcctcgccgatgccggcgtcaccaccccggtcgacctcaagctccagtacaacagcgaccactatggctccgcctccgccgacgagtacgcggccttgaagtcccagcttgaggaaggcggcctgttcaaggtcgacctgcagtccaccgaatggacccagtactccaaggaccgcgtggtcaccgacgattccgacggtgtgtacccggtctaccagctcggctggttcccggactactccgacccggacaactacctgtccccgttcttccgcgacggcaacttcgtgaacaacggctactccaacaaggaagtcaacgacctgatcgtcaagcaggccggcgagaaggatgcctccgcccgtgaggacatcctcaagcaggtccagaaactcgagaccgaagacctctccaccatcccgctgctgcagggtgcccaggtcgccgtcaccggcacctccgtgaagggtgtcaccctcgacgcttccttccgcttccgctacgcctccgtcaccaagggctgatccagcatgagctcccctctttgaggggggagctgtctggcgacggcagactgaggggagcccaactcgtatgactcccctcagtcggcttcgccgccagctcccctcggagaggggagcctttattgctttatataccgattaccaacaccaaggagcatcgcgtgtcagacagcgccacagcgacctccagcaccactccggcgaaagccaagacgaagaagaaccgactgtcaggtagtttcttccgcttcgtgctgacgaggttcctcctcattatccccaccgttttcattctggtcaccatcgtgttcttcgtgatgcgcgccaccggcgacccgatttccgccgccctgggcggccgcctgacacccgccgaactccagcagcgcatccacgcggccggctatgaccgcccgctgatcgtgcaatacgtcgactatcttggcggcctgctgcacggcgacctcggcacgacgctgaccgataaccagccggtgatcagcatccttacgcactacggcgccgccacattcgaactggccttcctcgccctgatcgtggcgctgatcgtcggcatcggcctgggccgactcgccgcccgcaaacgcgaccgtgccgccgacgccggcatccgcatcttcgccatcctgtgctacgccaccccggtgttcttcctcggcctcgtgctgaagctcatcttcgccgtctggctcaacatcctgccagcctccggccgctccgacctgaactccgaaatgcagttcacccgtctggtatcgccgaccggcttctacatcatcgacgccatccagctcggcgacatgaacgtgctcgtcgacgtgctgcgccacgccgtgctgccggccgtcgccctaggcctgctgaccgccggcgtgttcatccgtctggtgcgcaccaacgtcatctccacctacaattccggctacgtcgaggccgcccgctcgcgcggcgtctccgaaaagcgcctgctcaacaagcacgcctggcggccggccctgatcccgatcatcaccgtcatgggcatgcagatcgccctgatgctcgccggtgcggtcctgaccgaaaccaccttcgaatggaagggcctgggcttcatgctgtcccagtacctgaaggcccgtgacttcgtggccgtgcagggcatcgtgatccttatcgccatcatcgtggccgtcgtcaacttcctcgtcgacgtcatcgccgcgcttatcgacccgagagtgaggtactgagatgaccaccgcatcctccgacaagatcaccgtccccggtgacgaccgcctcaccaagctcaacgtcagcaccaagacgccgttctggaccaagattccaatcatcaaggaactgcgcgtggcggtcggctggcagaagggcatgctgatcaccggtctcgcgatcaccgcgttcttcctgctcgtggccctcttcgccccgctgatcgccccctacggccacgcccagatcaaggccgccgacggcacgtccttcccggcgcaggccgcgccctccgccgaacacatctggggcaccaccgccgccggattcgatgtgttctcccgtgtggtgtggggtgcccgcaccgccgtcatcgccatcgtcgtggccgtgctgctctccatcttcgccggcgtgctgcttggtctggtgtccggctactacggtggctgggtggaccgcatcctggtgatgatcgccgacgccgtctactccttcccctcgctgctgctcgccattctgatggccatcatgatctcccacggccagtccggcctgtggagcggcatcctggcctccggcatctccatcaccgtggtgtacatcccgcagtatttccgcacaattcgcgccgaagtgatccgcatcaaggaatccgcgtatgtcgagtccgcgcgcgtggtcggcgcctccacctggcgcatcatgaccaagcacctgttcaagaactccacccgcacgctgccggtgatcctgacgctgaactcgtccgaagccatcctgaccctcgccggcctgggcttcctcggcttcggcatcgagccgaccgccgccgccgaatggggctacgacctgaaccgttcggtttccgacgtgaccgccggcatctggtggaccgccgtgttcccgggcatcgccatcgtgcttatcgtgctcggcatcacgctcgtgggcgaatcgctcaacgatctggccgacccgcgtctgcgcgcccgcaagtccgccggcgaagtggtcggatcgatcgaagacacgtccgtcgacccaaacgagaagccgtccgcacgcaacgaggtgatcgccgaactcgacgcgaacgtcgacccgccggccaccgtcaccgaccatgacccgaccatcgtcgcctccgaatggaccggcgaaggcaagccggaaggcaaggagtgagagatgagcgaagacaacaagaatctcgccgatatcaaggacctgtccgtctccttcatgaccgacgccggttccatcaaggccgtcgaggacgtgaacttcaccattccgcgcaagaccgtggtcggcgtggtcggcgaatccggttccggcaagtccgtgaccgcgcgctccatcatcaagctgctgccggagacggccaccacctccggtgccgtctacctgtccaagcgcgatggctccgattcgctggacgtgctctccctgagcggcgaacagctgcgcgaagtgcgtggttccgaggccgcgatggtgttccaggagcccaattcggtgctgaacccggtgtacaccatcggctggcagattgaagagggcctgcgcgcccacggcatgaaggacaagaaggaactgcgcgccaaggccatcgacatcctgaagaaggtcggcatcccggatgccgaaacccgcgtggactactacccgcaccagttctccggtggccagaagcagcgcatcgtcatcgccatggcgttggtgctgaaccccggcctgattctggccgacgagcccaccaccgccctcgacgtgaccgtgcaggccgaaattctcgacctgctgcgcctcgcccgtgacgagttcgacgcctccgtgctcatcatcacccacaacatgggcgtgatcgcggacatcgccgaccaggtggtcgtcatgtaccgcggccacgtggtcgagcagggcgacgtggagcagatcttctaccatccgaaggacgactacaccaagcgactgctgggtgccgtgccgcgcatcggtcagaagctggtcgtgcgcgaccgcgagggcaagccgatcgagcgcaaggccgattggcgcgaacagccgatcgccgttgaggccaagaacctgaccatcacgtacccgggccatctcatgcagcccgacttcaaggccgtggacggcgcgaacttcaccatccaccgctccgaagtgctgggcctggtgggcgagtccggttccggcaagtccaccaccggccgtgccatcgccggcctgcagaaggtgtccggcggctccctgaacgtgcttggcatcgagatgaacggcgtcaaggagcgtgacttcaagcccaagcgcgcagacattggtttcgtgttccaggatccgggctcctcgttcaacccgctgatgaccatcgcggagaatgtggccgagccgctgctcgtgcaccacaagtacggttccgtggccgaggccaagaactatgtgggcgacctgctggagatggtccagctgccgcgcgcctacatgaaccgtttcccgcatgagctgtccggcggccagcgccagagggcgtctttggcgcgtggtttggcgttgaagccgtcgctgctgatcgccgatgagccgacttctgcattggacgtgtcggtgcaggccaaggtgttggagctgttcaagcgactgcaggcggaaatcggcttcgcgtgcctgttcatcacccatgatttggcggtggtcgatatgctcgccgaccgcatcatggtgatgcataagggccagatcgtggagcacggcgatgccgaccagattatgcagcacccggagaacccgtacaccaagaagctgctggcctccctgcccgtgcccgacccgcgcgaacagcagcagcaccgcgcccacctccacgagctcctagcccaagaggcgtaatcgcatagcattggagctccctcgtcagagggagctaactttatattcgctagtactgctgcccatcgaactggaacagggcgtgggcgtcgccgtgctttttgttctcgatgtaagtatggaacagctccagccgctcgctcgtgctggccgccaggggagtgggcaggtcatccagatcgaaccagccgacgctgaggctttcctcgtcgcccacgaacggctcggcattgccgccgggcttcagggcgcacaggaacgaatgatccatgtacatggtgttgtcgccattggcgtaggtcagcaccttgtttgacgaggtgacggccaccaaatcggtgacgatggcatcgatgcccgtctcctccttgatttcgcgcaccaccgtgtccgccggctgttcgcccggctcgttgatgccgtagaccatcgcccattcgcccgtgtccgaacgacggcccaacagcagttgaccatgttcgttcagtacacaaccggtcacgccattgagccatagcagatcatggccgatcttcttacgcaattccaacacaaattccggagtaggcacattgcctccttagtagaaaaaaaggagctccctctgatgagggagcttaagggttacttggcttgggcagcctgcttaatatggtgcgcttcgcgcatgatttcattttcctcgcgcttgtcagcgttcggcgtcgcctacaatcagtccaccggactgattgctttacggctccgcatccacgcttcgacgtcgtcgatctgcttcgggatgccggcggaaatccattcggggccgttctcggtcatgagtacgtcgtcctcgatacggatgccgatgccgcggtattccggcggaatcagcagatcatcctcgcggaagtacagaccgggctcgatggtgaagatcatgccgggcgtgatcttcgcgccctgataggactcatagcgggcctgcgcgcaatcatgcacatcaagacctaggtggtgggccacgccgcaggcgagccaacggcggtgctgctggccttgcggggacagtgactcctcgacgctcaccggcagcagaccccaatcgtgcagacgctcggcgatcacacgcatgcaggcgtggtggatgtcggaataggtggcacccggcttggcggcttcgaaaccggcctgctgcgagtccagcacggcctggtacagacgcttctggaagtcggtgaacttgccgttggtcgggaaggtgcgggtgatgtcggccgtgtacagggaatcgacctcaacgccggcatccaccagcagcatgtcgccggtcttcaccacaccggtattgcgcatccagtgcagaatcggggcgtgggggccggaggccacgatggagtcgtaaccgatggcgttgcccagctcacgggacacggcgttgaacgcgccttcgaggatacgctcggaacgcggcttgtcgagcgcggccggcagtgcggagagcagacggtcgaagccgtgcttggtggcgtccacggccttgcgcatctcgttgatttcgtagccgtctttgaccatgcgtgcctcggcggcgaactcgtgcagcttgtcgtcggatgcggagttcttgtccggatcggcgaaaccgttggcctcgcggatggactcgaccatcgaggtgatttcgggatcggtctcgctgaccacgcgcacacgcacggcgccggcctcggcacccacgtccttggacagggcgtcggccagctgggcgatgtcgtgggtctcgatgccggtcatcgcctgcatctccttgaggccagcacgcgggccaacccagtattcgccgtagtgggcggacatgaagaagtcctcggtggagttgtcggcgcgaggtgccacgaacagttccggagtgtgcgtcttgccggcggcgacttcgggggagtcggggtcgaccgggttcaggaccagcacggcgccggcctcgtaatcggaacccagaccggtgtagtaggcgaacgtggtgtccgggcggaacatgtaatcgcaatcattgttgcgcaccttcggctggccggccggaatgaccagacgctcgcccgggaaggctttgcccagcgcctcaaggcgggctggcgtgaacttggaggattcgagaggcttgatctccggatcatcgtcggcccagccggacttcataaactccttgaatgcagccgactgcgggcgcagcgagcggttgttcacacggtcgctcatcgactggttcgcgcccggcgccgtagcgcgctcctcggcctcatattccttgtccttggcggtgatcacttcacccattgccactctcctgtatgtagttgttgtcgaatcatcgattcccacctcatactagtcggctttatgcgatgtgccacgattgacggctgacggtaaaaccaagtacggaatttggacggtcttccggacatgcccatatggcgagtgcatcgggctggaatgcgggcccgtttattgttctcggtagggaaggaggggcatgggctggagcttgccgattgatattggcatattttgcgggctgaatccatgtgaacccatgcgatgaaggttcatcgcatcacgggacccgctgctctgcggatgcctccatctggggcactctggctttgagcagttttacccgcagcggagtgcgttcgatgacgtcggcgtatgtgaaatggacgatttcggtggcaccggctcgtttcagtccctcgtcgcgtgctcgttccttggccaccacctcctgaatgctgcggttatcggtcatggctgggtccacgtatttttgtgtgccgtcgtattcggccactatcacgcgcccgtcatcgagcttccatacgaaatcaacgcggtgctcggtattcgtctgcgggtcggtcaccgttacctgaatacgcggcgtgaggaagcgatcctcgatgatggtgcctcgcgcgagggattctccaccattctcgctcctttcgtttgcatagcgcagcaggcggaatactcgggcataatcgattctccattgaacgcagtcggcggctatctcttccttggttattcccttggcaagggccgagtcaaagatcggcaacgcaaaccgaaaatcaaggtctatagcggcctcgaccaaggttctagccggtgatatcagggataggccggaggcctcgtaatgtgtcttcggattgttcatatcgggcatatagacatgtcgtaagcgctgatggcattgacgagatccatgatcggaagtcacgatggttatgcagccatcatgcaaatgccattgatgttcgaatccataagcacttactgccaccaagccgccaaaaacccactgaggatgctcttgcgcaagagcgcgggccatatgcaacgttcgctccggcggcgtcaaaccatcccagtatgcggtatttgcataaagactgggaatgccgtcatacactttcaacaactcgccactctgggcacggcggcgtagagcggtctgttccgcttcatttcttgaatagacgcatctcagctcattctgcgcggctgatatgagcgaggccactgctttgtgtgtcttcatgacgtcgagcgtagccggaacgaagcagcgtaagtatgaatttcagccattgtggttctagcctcggagcttggctgtcttggagtgagatattcccgataatttcaaggtattaggccgctaattcggaatagtggataacatacaaaacttatccaccatcagtaatgtcattcgaacaacgtgctttggggattcgaacaagatatcatcggcgaagacggatgtagctggtagagggcggcgaattgacggttaacggtgcttatgctttgtacgccgtcggtgctggttcagatattggctggcttctgtctgagtgtggaatctagcgtcggcgtgagtccaatggttgtatcgtggccgacgatttgctgcaatttattggcggcatagatccagggcttggacggctgccgacggtgagagcagtcataacagtgaatgagcctctgcgagttcaaaagatgatgtagaggacgtttgtgagagtcgtttccggggcaagacatggtcgattgacgatgttgaaatttctcagcgacggcagaatggcatgccttggcgaggaggcgacactgagaggcgatggagtcgggattaatccaggttttggccagctaccgactcgcaagagcatcatagcgtcggtgtaccgccagaagctggcactgtaccgacgctgaatagcatcagcgtcgccggacatacaagttttggattgcagccgactaagaatgggatgccgacggcaagagccgcattgcaactatatgagatggcttcactgtgcgcgctgcaggaaaaggccgcccgcgcggcggcgacatatgagacggtttcactgtgcgcgcacgataaaccaccccggcggctaggatagagggaattgagggagtgcggctccacgcgtgaaggcaagaatcccgaaccatgcagggcaaacctgtgcgaggggagcttcctgcgcatgcggaagcggaatatatgcgggcatgcgtagacatgacgagaatggcacgaacacgtaagtggcatacgcactccgaacggttcaacagcaacacgagcagaggtcagaagaggatatgtcattcgagcatccgaatcggaacaacgagagcatgcgggacgtcgaactggacatcatgagccgcccgccggagcataacaccaccaatctggatctcgaccggatgaacctgatgctcgacatcctgggccacccggagcagtcgttccgcgtgattcatatcaccggtaccaacggcaaaggctccaccgcacgcatggccgaggccatctgccgcgcctacggcatgcgcaccggcctgtacacgtcgccgcatctggagaagatcaacgagcgtatcgccatcgacggccagcagctgtccgacgacgatttcatcgacatctgggaccagaccaaggatctcgtggccctggtggacgccaagatggaggagcaaggcaagccgaagatgagcttcttcgaggtgctcaccgccatggccatctggaagttcgccgacacgcccgtggacgtggccatcgtcgaggtcggcatgggaggcctgtgggacgccaccaacgtgctcaacgcggatgcggccatcatcggcccggtggacatggaccacatgcagtggctgggcgacaccgtcgaacagatcgccaccgagaaggccggcatcatcaagccgaactgcaccgccatcatcgggcctcagccgcatgaggaagccgtcatgccgattctcaccgaagccgccgaacgcaaccacgccatgctcgtgcgcgacggctacgaaatgaccgtgtccgaccgtatggccgcagtcggcggccaggtcgccaccctgaccacgcccaacggcacttacgagggcgtgccgatcgccaagttcggcgagcatcaggcccacaacgcgcttgccgcgcttgccgcctctgaagtggtgattccggtcaatggcccgctggacggcgacttggtgggcgaggcgttgagctcggtcaagattcccggacgcatcgaacagatccgcacctcaccgaccatcattctggatggcggacacaacgtgaatgccgccgaagccctacgcaaggccatagaggaaagctacgacttcaagcagctggtcggcgtggtcgccatgatgcgcgacaagcaggtcgaggaatatctgggtgttctggagccgatcctgagctccgtggtggtcaccgagaactcgtggcgcgagcgtgtgatgccggccgatgagctcgagaagattgccgtggacgtgttcggccgtgaccgtgtgatcaaggaagcgaacctgcccgacgcgattcaggctgccgtcaacatggtcgatgccgaggacgagctgggcgtgggctacggccacggcgtgcttatctgcggcagcttcgtcaccgccggcgacgcacgcctgatgcttgaggagcatgccagccccacgatgaggcaggccatggccgtccatcagccggcggtcgacccggacgattcggatcggccggcagacaaggccgaggatgaggccgccgacaacctcgaggattcggtgagcccggacgacttcgacgtgttcgacgtcctcggcctcggcaaggaacaggccagtgacgccggtaacgccggcaccggcacggccagtgccgacacaggcaccgacgattccgccgacgcccggtaacccgaatccaaggcatatcggatacccggacgcccgacatacggaaaacagtctcacgccatgtatctcaaggaactcaccctccgcggattcaaatccttcgcctccgccaccacgctgcgcttcgagcccggcatcacggcggtcgtcggccccaacggttcgggcaagtcgaacatcgtcgacgccctgacctgggtgatgggtgagcaaggtgccaaaaaccttcgcggcacttcgatggaggacgtgattttcgcaggcacgtcctcccgcccgccattgggccgtgcacaggtgagcctgaccatcgataattccgatcacacgctcgatatcgattacacggaagtcaccatatcccgcaccatcttccgcaacggaggctccgaatacgcgatcaacggctcgcaatgccgtctgctcgacattcaggaactcctttccgataccggtcttggccagcagatgcacgtgattgtgggtcagggacgattggatgcgattctgaaggccgacccgtccggtcaccgcgcgttcatcgaagaggccgccggcatcctgaagcaccgcaagcgcaaggaacgcgcgttgcgcaagttggccaataccgaaacgaacctgagccgacttgacgatttgctgggggagattcaccgccagctcggccccctcggacgccaggcacgcatctcccggcgcgccgacgcgattcagatatccgtacgcgacgcccaagcacgcctgtatgccgaagacgcccaacgctcgatgaaccgccgcgacacggtacgtcaagagcttggcgatgtgcgcaaccagctggccgtcgcccagcgtgaactcgcccaagtcaaagtacgcatcgaacaggtcgaggcgttgagctctgaatccagtccggccatcgccaaggccaaccaatactggcatgaattctcacagacccgtgaacgactgaacgcgctcgcccagttggccgaagagcgcagccggtcactcaccggccagatcgtcaccaacttcggtgaggatcccggcatgctcgtcaaacgagccgaggaactggagtctcaggccgcggcacaaaccaaggccgtggccgatgcacgcatcgcactcgacaaggccaccgaggaacgcgccgacgacgagaagaagcttgcctcagtccgccagacattgactgaactgcgcaaaaccgcacaggagcgcgatgcgcagatcgcccgactgcgcgaactcatcgcccgcgaggaatccgccgtgcaactggcgaccagccgcgccaaggattacgcctcccaacgtgactcgctgacttcccagcgcgacgatgcccagcaacagctggacgcattgcgcagcgaagcggactccattgccgacgatgacggtgccgcattggacgccgcgcgtgcgacgctcgccgaatgccgcgaacgactgaacgaactcgccgataagcagcgcgagatacagtccaagatcatctcgctcaaatccaaggccgatgcgcttgccgacacgctaggcagccgcaatgcctccggatcattggaacgcgacacggacgtggcctcgcttggccgactcaccgacttcatccatgtggccgaaggctgggaagaagccgtggcccacgcgctcgaccagtatgccagcgccatcgtggtacccgaggcaggcaacatgttgcacgccctcgaacgcgctcgggaagataagctcggcaaagccgtggtgctgaccgcgagcattgccggcgatcccgccacagagccaggcacggagtcggaggagagtagcgccgagaacacggcggccgccccgcaatcgggcaacgcgctggcagcactcgtcaccgcgaacccggatgcaaagaacccggcacaggccgaagctgtcgtgcacaccgtgcgtctcctgctggctgatgtagccatggccggcaccgccgacgaagcacagcacatcgtggcatccggcgaagccatgcgggccgtcaccaagaacggcgagaccttcacacacggcgtggcggcggtcggcggctcttccatctctcaatcggacctgtctctggccgcccgccgagacaaggcattggcacaggtcaaacagttggccgcccaagacggcggaatggctgagcaagtggccgaggccaaagccaaacgcgatgaagcggcccgactcgtcgaccaggaatccgccaaacgcaccgaagcccggctcaaagcccaacaggcggagaaatctctgaaatccgccacagaccgcgtcgcatcgttcacccgtcagcttgagcagctggataggaaaatcaccgagacccaagagaatcgcaacgagcatcagctcaagctcgacgatctcaatcgcgctttggcatcggcccggcaatccacagcggaacatgccgatttcgacgaacttgatgaacgtgaacgcacgctggagcgcgaactgaacctgactcgcgagcatgaggtcgccgcgaaaatcgcgtggaccgaagcaagccgcaaaggggagtcactgagccgacaggccgggctgctgcgggacaacgccagagaagccgccgaacgccgcgcccgcatcgaggcgttgaacgatcgcagacgcgagcaggccgcacacctgcaaggcgtggccgatgacgcgcgagcagtggccgccatggtggaacatacgctgcatgacgtggccgccaaacgagacgagctgcaggccgccgcctccagccatgacgaggaactcaaggccctgcgcgcgcagcgcaaccagatcgagcccaaggtcaccgatttgaccgggcgcgaacatgccttggatgtaaaccgcgaacggttggccgccgaatccgggcagctcatgcaaaaagtgtccgacgaactcggtctcactttggaggaattggttagtggttacggccccgaacagccggtgcccgtgctggatgatgagggcaaccctgtgccgttggatgagacggaagctgaggctgggaccgaagagggagaaaccgggggagagaccggcaccaacggcgattccgccctctttaagaccgtgccgtataaccgtcaggagcagaagaagcgtctcgataaggctcgccgcgatctggccgcactcggcaagatcaaccctttggccaccgaggaattcgaagcgcttgaggagcggaacaagtatctcaatgatcagcgcaacgatgtggtcaaatcacgtgacgatttgatgcagctcatcaaggatctcgattccacgatggtccaggtgttcaaatccgcgttcgacgataccgccgaggcattcgagcagatgttcgccacgctgttcccaggcggcaccggacgactgcgcctggaaaacccggaagacatgctcaccaccggcgtactggtcgaggccagcccggccggcaagcgcgtcaaacagctgagcctcctgtccggcggcgaacgttcgctgaccgcgctggcgctgctgttcgcgattttcaccgcccgccccagcccgttctatgtgatggacgaggtcgaggccgcgttggacgacgtgaacctgacccgtttgattaatgcgttcaatgagctacgcgcccatgcgcagctcatcatcattacgcaccagcaacgcaccatgtcgattgccaacgcgctttacggcgtaaccatgagagccgatggcgtaacagccgtggtgagtcaaaaactcgaacgataaacgaatggttcccgctggcaggaactggtaccacaggtgacagagggcggtccatatcgaaagatcgccctcagtctcgcttcgttcgacagctcccgccagcggaagcggggcggtattagcgcaatgccttgcgcacgccctgtacagtctgcagcgtcttgtagaagaccttcttgatgggtacgtcgcgggcgggggccaccggggtgatttcctcggtgaacttgcacttgaactcgttaaggcccttgagagacggcgcgaagtcggagccaatgcccatcagatcgtattcagtaataccctgcgagcctaggatgcagcattcggaatacagcagcttgtcggtcacatgcagacgcataacctcgttgcgcatgccggcatagtagcgcaccgcatgcgtgccgttcacggtgacaatcgaccatgccaccacacggtcttcaatacgtgcggcgaacacacggcaatgatcggcacccaacgcgccgatcatatcggaatagtcgctcatcggagcaggcgtgaatccatcgcgctggccggtctcgaccatcacatcgtaatattcggagaaatcggccagcgccttatccgtctcatcggcaacctcggccgggcactcgcgcagagacttgcgcacgtcacggcgtccacgacgcttcatccgagccagaatctcatcatcgccaccggtgacgtcgatgaccacggtctggtcgtacggcactgtggacagcaccttctccgtaccatcggcgaaccaggtgtcgatacgcaggaacgcgatgttcttgtcggccttcttgacggtgtccacgatggcgtcgacgacctcgcgctcctcagcctcggtgggcttggcgacccacgccggcccatgcatcgagcgcagataatgataaccgtgcgtctcaaaatcgataaaggagatcacggcgaccaattcaccatcacgcttgatcagataatcgccccatggtgtgcgtccgtcgatatccgcctgaaaaccagaccaaaccttggtctgttcgataggcaacgtgatgccggccttctcggcttcggcttccagtgtggctccgtcaactttctccaacgtgatcattacgattcagctatcctttttcgttcgtatccgtatgtcgtgtttctggtttggtcgtattgcgcgtgatctgatgtgggccaatcggaatccgatcaggatctgattggccggaatcccgtcacaagccaaacatgcgttcgacgacgtgatcgtcgccgtcgaacggcacatgcttgtgatggtccttgatccaacgctcgttgcccttgccgataatcagcaggatgttgaatcggtcggcgtgcgcacgggcatcgtaaatggcgttggtgatggccgtcggacggtcggaaatcaccgtggaggccacatccttgttcgtgatgtagccttgcatttccatgcagatgtcgatgaacggctcggtgtccgtatcttcggcggtgaaaatgaagttcgcgatacggttctcggcagcctcgacgatttccttacgacgatcgtaggccttgttgccggccgatccggtcaccagcgtgatacgcgggttttcctcgccccaacgctcgtagacgaagtcaagcagcgcggtgacggatgcgtagttgtgcgcataatcgacgatggcgagcgtgttcgactgcggatcgcggaactgttccatacggccggcgatacgtacggattcgatggcgtgcagtgcgtcggcgtcatcgagcgatacgccagccgcatgggcgatggcgatggccgccgccgcattgaggtagttgaagtcgccatcgatggacagatggtagtcgccaagggcctgatctccgtcggcgatgtggaaggaggcgtgctccgggtcggcgggccaggcgacgacgtccgcactggtgccggcattatccgcgtcatgcagggcgaaggtggttgcgccgatgccggctgccgccgcgtcctcccgcaacagatcggcgtgcagactgtccgcgccgagtaccagcgacttcgcgttgacgatgatctggcgcttgcaatacaggtaatcctcgaacgtggggtgttcgatcgggctgatgtggtcaggggagatgttcaggaacgcggccacatcgaaagtcaggccatagacgcggtccaccttgtacgcctgggaggagacctccatcaccagatactccatgccgttatcggccgcctcgcgcatcatgcggaaggcgtccatcgattcgggcgtggtcagatcggactcgacgtaggtgtggccgtcaaggcaattatcgaccgaggagaacaatgcggccttgccaccggagacggcgttgataagcgcctgcgtgaagtacgaggtggtcgtcttgcccttggtgccggtgacgccgatgaccgtgagctcgttctgcggatatccgtagaacgcggtggacagcaggctcatcgccttgcgtgcgtcgttgacgatcaggccgggggtggcggttgcggctgagtactcggtttcggccacgtatgcggccaggccggcttcgtcgatgccgttcagatactcggccttgaatcggcccttgcagcacagcagggtgcccggcgtgaccttgcgggtgtcgtaggtgatgccggcgaacggttcatccgccgaagcgatacgggccgggtcgtcggtccagacatccccttggatgatttcacgcagcagatggtgttccttgagcaggtcagcggccgaagccaaagtcaaagccataattgttactccctattatctagccgatacgccattctacaggtggggtgtagcgtgttgtggctcacacgtcatcgaccacgatatgggcacatgatttgattagaatggtgaaccgtgacgacaagcgaagcaactacgcaatccgggcagtcagccggatcgggcgagtccatggcagccaagcgcgccagatttgaacagctcgccatgcccgccgtcaatgcactgtaccggcaggcgatgaggctgaccaacaatcccgatgacgcgcaggatctggtccaggacaccttcgaacgcgggttcaaggccttcgactcattccagccgggctccaacttcgaggcgtggatgaccaccatcgagcgcaatgcctacttcaaccagtatgccaaggccaagcggcgcccgcagcgtgccaacgactccaccggcgaatacgacgattgggacatttacgatgccgccgaacatacgtcggacgggctcaagtccgctgaagaggaatatttggacgccttcgcgcccgaggaaatcatggccgcgctcgccaaactctcgccggaacgccggcaggtgttcatcgacgccgccatcgacggcaagtcctaccaacaggtggccgatgagcagggcgtgaaaatcggcacggtgatgagccgcctgaatcgcgcccgcacgcaactcaagcgtgagctcgcctcgtatgcgaaagagcgcgggtatgcgactggttcgtcggctggttcac

SEQ ID NO: 1942 - DNA, 17887 bp, Unknown
  R17_18m  MAG No. k141_7277
gcgggggtcaccggagtagacggcgtaccgccctggttaccggtatccacccggttggcggcgtcctgctgttccttctggtactgacgattgtaggaatcgacctgggaagcgatcagtacggtctgggccgcctgcttggcggattgggaatccagactgtcgatcatggaagacagttcgtcacgccttgtttcgccctcctggcgtagcttgtccaaagcgtcacgttcgctttgcgcggtttcggcggcggtctgtgcggaagcggccttctcatcggactgggtcttgagcacagcgatctgcttttcgatggccgccagacgttcgccacggttcttcgacgtgctcagtgaggtcgcggcggaggaagccgcattcgcctcgttgcgggacaacgcgtcccgggactgcatggaattgacgaagtcctgtgtgctggtggcacccgtcaccacgctcatcacgtcggaagcattcgagccgtgcatctcgtcacgggccagctgggccacggcggcgtgcgcgtcatcgtagtccttgccggtctgcttgatctgctcctcgagcgtctccttgtctttctgcgcggcggaaagacgtccggatgcggcatcggcctcgtcctgagcggtggcggcatcctcgttggcctgcgtgaccttgttctgggcggcgacaatcttgttgttggtcagatcgtccagctcaagtaccttattcgccaggtcctggctggcaccggccagctgctgcttgagttcggcctcgcgctgtaccgacgcggcgtgctggttctgcgcattgatcaggtcggaataggtgtctgcctgggcaggctgtgccgagctgaacgccagacctcccacacaggctgcggcggccaccagtgccgccagtgcgggcttgatcacacgtacgttcgtcatatgtgaatagtcctttcgctcacttaagccaataccataacatgcgaacctgagaggcttgcacacgatgtcatcacatttctcgcgggtaagccggtcgcgttacgccctcaaataacgccgcaacgagatggttgaagcgatgacggacagcagtatcgcgcccacaaccaggaacggcgatatcaccagtaccgtgagctgattcacataaggaatccatgtaacggatttcgccagccagccggtgacgaacacgttgacgatagccgaaagcatcaggcacgagagcaccgagccgatcagcgaggcgatggtgccctccagaatgaacggcagacgaatcgtccagttcgaggcacccacgtacctcatgatttcggtttcggttcgtctggatgcggcggacatacgaatggtggttccggtcagcaggatggcgaccaccaccatcacgccggcgagcacggccgtaaccgccgtggctcggttgagcacggcgaacaccgggtcgaagatctggcgctgatcggtaacgtcttccacaccctccttgccagagagcacttcggagaccacctgatatttggtggggtccttgagcttgagccagagggagtcctgcatatcgtccgcggtcagcgtacggccttggaattcaccgttcgggtactgcttggtgaaggtgttgtcgtagaaatcctgcttgctgacatagtcgatgttggagaccacgtcgttgagttcatcgcgaatggttttctgcagtgccgtgatctcattggctgagggcgatttgccggaagcacagttcgcggactggctggtgccgtcgggacatagccacaccacgacctcgaccttgtcgtaccagtcgcccttggctttggtgatctgcgcctgagtaagcaccgaagcgccgatgaacaggaatgagatgaaggtgaccagcgtcagcgacagcagcatcgacaggttacgggtgaggttggcccacgtttcggacagaatgaatcgtgctcgcatgatgatcccccttactccttcgcgccctcagcgggttgatcgtcggatgtttggtctgcggcggactgctcgtcggcggactgctcgttggccggcggtgcgggtggttccggcggtgcgggcggctccggcggggccggcggctcggcggcggatgacacggacgtatcggcaaccgcggcggtcgcggcggactcgtccttgaacgggtcgaacgcctgggtgctttccagggcggcggcctgctcatccaacgaaatgcccttgccccaggtcagcgtgtcttccagcggcgcaaacgtctcgccatagcggccggtgcggccggaatgcacggaattggccaaacgggcgatgccttcagacggctcgtcactgccctcgatggccttggtcgccgccgccagcacatgatgggcggtgtcggacttggcttcgacttcggcatccgggaagaacagggcggaatcgtaggagccatgagcctcgtcacgcacgatcttgccgttgtgcagttcgaccacgcgcttgcgcatcgagttgacgatctcttcgttatgcgtggccatgacgatggtggtgccggtgcggttgatggcgtccagcacttccatgatgcccagcgaagtggtcgggtcgaggttgccggtgggctcgtcggccagcagaatctgcgggtgattcacgtaggcgcgggcgatggccacacgctgctgctcgccaccggagagctcatgcggatagttcttttccttgccggtgagtcccacggtattcagcaccttgggcaccaacgatttgatggtggaccgccgcgtgccgatcacctcaagggcgaacgccacgttctcccatacggttttgttattgagcagcttgtaatcctggaacacgaagcccagcgaacggcggtactgcggcacttgacggttggtgatgcgccgcagatcgttgccggccacgcgaatctcgccgctggtggcctcctcctcgcgcaacagcaggctcaagagcgtggtcttgccggagccggacgcacccacaaggaacacgaaatcaccgcgttcgatatcgaggttgatgtcgtcaagcgccggtcgggtgcctttgggatagatcttggacacattgtccagtgagatcagtgccataatgctgtttactcctcggtttcggcggcgcggcgctgttcatggcgccagcggatgccggcctcgatgaacgcgttgatgtcgccgtcgaacacggcctgagtctggctggtttcgtagccggtgcgcaggtccttgaccatctggtaggggtgcagcacgtaggagcgcatctgatcgccccagctggccttgatgtcgccggcgagctccttcttcttcttggcctcctcctcgtggcgcagcacgagcagtcgggactggagcacggccatggcggaggcacggttctgaatctgcgaacgctcatcctgcatggtcaccacgatgccggtgggaaggtgggtgatgcgcacggccgagtacgtggtgttcacgccctggccgccggggccggaggaacagtaggtgtccacgcggatgtccgtatccggaatgtcgatatggtcggtggcctcgaccagcggcaccacttccacggcggcgaagctggtctggcggcggccctggttgtcgaacggggagatacgtaccagacggtgggtgccgccctccacggacagacggccgtaagcgtagggggcgtccacctggaaggtggcggacttgatgccggcctcttcggcgtaggaggtgtccatgaccttggccttgaagccgttacgctcgcagtagcgcaggtacatgcgcaacagcatctgcgcgaagtcggccgcgtcgacgccgccggcaccggagcggatggtcaccacggcggaacgttcgtcgtattcgccatcgagcagggtctgaatctccatctggtcgagatccttctgaatctcgccgatttcgctttgcgcctcgtccagagagtcctggtcgccctcctcgtggccgagttcaacgagcgtttccacatcgtcgatgcgctgggaggcggagttcagacgcttcagctgcgattccgcggcggacagccggctggtgatcttctgggcgttttccggatcatcccacaggcccggggccgcggcctgcgtttcgagatccttgatatcggccttgagccggtcgacgtccagcgccttggcgatggattcgtatttggcgcgggcttcgccgatcgcctgggtaaagtcaaattctgccatcgtggtttaccttactgttgattctttgagattctttgggaagtcacgtccttgttgacagccttcgcacattcctctggcgttggcgggcattgccgcgccacacacgcatccgcctgcaatccatgctgccagaaggttccgggcctgccttgccgatagccggccgggcgacctcacaaatccctcgcatcagacgtgttcaactgcgggcacgaatatgcgaaggcaacgtcaaagccccgcgtaaatcgccgggatgatcagggagccgagcatggccacagctatgacgacacacaccacacgcacgatggtgcggcggcggttctcacgctgctgtcggccgtcctgatagttactcacgagaccaatagtgtactcaccgcttacgaccgcaggacttgccgccgacgccagccctgccggcgggcccccacggccctttcctttgcgctttcagcgccgccagatggtgtttcatggccaccagcatgatgtgcgaatcctcaaggcccaagtggcgttcgttgtgggcggaatcaagcgcgccctgacgtttggcgtaggcgtcgagcgtgttgtctccgtaaggatgctcgttggtgggtaccgcgccggggtcccactgccggctcatcggcagggtatcgatgatggtgatgcgcccggcacggtagctttccgcgtatccggcgacgttcagcatgaaccagctatgttcgaaggtggcgttatgcgccacgtacggctgctgggtaagccgcgcgagcaggccggcctgggcttggggccattcgtcgaagagtcggtacccggcctcgctgctgcggccgcgtacatcgatgccggtgagtttggcgatgagggcgttgccgagcgccgcgttttccggcggcacgccaaaagcgagacgggactggccgtaggcgtcgccggcggcgtaatagccctgctcataggcgtatgtctcaggttcgccggccgggcgcggactggccatgttcatgaactcgaagccgacgtcgatgatgtagtcacgcgccggatcgatgccggtggtttcgatgtcgatgcccatcaccgcgtccacgtcgcggccgggcagataggcgtcgcgccagtcgggcttgggatggtggccggtagcgttgccagacgaggcggcaccacccggcgaagtcgcgccggagagattggcgcgggccatcgccgcatcgcccgcacgcttctggaagcgctgggccttacgtcgttcggcgcgtgcgtcaagaatcgccgccgtacggtcttggatatcgtccaaggcgactgttgtggggaacttgacatcgctgttttcggcagcagtgtttccggcagatgcgtcaccggtttcaccgctcagattcagcatgccttggtcatcgttcgatgggcggctgccggagtacggcctgagcacggcaacggtagtcctcccccgccgttcgcgactgaccacccataggtgttgctgttcgcccagatgcaacagcgtgttgatgttgtcgttgagccgacgattggcgtaggcgagcgcgcgaggcagacgataggagccgatgaatcgatcgtaatcggtcatgaatgtgctgttgcattgggcgatgattgattccagatgctcgcgtgtggcgtaatcgatcttcaatgcgtcgtggatagcttgtggcgtcagttccagttggcccaacccgagctgaggctgtgctgcggtttcgccatattgctcaccatctgcagcaagcgccagcaatacgctgatgccatgcatcaggtccagcgaacgcacccagtcccagtcaatggtggtgccgtcggcgtctttgggcatggacgccgcccattggggaatgtctcccttggcggcgtccagccatgtgcggtcgatcatagtgcgaagccgagttcttcggcggcctcggtgggtaccgggtcgtcgcaccaataatcctcgaggttttcggtggtggtcagcgaacggatttcggcgcgatcgatatacagttcgccgctcaaatgatcggtctcgtgctggaagatgcgtgcgggccagccgtgcaacggctcgctgtggtgcttgccgtcttcatcatcccattcggcggtgatgtcgagccaacgcttgcgcacggcctggtatccatcgaagctcaggcagccttcgtagaacgaggcggttttgtcgctggtgggtttgtagctcggattgatgatcacgtggaaggggaattccgcgatttcgcgcggatcatcctcgtcgtcgcgcacgtggtcttcgaccacggcgagcgcgagccccaagccgatctgggtggcggcgagccccacgccgggcgcctccagcatggtggtgtgcatcgtatcgatgagtttggcgagcgtacgcttggaaagctggccatggtaggccaccgtccgttggcgcaacaccggttcgccggcctgcacgatgggcaggagcttctccttgccgccggttttgatgagttgttcgacatcacggttgagttcgaggtcgactttggcgttctttccaaacattgcttttccttagggaagggtgctacagcgcgagttcttcggcgacgatcttggcgaggcgggtgcagacttcgtcggcgtaggcctgggtggcggcttcggccatcacgcgtacgagcggttcggtgccggaggggcgcagcagcacacggccggtgtctcccagcagttcctcctcgcgggccacggcatcctggatgcgcttgttggtggcggcggctttcttgtccacgttcggcacgttgatgagggtctgcggcagctgcgggaagtcggcggcgagctccttcaggctcttgccggacttgacgacctcgttgcacagggtcagtgcggtcagggtgccgtcgccggtggtggcgaattcgcggttgatcacgtggccggactgctcgccgccaagcgagtaatcgcccttgagcatttcctcaagcacgtaacgatcgcccacggcggtttccacggtcttgatgcccatgtctttcagggcgagcttcagaccgaggttgctcatcacggtgaccacgagggtgtcgtggttgagcttgccttcgcgctgcttggcacgggccagaatgcccatgatctggtcgccgttgatcatgttgccgtcttcgtccacggcgaggcaacggtcggcgtcgccgtcgaaggccacgcccatcacagcatcggtggccttgaccatggcctgcagctgctcggggtgggtggaaccggcgttcttgttgatgttgtagccgtccggcgaggcgttgatcacgattacatccgcaccggcacggcgcagggcttcgggagccaccacggaagtggcgccgttggcgcagtcggccacgatcttcaggcccttgagcggcttgggctgggttttgtcatcgttcagcggagcgatggtggccaccagatgatcgatgtacaggttggtggcggtggtctggtcgtggctcacgcggcccacgccggcaccggtcgggcggtcccagtcctggccgagcacggcctcgatgtcgtcttccttctggtcgggcagcttgaagccgccgcgtgcgaagaacttgatgccgttgtcgggcatcgggttgtgggaggcggagatcacggcacccatttcgacgttgagcacggaggtcaggtaggccacgccaggagtggggatgatgccggcatcgatcacgtcgaagccgccggcggccatgcccgcggacagggcggaagccagaaaatcaccggacacacgggtgtcacggcccacgagcgcgcggcggcgtccctcaggctgatcgtcttgggtgccggcgtcgccgagcacacgcacggcggcatcgcccaaatccaacgccagacgtgcggtcaaatccctattggccagtcctcgaacaccatcggttccaaacatcttcggcatatgaagttccactccttgtatcgcgttacccgcaccatcgtagtcgttgtgctccaccctaggacccgactcggcaaaaaacgccacggaatctgctctaggaccagacaatggcattcccgagccacaccgaaccctacccaatcagacgaatcagcgaatcaggcgcgtcggccttgaatcactccacgggtgcagtgtatgccagctgtgccacgaacagcccatcatctctcgtgacgatttgcgcacggccgggaacggcacgcttcggcttgaccttgccgataagctgcccctcgttgggatcgccggacagcaaaataccggtcatgcccaaatcctggaacgattgcagcagaggatcatacatggctcggctggcaccaccggtacgccgggtaatcacgacgtgcaggcccaaatccgacgcttgcgccaaatatggtgccaacggcttcagcggattgccgcgactggtggcgaccaaatcgtagtcgtcgacgagtacgtacacttccgatccggtccaccatgaacggttgcgcagctgttccggggtcaagtccggccccggcatgcgggtcttgaggtaatccgcgaggtcgaggaactgttccgtggcagtgtcgtcattggtgatgtacgccccgagatgcgagtccggtatctgtgcgagattggctcggcggtaatcgaccatgaagatcttcgccttaccatccgggtagcctcgcacaatctcgtgcacgagaagtcgcaacagtgaggatttgccggatttggcgtcaccgaatgcgtagaagtgcggctctttctgcagatcgagcacgaccggtgccagcgcgttctcattaataccgaggacgacccttcctctggtcagcaattcggcggccttcggttgcttcataaccgcggaaatcatcggttcgtaaggaagcttcgtgggtagcaagcgcagctttggaccgggcttgcccttccacgcggcatgcaccttgttgacaagatcggcaatgccatccgacacggtggctgcctcgtgattgctgtcaatacgcggcaaaacggcaagcgtatgcagtttcgccgggctgagtccacggcctggcgcgcccttaggcacggtcgtcgcgatcctgcggtcgatttgggaatcgccgggatcgccgagacgcagttcgagcttggtgccgatgaggtcgccgatgttggctcggatttccatccaacggttggcgctaagaattacgtgaacgccgaaagtcaggcctcgcgccacgatttgctgcacctttggttccagctcatcgtaatcgccgcggaacacaccccatccgtcaatcaccaggaacacatcgccgtaaccatcatccacttggccggctgccctgcgcctgcgataagtatccatgccgtcgatgcgctgttctttgaagaactgctcgcgagcgtcgataatgccggaaacctcggcgagcgtacggcgtactttctcttcctcattgcccgcggcaacaccgctgacatggtcgagtccttccagcgtggtgaacgtaccaccgccgcagtcgatgacgaagaactgcacctccaatggcgtgtgagacaacgacaacgaggtgacgatggatcgcagcatcatgctcttaccgctgagcgggccgccgacgaccgcaacatggccgccagcgccggacaggtcaagcgccatgacgtcgcgcttctgttcacgcggcttgtcttccaacgcacaaggtgccatcagcgcgccgcgcttacgccacgatggcgaaatcaggccatattgcgcagtgacggtgaggtccggcatgaactcgtccaaggtgttcggcacgaccagaggcggcagccacaccacgtgcgccggcctgcccttgcctcgcatctggtcgacggcgtactggaacgtcgtggtgtctccatccaagcccttgggtacgccggacacgtacgcagcacggaatctggtgatggttccggccggtgttttgaggtaaccgatacccggcaggcttggcagttcgtatgcgtcggggatacccagcactgcgcgggattcggacgcggagaacgttttgaggccaacacgatacgacaaatgttcgtcaaggccgcgcaacttgccctgttcgagtctctgagaagcgatgagcaggtgtacgccgagcgaacgtccaacagcaccgatacgcacgaaggactgtacgatgtcgggttttgccttaaggagttcggagaactcgtcgaccactaccagcagcgacggcagtggatcgaggtccgtgcgcccgccgttgacgcgcgcatcctcgtattcggtgatgttcgccagattaccggcgtcgcgcagcagttcctgacgccggttgatttcgccgtccagcgcatcttccatacgatccacgagggaggcctcgtctccaaggttggtgatgatggacgagatgtgcggcatgccgcccatgcccgcgaatgtggcaccacccttgaagtcgatgagcacgaagttgagctggtcgggcgaatggctgagcgccaaagacagcaccaatgtgcgcaacacctcggatttgcccgagcccgtggcgccgacgagcacaccgtgcgggcccatgccgtgctggcccatttccttgatgtcgagatatgcggtgctggtgtcgtcgtgcagtccgataggcacacgaagacgttccttgcccgtacggtaggcccacagtttggcaaggtcaatatgacgaatatcgtcaatacccagcaatgccggcaattcgttggatttcttgtgcccggcagacgaagcggcctgtgcggattccgcatcctccacttcgtccggggcgctggcgagccgctgagcgatggcgagggcttctcgcaccgtaagcgcatccggcttgatgtcgaatggcttgatggtcgtggagaacagctccacggtgccttcctcatgggtttcgagcacattgaggccctcttcaaccgttgtctgagagaacagcacacgcagtacattgtcttcttcaaggtcgccccattcgtcgggcaggtcgatcacggtgacgccgtcaagaccatccgaagcgaatagctgagtttccttggcgagttgctcccggtcaaacccgtcgttgaccaccagcacatgtggcacgatttcatagtcgctaccggtataccggttacggtcaagcgcctgcgatcccacgagcaggtcaaccgcgtgtatgttcgaggtgaccatataacgcccatgccccactgtggaggcaagtgcctccgccggttcttgggcgagttcgtcgttcaatcccgccgcttggggcagcaaccgcacccaatcccactggccgatgcgagcctcggaagccaatacgacgatacgcaggcaatccggggcatgccaggtagccgcttggcacaacaccgcgcgcgcaagcgcctccgtacgctcaagatcgcccagcagctccactcgtttgaactgccgcatgttgacaacgtatggcatattgcgcaacgattcgtgcgccagcatgaaccggtgagcggccgatgccgaaactgggtctagttgtgccaatggcggcagctcaggcgcttcgagcgtgatgcacagaggctcatcatgcacgccgaagcgcagttgcatgaagtccccatcggattggatacgctcccatcggcgtgcgggttcctgcgcgatggcggtaagcgattgcggtgccggagcattccacaacgccgcgttacgctgtttgcgcccggctgtgcgcactgttttacgcaagcccgacaagtaggtaaggtattcgcggcgtgacgaggtgaggttcgccatgcgctgggagcgttgacggaagccgttgaccaccacgaatcccagcgaggagaccatgaacatgccaccggtgagcatgccggtcaggccggaattggtcatgagcatcatcaccatggcgctggcggtacccagcaacggtaccagcgaggtcagcagcgtattgacgccgtcgctgggctcaagttcaggcggctgctggagcacgacccgcccttttggagccttaggcccttcaagcctgttctgttgggtttcggaagtcatgaacgccgccccctgcttttcgccatgatgatgctacagcccatatcgccgagtgagatacgcgcacctgattgaatggcatgtcgttgctgagcaacgagatcgatttcctcgccgtcttcattgacgacgcgggtgccattagtgctgttaaggtcggtaatccacatatgtccggcggtgatttccaaacgcacgtgattacgcgataccgtgccggtgcgatcgggaacagccaacaccatatcaccgttctgttgcggtgatgggttacgcccgagcaccacattggagggaatgaccaacggctcgcgcgagccgtcttcgaagtaaatggtgatttgcttgggtggcacgggcggcactgtgccggggcgcgcaggcaaggcattgccaaccggattggcagccggggtgggcaacgcgacatgcttcgccctcttcgtggaaggctgcgacacgggaagcggcatgggtttcgccgcagatactgagggaacggagggcacggaaacggcagaagccctcggtgcggcgggaaccgcacgaacgttggggactggggaaacagccggcaccgatgacatcgacggcactgcaagtggtgccgcgggcgtctttgggatcactggagcgggtaccggtgccgaagcagatgcggatactacagatgctaaggccccggaggtagtcgactcgtgcatcgtggaggaggaaatcgtatggaaccgaagctcctgtgatggcatcgcagtcgtgacttgcttgtggatatccacctcggcgagtctggcgaccttatccgcccatccctgcttaagttcagatcgggagaacaacggcgaacatatcataatcaacaatccgatgacgaataccatcgaagagaccgtaagcaccagatatttgacgaaggctctactgagtcccgctggcagtattccattacggtggtcgttctggcattcaacacgcactgtacgcacaccaagtgctactttgcccggggtttcgccgcgcacggcctcccatacggcaagcacaagaaccatttccacggctatcatcacgcataccaccagattgtgagacagcaccatggccactacggtgcccagcgccacgcagcatacgtcgatcagtgaagcaacgcattgtttgccggccgaggccgcacgatatccggtaatggtacgttccttacgcgaaacgactgatgttgctgcggccgctaccatgacatactcctgagaaactcaagtgcgccacctgcgaggaacgaggctgccggtatcagcatcatggagatgaagcacaacgcatcgccgattcgcgatagcgccagagaatggaacccattgtgctgcaccaccatgctgaatcccaacaccagtcccaacgcggcgaacgtgaccatacaaatcaaggggatcattgcctccccttcgggaattgcctgagtggcgtgcccaacccagagcaggggaatcgcaataccggccgcgcgcatcacatatcgttcgaatggtcgcccggattgacgcggcttcagttcgaagaacagcatcagcagcatactcagcaccagaaagccgatacggtcatacaggctgtggtagtcggtccactgtgccaatgcggcatatcccaatacactcagcaccacgcatagcgtgaaccccgtggagtattgtgccaggaacgaatccatatcctgccgaacatccttgcgggtcagcactcgcgcttcctcgggaatgcttccgcgcaccgtccatcgccgggtcatgtaggtccgccattccaccagataacgatcgggcacatgcaccacgatgttcggcatcatctggataccgcagacgcttgcggcaaccaccatgccggcaagcaactgcactgacagatcaaacagtacggttgccgcgctggccaaggccaatggcaatgccacgaacgacaccgcgctcaccacaccacgcaccattggctcgcgcacgcatacggacatcaacgccatatccgccaccgcgatgcctgatgcgcagaacacggccacggttgccggattacccgactcaagcaatgtggagacggtagcgcccgcgcatatggaaaaacatgctccggctactaccaaccacaccgccatcacacggttatgccatacgatttggcggcggcaacggctattacataccaatgccgccacaatgaacacggcaacgagaacgaacgtcacccaccgagacgagcctgccatgcgcatggcaggagtcagacgcatgaacagcaacgaggtcatcgccgcaaacagtacggcgacaatcaacgccaccctgttgaggtcgcgtcgagttaccccctcgtgctcgctgtgcatatgtcgttccttctgccgcctcttctctcaagacgccattatatgggtttgcggcccggtgtgtgctcttccgtctaattacggccggcttgtgcctcgaaagcatgcagcttgcgcataccggcatcgagttcgctacgacctttggccgcctcgttgtcttcatcgtcggtgtccgtaacatagtcgcgcacatataccatgctagcttcgaggtagccacgcacttcacgggcctcgggcgatttgtcgatgccggcgtagatgtcgtcttcgcaggtcttgcccatatcgatgcgctgttgcagcacctgccaggcacggccgtactcacctttgcgccgcttctcctcgatgtccttgcttttttcggcgatggtagcgtcgacctttgccttctccttttcgaatcgggcacgttgctctttgatctggttggataaatcgtccatctgcttcatgaacgcttcaaattccggggatgccatggttgctccttttgctgttcttccgggtatgcgtatacgtccgaatagggattaacggccgccgaacgtaccgccgcctgaacctccgctggagcttcccccaactgcaacaactgaaccacccgtggaaccggatccactgccaaaggtcatcttcacgccttcggagacgttcaccaactgctgcatggtgccaatgcagttcgcgaatccgctaaatgcggtgtacaggttgttcaggcagttgacgatatccataccccactggatggcctgtgtgacttcggcggcagccgtcactgcgaccagcaccggacccgcaccggggatgatcagttcgccggcgataagcttcagcaaggatatgatttcgtcgatggtgtcgagaataaggtcgaatgcagcctctgcgttctgcgcgagcgcattcaatgcctgcgacatttcggtgcagggctggcaaccttgacctgccacctcacctacggcattgttgcgttcaacaaatttatcggcggaggcaccagaccatgacgtctcattcacattgctggacatatcttggatggctccttgtacgccggaaagcgaagccgacaatgcatcccacttggcggcagtgtcttggagctcgtcccagtcaccgaagaatggcttcttcacccactcatcaacaatgctcacgccaaagagatacttagagacgaagtccacaacggtcacggccatgcgcacacgggatattcctatgctgattttgccgcttaactcatgcgctgcttttcttaccgcattgttctttatgtctttagcaagctgatcggaggccgattggacactggcagatactcgtcctaaaggaaaagcatcaagatgcagcatattatcggcagcatccctcttataatcgatatgcttcaatatctctcttgggactgcaccggtattcgacagaccaactttctgcccaagcacgtcgataagttttccagcctgcttggtgtcggcgaactcacctacatgctggtaaaaccgtaaatcacgtttgatgtcgccgaggtcatccggcacatcgacagtaatgggaccgaactgaagatcgttgttgtagtcatcatcgttgctgtcagccattatgcgatgctccttacgttaccggtgttgattccagtttgctcgggcaatgtcatgacatccctgtcggcgtagagcgcctgcagttcttccaccgagcgtccaagagggtcattgcgggagatttccgcccagacgctcgcctcggcctcctgctgcatcttctcgtaagcggccgccgagtctccgatgcgtacggaggcatcataatcgccgtcgttgtcgaagtcgatggcggcgtactgggaatcgccatcttcgaatacgctcacgcgggaatcatctccactgtccggagtgagggtgatgtcgtcacgaccgtcattgtcggcgtcaaccgtaaacgagttgcccttattcgcagtgttgttgtcgctacccgggggcaacggcacggtggacgagtcctgcttggacagggtgaccgatccatcgtcgtttatagaagcatgcgtaccgccctcggtgaggttcacggaatagtcgtcggtcgcatcgccatcggtgtccagaccaacggtattcgtggtgtccggtcgggtgactccaggaacatctggctgatgagttccagttccgggattggtgtttcccgttccgggagtagacgttccaggattccatggagttactggcacagtggtgttctgatcatcaccggaagcgtccacagaaccagtattctgccccgcattcacatcttgatcgtgacctggctgcgctgctgatggggtctgcggcgtcgccgacgattgaggagcctgttgcaccggctggtactggccggaatccgtgccggagccagctccaccgcccgagccagagccaccgccagaaccgcccgaaccggcaccgcctccgaaaccaccgcccccgccaccggtgcctccgggcattccaggatcaacagatgactcattgttgttcttgttctggttgtctcgaatttcttctagcagctggatgattttgttgagcagttccttattcgactgttccgtggctttggtgtctttggcggtgccttctactgcgctggaaatcgaattcagcatcgattcgatattgcccaaatagctgacggtggaatctttggcaatgccatagaacggcttaacaaaactcagcagaattccgaaattcggacttcctgaactgacaaattggcttttcgcgctggcgaattgagaggccgcctgattgaaggaatcagataccgtgcccaaatcatcagggtctacctgcataagcgatgcagccataacgcatcattgcctttccccctagttccttgtactcttcacaattggttaccccattgtgttctccattgtgccatatgtacagcgttcgtcaatgtttcctacagattcaatcggcgattcctaactgaattctggggaggcatgccatcataggcgtgttcgccgtaggtcaagccacctgaatacagccacatcccgtaatgcgcgccacgcggatcggacgacaaaggaaaacgaggatcacactgatccggccacctcaccgga

SEQ ID NO: 1943 - DNA, 11986 bp, Unknown
  R17_18m  MAG No. k141_7291
ggatgtggacgtgacgctcgatcaggaggagtcgtcggtgaacggttcgtccagctccgattccaacggtaacagccagaataagcagaacaaccagaataaacagaacggcaacggccggaatggttacggcaatggcaacggcaacaacgatggcggcaccggtgatggcggcggcttctccgacccattcggcctgtggtaaagccgactcgacaacgtcacacggcgttgagcggtaaccgttgaacaccgtgtcagacaagcaaaggcccgtggcagtgagcaaactcctgccacgggcttttcgtatgcgctattgtgccctgcgcccatgccgccaacgtagtttcgatatccggcatgtcgcgcagcgctcgctgatagggtaggccaagcactgagttcgggcgacgttccgaacacagcgcatatttcaatacaaaactgaatacatttctttacgccgtgtatcggaaggtcgcgcgggagccgagcaaagcgaagccccaggcaaagccgccggtgggttaacaaggcgtgaccgcagcgccgattgcgcgggccacgcttgccgtaccgcaatcgactccgtatacaagcgtaaggagcaatgatgagcagactcatcagattcttcaccaaaattctcgacatctgcaagcttgtgccgatgcttccggtcgtcgtcatcgccgcagttccgctggctttactaggcgattggcgtccgtggggcaatgcgatggcgattccggtacttggcaatccgggcttcggccagtggctggttatcgcactggtgctgattatcgtgattgacactgtgcgcggcatgattgacgatttgcgccacgggcaggtcggagtcgatgtgctggccgtggtcgcgatcctctccaccgtggccgtcgccgaatactgggcaagttgggcggtgacgctgatgatcacgtccggcgaggccattgaggaatacgctcaagccaaggccgagcgcagtctgaccgcgcttatggaagccgcgccgcagaccgcgcacgtcgtcaacctgcctggtgtggggcgtgggtttgctgccgataaaggcgattcgtccgatggcttccggcgtgtgggcttggcgtcgactgccgccgccgcgcaccgcttcgacacggtgccggtcgagcaggtgcagctgggcgatgtactcatggtgctgccgggcgaaactgtgccggttgacggtgagctgctgtccggcacggccacgctcgacctgagcaatatcaatggcgagccggtgccgcgtgaagtgttcgccggcgcccgcgtgatgtccggcgcggtgaacggctcgaccgcattgaccatgcgtgccacccaagtggccgccgattcgcagtaccagcgcatcctcgagctcgtggcctccgcgcaggaatcgcggccagccgtggtgaaaaccgcagaccgcttggccgtgccctttaccgtgctctcgctggtgatcgccggcatcgcatgggcgatgtccggcattcccacgcgattcgcccaggtgctggtgctggccacgccctgcccactgctcatcgccgcaccggttgcgtacatcgccggaacaggacgcctcgccgcagccggcgtgcttatcaaagcgcaggacgtgctggaaaaccttggccgcgtcacgcaggtgttcttcgacaagaccggtacgctcaccgtcaagcagccgcaggtcgtgcgcgtcgagatgctgcccggtgccgcaacccgtctcaacgaagaccatgtgctgatgatggccggcgtggtggaaagctactcggtgcacatcctgtccaaaggcatcgccaaggccggaacggaggcgatggcccgattgcgccagcggttcgaggatggtcagcggctctgccccgagccggaggccagctggcccggccatggacgggagtatccggtcatcaagaatatcaatgaagatgccggcaaaggcgtttccggcgaggtgaacggacatgcggtgcgcgttggccggctgtctttcgcggccgccggggaggaaggattcttggcggtcgatcggaccgcccccagtcggtctgaggatgacctgcgcacacgatttgggctgcttcagccggacgaaatggcgtcgtatgtgtctgttgatggtcagctgatcgcgcgcatcgtgctgcgcgatgtgccgcgcgccaacgccaaggcagcgctcgccaaactgcatgagttgggcgtcaccaagctcgccatgcttaccggtgacaagcgggcttccgccaatatcattgccagcgaagtcggcattgacgaggttcacgccgaactgttcccggaggataaggtagccgcagtcaaggccgctacaggagccggcaaaaccgtcacgatgatggtcggtgatggtgtgaacgatgccccggtgctcgccgtcgccgatatcggtgtggccatgaccgacggcacatccaccgccgcttccgaaagcgctcaggtggtcattatgaatgacaatatcgccgccgtgccgcgcgccatcgccattgcacgccgcaccaagcgcgtgatgcttcaagccgtaatcgcgggccttgtgcttgccaccatcggcatgattgccgccgcgttcgatctcattccggtcgtcgtcggcgcattcctccaggaggccatcgacgtggtgagcatcctctgggctctcactgctttgattgatcgggactgattaagataaaccggaattgattggagccgcatccggattatgtgcaatataacaatttgatatcaatattttgtgtgtgcttaccggatgcgggtgccgtaggtggcagtctattagactaaaggctgtttgcagcatcatttaggggcattgaggcctttgccagaggagtcgatatgtcagagggtgaggaagagctcaatgtgggcgcagtccgtttggaggaagtggcatcggcggctaatgtatcgctgtccactgcgtccaaggccttgcgtggaaagcctcacgtcagcgagaaaacccgtattcgagtgattgatgctgcgcggaggttgggttatagcgccgcagaagctatggcatcgatggcaaggttaagcgtcagggattctcacggcatgcaggattttcgcgttggcatcattggcgttgatatgaaaggcgtcttttctccgaccattcttattggagcggagaatgcgtttcaagcgcgctcagccgcagcgctactgttcaatgcgtcaggcaatgaggcattgttccacagtggtattgaacgaatgttggtgcaaggagtgtcgggactgttgattatcagcaggtgtacggatccggtgccatactacgtggattctccggtacctgtggtctacgcctatggcccgtcccgtgatcccgatgattgttccgtggcacaagacaatgtggaatcagggtgtttggccgttcgccaccttctttcctgcgggcgcactcgtattgcgattattgctggcgactccgagtactcggttacacatgaacggatgcggggtgcgctcaaggccttgcatgatgctggattacagttggctggcgaagcgcggttcggtccatgggaagcggaatgggggcgcgccgctgcccgtctgctgctcaatgacggtgctgcattcgacgcagtgatatgccaaaacgatgtgctggctcgtggctgcatcgaggaattggaacgtaacggatgtcgcgtgccgcaagacgtagcggttatcgggcacgacaacagtccggattatgtgtcgtacgcgcatccgttgcttacttctattgatgacaacaacgaaatgctggggcgtcaagctgccctatgcctactggatgcgattgcggggcatcctcaccatggtgtggagcgtgtgccggtgaagctaatccaacgcgagtcaacgttgccgttggattgataacgtcaccggataggcggcagcagccggttcacatcttgcgtggcatcatccagacctttgcgaatatcattgatgccggaatcctgtacaaggccgtgaacgtcgatgttgctttgttcgctcaacgcttggccgcgtacgcgcatgctatggataaatcgtccgaccttgcgtgcgtagtcgggcagcttgtcggggcctaccagcactaaagcgatgacaagaatcaccatgagttccgtgcccgaaatgccgaacaacatattattctccttctgcagttattgttgcaggggcttcctgtttgccggtgcgcttggctttgcgcgccgcgcgaaatggtaacgcggcgcgcattttatgtaaaagtttgagaagtttgggttcttcgcccgccgcgcgcatgactttccatagctggatgtgctcgtatactgcgcatacggctatggctgcgaaatagattgcgatgatgggcaaagcgagtgcgcataatgttcctgggtcgccggttggcgtggccacggccgcgaagataaacgctatgaccgttgcgagacgccactgcttcaaccatgttcgtgtttcgaccgcattcatcatcgtcaatgccgccataactacgggtagcaggaatgagaggccgaaagcgactgtcatgcgcagaatgaaatcaaaatagacgtcggcgctgagcaatgtggcggtgtttgcgggggcaaagccggtaaggatcgccaccgcttggggcagcagataccatgccagtccggctccggtgaggaacagcggcactgaggctccgatgaatgtaaccgcggtccagcgctctttgcgcttcaaccctggattaatgaatgcccacacttggtatgaccaccacgggcaggaggccgtcagaccaaggaagaacgcaatctccagctttacgttgaatgcggagaccacgccattgaatgtgatgctcatcagtccctgttgctgcccggccgccgtcaggaacggttgttgcaggatacgaaacacctgatcgctgaacatccatcccactatcgacatgatgatgatgccggcaatggcccgaacaaagcgtttgcgaaattcgacaagatgatcggccagaggcatcaccgcatcggggttgcggggcttgcgcgttttggacttgcgccctacaccccgcttccaccggcgtgtagggtgttgcgcacccgcgctggcctgctgcgtggcctcgtgtgagtgatcgatgagatcgtcgaggtcaagatgtgtatcccgatcgccgggatgcatcgccggtgcaaggggtgccggaagcgcggggtttccgggaaccgtgctcatcgctgttcggctccggttgctgtagtcggggcggcggtggcgttcatcgtgacggcttggggtacggcgggagcgggagccggtgctgccgccggagctggggcaggggcgtcgctgactgtattgacggtttgttgtgttgccgggtcatcggtcttggtctcggcacggaaaatcttcatcgattggccaatgcttttggctagctcagggagcttcttcgcgccaaacagcagcacgatgataagtagaatgataatgagctcggtggggcgaagattaggcatgatagtatgtccttccaatttctgtgttgtgacaggggaagggtatacctcattaacgcaccaatttatcagtatagcgaggaatggtgtgttgttcaagttgaagtgcggtgttgcgtttgagctgcttgtgagagttgctcgggaacatgttaatttgaatgcatttactgtgttattggtgagcatatgtgtttgggttcgttggttttcgcaagaggaaaacaaaaggaaaattacgaaaatagcatggctggaaatgctgataaagactgattttcattggtattgtgcgctacgaaaaccagagaaaaaatgagtgagtcgctttctttgacgcatggtgagaatcgtctgtttgagttattgtgaacgcgcacaacgaagacaagcggcatggagggcgcgcaaaaactcgaataatcgcatatggtaactgtttgctttaccgtcatctctcccatacatacatgacgacggggacgcaccacaatgatgtgatggtaaaacgggcagtaccagacgattccgagtatgtgtgtgccatccactgacgcatcttacctgcgtcgtcgggccattgaatggattaagtgcattgaatggttgcgaatgcggcagagtgtcttcgtccgtcatgcctcgcaatgaacgcgcggcagtccaacgaaggagcaagatgagttcaacggaagcaacaaacggcatctctcgccgtgctgtgctcgcaggcgcggccgccatcggcggcaccatcgccgtggcgagtgcattgggtacaggagtgacaacggtgcaggcagcgccatccgtcgctggcacggcaggtgcaacgggcgcgaacggcgcgggcggcgtggccgttcccgcagcgcagcgcaccacgaaaagcgcgaagaccattaccgacgcgcccgctctgccgggctggaaggtagctccgttccctctgcggaacgtcgccatcacctcgaacagcgtgttcgatcgtgccaaggaagggatgctcgactatgcacgcaactatccggtagaccgctggctggtttgcttccgtgcgcaggcgaacctgctgcctaaggacaacacgacgcagccttccggtggctgggagaacttccccagcggctcgctagacaaggctgttgaacagcaatggggcgatgccgaatacacgcgtggccagaacaagaacggtgctgatggtctgttgcgcggccactttgccggacatgcattgcacatgctctcccaagcgtatgccgaaacgggggaggaagcgattctcaacaagatcaacgagttcgtctccggcctgaaggaatgccgagattccctgcgcgagatgaagtataacggcaaagcccgctacagccaccccggcttccttgccgcctatggcgagtggcagttcaaggcattggaggaatatgctccctatggcgagatttgggcaccgtggtacacggagcacaagattcttgccggtctgattgccgcttacgagtttgccggtaatgccgacgcgctcgacctggctgaaggcatcggacattggacctatgcgcgtctgagcaaatgcaccaaaacccagctgcagaagatgtgggacatctacatcggtggtgaatacggcggcatgaatgattcgctggtggatttgtacaacgtctccaaggacaaggaccgtagcgaatttcttaaggcctccgcatttttcgacactgacaagctcattgacaactgtggtgctggtgtcgatatcctcaacaacttgcacgccaaccagcacattccacagttcgtcggttacgccaaagacgcggccatgggcgacgcggatatcgatgctgatgctcgtgcgcgttatctcaaggccgttgaggggtactggggcatgattgtgcccggccgtatgtatgctcacggtggtactggcgaaggcgagatgtgggggccggcacatactgtggccggcgatatcggcaagcgcaacgcggaatcctgcgcggcatacaacatgctcaaggtggctcgctatctgttctttatcgaacaaaaacctgcctacatggactattatgagcgcacgattctcaaccatattctcggaggtaagtcccgtgacctcgattccggcacggccctcacgccgggcaactgctacatgtacccagtgaatccggctacgcagaaggaatatggtgatggcaacatcggcacttgctgtggcggcaccgctttggaaagccactcgaagtaccaggattccatctacttccactcgacggacaacaaggaactgtacgtcaatctgttcacagcttccacactcgactggaccgacaccggcctgaagctcgcacaggaaaccaactatccggaggaggagacctcgacgatttccattacggccgcgccgaagagcgccgtcaccttccgcatccgcatccccgcgtggagcaaaggtgcgaagatcgaggtgaacggcaaggctatagatggcgtcaccgctggcgaatacgccaccgtggccggcagctggaaggtcggggacaagatcgtcgtcaccatcccgctgcagctgcgcaccgagtcgactgatgaccgcaaggacatccagacgctgttctacggtcccacggtgctcaacgcgctcaacccatccaccaagttcatccaacgcggcttctacgagcgcaacggcttggatggcaccatcaaactgggcgtacagaagaaggaaggcacgaagaactacttcatcattgacggcgacgagttcgagcccgcctacaacggcgacaacaccccgtaccacatgtacttccagcgcaaggacgagtatgtgggcttcgcaggcaagctcaccgatgtgctgaacccgaagcgcccggctgcacaggaccgtagcgagagcacgctgatggatgacatctgggcgggcgcgccgttcaaggaccgtgccgccttcatcaagaaggtgcaggaggtcacgaagacctatcaagacgaggggctgctttccagtcgtgatcgtcaggtggttctgcttgcctccgctcgcgccaagatgagctgacgttttcctgcgaccaaaccgtctcccgtagtgcacgacacggcgggagatgagtgatacaaaccataacgcctaacagaaagaatattatgaccatcgaaagcactacttcggccgtgaagggcggtgtggcgaaacgattcgccgcactgttcgtagctgcggccacgctgctggctggcggtgtcttctccgtatcggccgcgccgagtgcactggcggacgacgctgaaacgaatgttgcgctcaatgcagaaaaaggcaacgacaatgcaccagacgttcaggtcagctatgtcactggctggaacagcactgctgccatcaatgacgatagcttggacggcaacgccagctatggcggttggggcacttggggcaacaccagtgccagcgaaactgccacttacacatggaatcgcgccgtgaccacgtccaagtctgtgggctactactggacgaacgtcaagaccggtgatggtggcgtgccgctgcccaaggatgtctcgattgagtatctcaatgctgattccggccagtacgagaccgtgccgaacctgaaggtggacaagacattccccgccgacgacgagctcgacgccaccaacccggtgtatggtccgtatacctacaccttcgaccaggtcaccaccaagtccatgaagcttgtggtgaacaagaaggccaatgacaacaagggtattaccgtcactgagtggcaggtgtttggtaccagcgctgcactaccagtggatccgggcgacccaggtgctttcttagacgtgcagcaagttgccgtgcgcaccacgccgggcgtggacccgacctcgaagttgcctgcagaagtgtgggcgacacctcaagatggtcccagcattaaggttccagtgacttgggaaaccgttccggccgacgcttatgctacagctggtactaccgccgaagtcaagggcactactgctgccggtacctatgacaacatcaaagttgcggccggtcaggcgacggccactattggtgtctacgaccagctcaacaccgaggtgaccgacgcggagtacgtctccaccatcaccgctcccggtgtcaagccggtattgcaggataccgtggcgctgacctacgctgacggctcggtcgagtcgggtcacaaagtgacttgggacagtatcccggccgccgagtatgctgaagccgaacaggtcggcttcgtggaaggctctatcgagggtgtcggcaatatcaaggcggaaggcacgttcttcgtcgtcgcgccttccgacccgaaagcccagccgattgttgctatcgatttcgactccgcggcccccggctccggctggtacaccactgccccgaagttcaccatcaccgcgcagcgcggcgtctccaccgtgccgataaagacgatcgagtacaagatcggcaagggcgagtggaccagtggcaagggcccgatcagcgtgaccgcgcagggttccgtgaccatttccgcccgtgccaccgatgaaaacgacaacagccgcgaggtctcccagaccatcaaggtcgacaccaacgtgccggtggtcaccgctaagcaggagagcaagaacggcaacgatgtggtcgtctctctcaccgctgatgacggtgccgcaggctccggcgtgacccgtgtgctgtactccaccggcccgtccagcaacccgaagtccaacgagaacacgatgtggggcacctacaccgacgaggacaaggtgaaggtgcagctctccgctgaccacgacacttacgtgcacttctatgcgcaggatgccgccggaaatgagtccgactacgccaacatcaatctcggcaagggcgaagccgtgaccccgaccccgactccgtctgtggattccgttgccgtctccggtgatggtgtcaaggatggcaagctggcgctggtcgctggtgatactgcccagttgtcggccgaggtgaaggtgaccggtgatgcggccaagaccgtggcctggaagtcctccgacgcgaaggtcgctactgtggacaaggatggcaaggtgaccgccgttgccgaaggtacggcgaccatcaccgccacctccacggttgacgagaacaagtccgcgtccgtcgaagtcacggtaactaagcccgaggctccggttccgcctgccaccgatgaggagcgcaagcctcttgccgacaagatcgccgctgttgagagtgagaagctcaaccagaacgactacacggctgattcgtggaaggcatatgcggatgcacttgctgccgcaaagcaggtagtcaaggatccggccgcaaccgcaccgcaggtgaccgctgcgctcaacaaactcactgccgcacacgatggtctcgccaagaaggatagcggcgaaaagcctgaaccgcagaagcccggtcagcagaagcctgggcaaaaccagaagcctgaccagcagcagaagaacgctactaccactgcccccacgggtagtgcggtggctgccgttgctgcggccgtagttgtgctcggcgcggctggcgccggtctggttatctggcgcaagcgccgtgcctgacgtgaggctattgcccctaggctaataacaacccaataattgaatacaggtcttatacctgaagttgatctgcgtcgcactggcttgaacccgaatcgatgttcgggctaagcctgtgcggcgcatttcgttgcggctgtgttgctcataatccggtatcggagttattcattaggtcggtttgacgtttattaggtcggtccttggtcggagcggcccttgaaaccccgccgttccaagggatggcttcagcaccctccgacctaatgaacgaagaaatgacctaatgaatgcaatcgaggtcgtaaagagccgttggaggtgacatcttcagtgtcatcaaggcccgaattcaatttgtaagtgcaacgctcgtctttgggtggcttgtcttcgagagtaccttgccgagctctcgataccaaacctcgttgggcgtttcccagtccaggaccttcatgggggtgtcgttgatctcgtccacgatggcctgcaggtcctcgtccgtcaggccgtcgaaattggttttcttgggcaggtagcggcggatgcgtccgttgcggttctcgttcgtgccgcgctggtatgaggagtaggggtccgcatggtaggtgagcatgccgagggcctcgtccacgagcaggtggcaggaggactccgtgccgttgtcccaggtgcggtcgatgcgcgcgggcgcggggatgtccttgtagatgtcgtattcggcgcgcgcc

SEQ ID NO: 1944 - DNA, 14197 bp, Unknown
  R17_18m  MAG No. k141_7732
cgcccaaacggtgcttcgcccgggatacggcggatgccgtatgggcggaatgtcgcttcgaatcgttctgctgtgatgccatgcttccagcgtgggggaacgcatgccgaaagcgcaagccgaatcaaggtatgtggttctagcttgccgagttatccacatgacattttgcccgtgcatgattggctgcgtgggcaacggcggcgatcatgcgccgacgatgaagccgatgggctccgggaaagcgtcggtcagccttccgccagattgcccacggcgccggccttatgcgtgccgtcggcaagctgattgaacagttcggtgttcctggcgtcatcgagcagcaccgaggagccaacgccatcaacgtaataatcagggtcggaccagtacacgctgccggagatgccattcgagccggtggcgcttttgaacgccaacgccatggtgagcaacgtgtaagggttggttttttcatccacagtgagtgcgctcatcgcggcattggacactgccacgactttggacggattggtcagggtcccactgctggaagcctttttgacgatggccgagatgacctgccgctggcgttcgttgcgtccgaagtctcctcgcgcgtcggcgtatcgcatacgagagaaggacaatgcagtggaaccatccgtcgtatggcatcccgccttccagttcagtccggaataggaatcctgaacatcctcgtcatagcacagttcgataccgcccaaggcgttcaccacgttctgcagaccgccgaacttgatctgcgccacatggtcgattttctggccggtaatctgctcgacgttgcttaccaaggctttcttgccggcaatctgcgccaccgcattgattttcatgtactggttatcgacgttcataagcgaatcgcggggaatggaaatcagcgaactcggcccgcttttgggcttgatcagcaccagaatcgtatcggttctgaagcctgagatattgtccacgccgccgtaatcggtggaaccgtctcgctcgtcggagccaagaatcagccaggtcgaggccggcgtgttgggggtgtcggtcagccagtcgctccggttcagtttgctgtccacccattgccaggcaccgaaaacagaaagaatcaacgccgccaccagtaccgcaatcgcgcataagatgatgcgcaaggcgcgcggccggtgtgccgttaccgttttcgccgttgccgccgccggccggccaatatggctgaacttcgtggacacgtttgctgctggcgatgagggccgggaaaccgacatatccgacggattgcgcacggcgttgcgggataagccggaagacatccgcgctcgcgacggcggaatgctgcgcggtgcggcggcatccggagccgtgctgcgggtggcacgtccggttttcggagaaaaactgggcggagtccgcctgccgttgtccgtgacgttggcgcttgccgtggcgttggcgttcggttgaggctcttcgatgtcatttcccgtgacggacggacgggccgatggagcctgacctgactgacgtgaggcgcgggcaggggcgaaggagcgtggcacctgcccggaaggtcgggtgcgtcgatttcccgcaggaatgaagcttggcgggttgatatgcggatccgccccacctgattcctgcgtcataacccctcctgaaactgtcgattgtctgaatgacactttgacacagcatccgccgggtgttcctgcgctatggtgttcctgcgcaggaacggcacaatatcatgtgcaacggcatcagggcatcgtgtccgcgccatagcacacagttccataaaaatgatgtaatgacacgagaaagaatttgacaaaaacgaaattgcatgtgtgtaatttagtccgtatgaaaagctcaataggcaaggagaatcgcatgtggggtgtggtcgacgattcagccgaagagccatggcatgaattgtggggactattccgacctgatggcgatgtatcttggcagcacaaggcgttgtgcgcgcaaaccgatccggaggcgttcttcccggaaaagggaggctcgacccgtgatgccaaacgtgtgtgcgccaaatgcgaagtgcgtgaacaatgcctgaaatgggccatcgaccatgatgagcgattcggtatttggggcggcatgagcgagcgcgaacgccgtcgatataagcgagagcaccgggagcaggcgtagttccacacacacccccttcaagtctggtgcgtacactgggagtttatgagtccgacaggtaatagcgatattcatgaggcgttggccgacgccatgtcttctcgaccgtatacgcataggcaggatgtggataccggcattacggctgtgatcaccgttgaggaggatatgcgtttcctccggtctacattgcgttcggtattgacgcagaatgttcttccgggagtcgtcatcatcgccgacgcgaccgggcgcgccggttcgaggataaccacttcgttcgaggtcattccctcgccatcggggccggtagtggaggtgccgcagtccaagcatgtgaccattcacatcgtttcggccaagggcgcgcgttccttcggcgatgcggtcagccgggcgttggatcgggccgatttggatgacgctccccgcgcattgtggttgctccatgatgattcccgcccctcggatgcctcatgccttgaacgattgcttgaggcgtggcgcaatacgccgggtgccagcgtgctcgggtgcaaacagtgtgattgggaaggatcccacctgcatgatgtcggtatgtatgcaggccgacacgccgtgcattccctggtggtcgatggagaacccgatcaggagcagtatgacgggcgacaggatgtgttcgcggtgtcgctggcgggcgcgctggtgtccatgtcgcaattcacgcgactgcggggcatcaatgcctggctgaccacctacagcgaatcggtcgatttctgccgccgtgtctgcctgagcggcggacgcgtggtggtagtcccgcaagcggagatatcacatcgtcgcgcacggtatgagggcattcgtacgcgaggcggggagccgcttaaggaagatcacacggtcaatcatgcgatgacggtgcatcgctcccaacagcgctatctgtacactgacctggccatgtcgtcctggattatcgtctggctgtggaggctgattcgcagttttggcatggccatagccatgatgttcggcaagaagccgtatgaagcatgggtgcaattgtgcctgccatggttggctttggccgatatcgcgggaaacatgaaatcgcgcaggctggtggccagacagtcgaaggtcgccgcatcgtccctgcaggttttgttcgccgacagtcggcagatcaagcagttccatgatcgtcgggatgcattccaatcccagcagggcagagtgctgctcagtccgctggaacgtgcccatctgcggacacgcaccatatatcgctggagcgcagccgtggtgatggcgctggtgtgctttgcggccatcgtggtgatgtattggccggtgttccgttcgatattctccggtggatcgttgtattccgatgtgttgctttccaccggtgccagcttcactcaactggtgcagtccgccaccacgccatgggtgtttggcagcggcaccggcattcctgcgccgcccacgccgtggctgctggtgctgatgctggcctcgctggtcacgctcggccatgtgaccgccgctctggcgatgatactgtttgtggccgcgccgctgagcgcattgtcgttctgggcgctggcgggcgtattcacccgctcggacgtggttcgtgtgctgggaggactgttgtgggcatccaccggcattatgttcggctggtatgcgcaggccaatatgccgatgctcaccgtaatggtgttcctgccggccgcgttcgcattcgtgttccgtgccgtgggcatgtaccataccgaagacccgctcaagccgcgcacatccgttcaggccgcggccatcgccgcactgtgcttcatccctgtggtggccgccgaaccgcagctgctgttcgcgctgatcgtcgtgttcctgatgttcctgctgttcgtgcgccgcaagcgcgccatgctgttgcttattccggttcctgccgcctttgcggtggcccctacgctcgtcaatgcggtgcgttacgccgatttgggcatgtggcgtcaactgttcggcgacatcacagtgccaacgtcatccgccaacgggtcgccggcgtcgctgagcctgcttgaggccgcacagcgtgcgctgggatggcaaatgggatcgactgagcatgccgatttggcggtcactgtgctgttcggcgtcatcacgctgctcgctcttgcttcgctggtgctgccgttcgcgttgcggacctcgcggctgatgtgggtggtaatcgtctgcggaggcgcgctcgccctgatttccagccgtgtggccatagccgtggatgctgatggcgtcgtggccggttccgcacagcctggcatcgcgatgatgatattgggcttccttgcctgcgtgtgcctcgtcgccggtggggcggtgaagcgattccaaccgttgcatgcgtccggcagcgatcccgcaccgaaaagggaccgtctgcatgtgctcatcgtgtctggccgtgtggtgcttgctctgatactggtgtgctgcatcggcattcaatgcatgtatggcatcgaacgtcataaggatgcgggactgggcgtgtccgaaaacggcctgcccatggtcaccaccgattatctggaagccagtgccgatcatcgtgtgcttgccgtgagtgcggagacccgcaacatcgtcaactatgcggtgatgcgcaccccgcgcggcgatctgatcgacagttccccggtccagcgggcgcgcctgctgtccggcaagcatgatgcggttgacgaacaactggcccaggcctgtgcctcgctgctgtccaatcccgacgaagaggccatcgcggccatcagcgcgcttggattcggcggcatctacgtggttcccgagaccggcgattcctcgaacgacatgccgtatgaacagttgagcgcgaatatcgccgcatcgaacggcacccagtccctggtctccacggatagcggcagctactatcgtctgacgctgcgtagcagcacctcacagcaggtggatacctcatggcagcaacgtgcacagcatagtgtctggagacacgtctggctgatatgcctaggtgtgatcacggcgttgtactgcttggtcgccatgcctcgcagacgaccgtcctacggattggaggagcaggcatgagcaacaaaacttctggtttcaaacgtgcgatcggcatcgtgctcggtgtgatcaccatgctggtgttgattgcgctgttcgtcgttctcgtcatggcccccatccccaatatctggggggacaaggtggccgcttccgataatgccatcgaccagacagttagtccgacccagtccgaaacctactgcccggcacctataggattggccgataccggcacgtacggcgacagcgccttccaggccactgtcggcaatctgagcacacaggcgcgctatgcggcgttcggctccgtctacagcgccactgtctcggcgatcgggcaaaagtccagttcagatgacgtgactttgaaagacgccgatccgaccgacgattcctcggtgaaaaccggtgctcagaagatcaatcagggagctcgcctgatcaatacccgtatgttacaggccgcagctggcaccggcaccgtcggcaccatcgcatcatgggccgatgacggcgatgtgagaggcgtatcggcggcatcctgcgtatcgacctcgctcagccagtcgttcctgctctccggcggcacgaccggtaccacacagcagctcatcgtctcgaatccctccaccaagccgaccaccgtcgacattgccgtctggggttccgagacagccgggaaaatggcattgtccacacaatccacgctgtctgtgccggccgagggggagtcctcgatggaactgtccgccgcggtcgatgggcagcatggtctgttcgtgaccgtttccagcaaggagactcctatcgcgtccgtggtacgtacggtgaccatggatggtctgacaccgaagggttctgatttcgcgctgccgctgccgaccgcctccaatgcgtcggtggcgccgtccatcactgccggcgatgcggtcaccgcttatctgttcgccaaggcagacaccagcaccgggctgtcatggattaccgacaaaggattggttcccgccaaagatgccaccgtcactgccgataaggtgacggcgatcgacttgggagaggctcctgatggggcgttgggcgtgatgtccaccgcagaggatgccgtgtcgttctccgtcaaggccacacgctccggtgactccggccaagccgatttcgcattggtcaatgccggcgagccatccgaattctcggggttggcccttcccgacggagtaaaggcctccatcacgctggccaatacatccaatgcgcgcaggacggtcaccttgcacgcctacgatgatgccggtgcttcggtgacctccgaggaaatcacgctggatgcgaacgcggcgcaaacgattgagaccggcaaactttccggcgatcatggcaccgcggtcgtgctgatgttggaggactcatccaagaaagtgagctggggagcgcgtttcagtcacgattcgttgcaagacaaggacatcgccggattgtccgccatcgacgcttcaacgctgatgcccgccacggtccatgtctgggctcggaacgattcctccatcgtcaagtagagcgcgctcgccgaagcatcggtctgatgatgtttcggcgccgatatagctgcgggggccgtgccactgtcttacttgaagtggcacggcccccgcaatactgtcacaggccccaatcggggtcgatttcctcgggcctgcgcccatacaattccgctatgcgggccaccagctcatccctgacggccaactgcaattcgagcttggtaggtgcctcggtctgcaacggcatacggtagagcacgactcgtgcgggaatgccgtggctggcggggaagcactgggacgtcatattcggctcggtctgccaaggcgtcggatccgaaggcggcacatcctccaccgcgaactggagcggacgtatcagttccggccacgcttggccgagcctgcgaacctgggccgccaccatatcgtcgaacatgccggtgcgagtgcggtaacggggcagacgggtgccgaacatcggggttcgtgtgccgcgaccgtggcggttgcggtagattcgtgcgttccaaggtggctgaagcatggttcccaccataggacatggcggaggcaacatgcgttaggattggttcattggctgtgaacattcgtcaacgagggaggcgcgacaaatggtggtacgttcgtggtccgaacttgatttcgataatgtctgctccaacgccaaggtgttcggtttcgatttggacaacacgctggccagctcaaaacagccgatgaggcccgcgatgatcgaacggttctgtgcgctgctcgaccatacggtggtggccctgatctcagggggcggcatggcggtggtcacctcacaggtgctggatgtactcaccccgaatgccaggcgcggcaatctgcatgtcatgcctgcctccggctcccggtattaccggtgggatggcacgcaatgggccttggtgtatgcgcatgatctgtccgaagccaccgtggccgctgtctcggaaagtcttgagcgacatgcccgggaactgggattgtgggaacagcaggtatgggggcctcgaatcgagaacaggggcagccagatcaccttctccgctctgggacagttcgcacccgtagcggctaaacaggcatgggatcgcgataacacgaagaaacaggcgctggtcgaagcggtcaaggccgatctgccgcacatgcgggtcagggccggcggctacaccagtgtggatgtcagcgaatgcggcatcgataaggcctatgccgtgcgcaagctgacgcagacactcggcatacaggccgatgaaatggtgttcgtgggcgatcgcatgacgcctacgggtaatgactatcctgcggttgaggccggtgcgatcggtgttcgtgtggagaatccgcaagacacggtacaactgctggatgcactgcttgcgcgattcgatactccagcttgatggtgacgcgttatggacgggccgagcgtatacaagtggtggcatgcgatgtgggcgcaggcctgcaatctgctgtttccacgcggctgcgctgggtgtgacgcgccggatgaggtattgtgcgcggcatgctgggccctgttcgcgcaatgccgggagcgggatacagacggtggtggcggagcccgtatatggtccgcatcgatttaccagggagcggcgcgtcgtgccattctcgactggaaggaccacgacgataccgagcttgacggccctttcggccgcatcatggtgtcgctgctgaacaagacgccaatatcatcatcatgcttggggcatcgcgtattggtggttccggtgccgtcatcgcgggcgtcaatgcgccgaagagggcgtgcccatacggcaccgttggccaaatcggtggcaggggcattgcgtgggtacggtgtcaatgcgcgaccatgcaatgccctgagctcctccaccaaggcacgctccgtgcagcagacctcttcggcacagcgtgcccgtcgtatcaccggtcatgtcacggtgaagcgtgatctcataggccatggcgacgcggtgcttctcattgatgacatcgtcaccacaggtgccaccgtgcggcaatgcgttcaggtgtttcagcaggccggcaccaaggtggtgggcgtgctggtattggcggatgccgtggcgcgacggtccgatgacgatatcaacgggtgaatgacatcggtgacgatgccccagatagcaggcgaagcgccgttgctcggcatgtaatcgggatatcgaggattctcggcgtgcaatatggtgatgccggcccgtgaaaccagccgtttgatggcgatttcatcgtccatgacagccgcaaccacatctccggggactggtgccaacgaacgatcgacaatcagcagatcgccgttatgaataccggcattgatcatggaatcgccggccatctgcatgacaaacagcgtggtgtcgtgcggcatggttcgtgacttggattgctgtgtcatgctgtgcctcccaccctgtattcgaacatctgttcgaatacagtatacggtaggacggcggacaatatcagcgttcggcgacgtgatatttaggcaggatgatttcgaaatcggcgcctcgcgtgtcatcgaccactttgacggtgccgccgtgcaattgggccgcccaacgtgcgatggacaggccaaggccggtgccgcccgactcggtgccgggacccgtcttgcctttgacaaagcgccggaagatatccgaacggtcggacggtgcaatctgggagccgaaattcaccacattggtcacgatggtgccttggctgtcatcctcatgggcatcgaccagcacggtggtgccgtcggccgaatgcttcagtgcgttggcgatgatgttggtgaacagctggcgcaggcggtcctgatcgccttccatcgagatgtcggccggcacggtgacgcggatgtcgtgggcgtggccgccatcggcgatttccaacggctcgatggtctcgtcaagaaagtcggcgaagttgaacttttcgatattcagactcgccgcaccggcctccatacggctcaaatccaacaggaaggcgatgaggtcggagagacgctgcgtttgggtgaggatgctctccagattggcgggagtgggctcggtgacgccgtcggccatgttctcgaccatcgcctgcaaagcggaaacgggcgtacgcagctcatggctcacattggctatcatgtcgcggcgcattttatcggcatgttcgagttcgccggccatctcgttgaacgagcgagccagctggccgacctcgtcatgacgatcctgatcgatatccacgcggaccgtgtaatcgccatccgccatggcttcggccacatcgcgcatctggcgtaagggagcggtgatgccgcgggagaagaaataggtgatgcccaaggccaccaccaaagtcagcggcatggcgatccaaccggaccagccgaatttcaggaggaaccagcacatggcaaacgcgatggcagtggcgataacgatcagtacgctgagttccagcttcagagaggagaacaaatcaaccggcttgacgcgaggtttcatcgcatcaagccgggattgctgttgttttttggatgccatcacgcggtcggcggctcgaaagcgtagcctacgccgtgcacggtgcggatggtatcggcgccgagcttatggcgcagcgccttgacgtggctgtcgacggtgcgggtgccggatgcgtcgacccagtcccagacctcttcgagcagcttttcgcgggtgagcaccgactttgggcggcgggccagcgtggccagcagatcgaactcggtgggggtcagatgcacctgctcgccgttcacggtgacgatgcgctgggccgggtctatgaccatcgaaccgaagtcgagcagcttctcgttctccgaattcttggcgatgaccttcgcacgctccacgcggcgtagcagcgccttgcagcgggcgatgagctcgcgcatggagaacggtttggtcatgtaatcatcggcgcccgctcccagaccgatgaccttgtcggcctcgtcatcacgtgcggtgaggatcagcaccggcaccggacgttcggcgacgatgcgtttggtggcctcaagaccatccatgaccggcagcatgatgtccatgattaccagatcggggcgtagctgggacgcggcctggacggcggaagcgccgtccccagccacgcgagcggtccatccttcagcggtgatgcgctgggcgatggccgtggcgagtgtgggctcgtcctcgaccaccagcaccgtgcgcggtgtcgtattctgacgcgctgtggtattgagcataaataaaccggttacctttcagcctgttgaccagttcagtcttccggcttcaagaatacaactcccagagccggaacggtgatcttcgccgagaacggacgcgaatgatattcgccctcgaccgcttcgaaggtgccgttgtggatgtcggagccgccgtacttggcgtcatcggtggtgaacacttcggtccacttgccgccggtgggcagcgccacctggtaatcgggccaggcttcgccggagaagttgaccaccacggccaaggtctcgcccttggtgccgatgcgcaggaagctcagcgtgttgtggtcggcatcgtcgctggtcagccactggaagccggccggatcgaagtcctggctccaaagtgccggatgcgccttgtagaaggcgttaaggtcggcgaccatggtctggacctgacggtgctcctgccagttcaggcaatcccaatcgatggaggcgtcgtgatcccactcgccccactgggccagctcgttgcccatgaaggagagcttcttgcccgggtgagcccactgataggcgaacatcgaacgcacgccggctagcttctgccagccatcgcccggcatcttgccgtacagggagcccttgccgtacacgacttcgtcgtggctgatgggcaatacgtagtgttcggagtaggcgtacaccatggagaaggtgatttcgttgtggtgccacttgcggttgatgggctcctcgtgcagatactcgagggtgtcgtgcatccatcccatgttccacttcataccgaagccgatgccgccggcggaggtgggggcggtgatgcccggccatgcggtggactcctcggcgatcatcatgacgccggggttgttcttgtacgcggtggcggtggcttccttgaggaagtcgatggcctccaggttttcgcgtccgccgtagatgttcggacgccaatggccgggttcgcggctgtagtcgaggtagagcatggagctgacggcatccacgcgcagcgcatcgacatgcaggtcctcgagccagaacagggcgttggccaccaggaagttgcgtacttcgcggcgtccgaagttgaacacataggtgccccattcggggtgttcgccgcgcagcgggtccgggtcctcgtacagcggggtgccgtcgaagcggccgagtgcgaaggcatccttcgggaagtgggcgggcacccagtccatgatcacgccgatgccggcctgatggaactgatcgaccaggtaacggaagtcgtcgggggagccgaggcgggaatccaccgcatagtagccggtgacctgatagccccaggagccggagaacgggtgctgtgccagtggcatgaactccacgtgggtgaagccttcctgcttgacatagtccacgagctgcttggccaggtcacggtaggtcagtccctgcttccagctgccggcgtgcacctcatagatggagaccgggccatcatgcgggttggtggtgcggcggtgctgcatccaggcgtcatcgttccactcgtaggtggattcggtgacgatggaggcggtgttcggcggaacctcgtgctgacgctccatcgggtcagccttcatctcccacgtgtaattggcgttcaggatctggaacttgtaggtctcgcccgcgccgatgccggggatgaagatctcccacacgccggaggagccgagctcgcgcatggcatgacgacggccatcccaggcgttgaagttaccgaccacgcgcacggcatgggcgttcggggcccacacggagaacgcggtgcctaccacctgttcgccaggcgtgccgtccacgccgcccatcggatcgtcatagcgcagcacgtgcgcgccaagcgcctcccagagcttctcgtgacggccctcgccgaacagataggtgtccatgtcgccgactgtgggcatataacggtatgggtcgtcctcaatgagcactgcgccgctttcccactcggtcctgacgcggtagtcgggaatcgtgggctgcttcttggtgccggaggccggcacggtagccacgaacacgccgttgtattcgtgggtcatcgggtattcgccatcctgggtgaggatggtcacggacttggcaagcggacgcagcacacggattgtggcggtgtcggcatgcttgccgatgccgagatgcccgccgagaactccgtgggggttgtagaattcagcattgctcaccgcatcgaggtcgccttgggcgacaggcacggtgacggtatcttccttgatcttcgtttctttagccatgacccaaagtctacgtgcgttggagtcgaaaacgctacattggcgcgtcgaaaatggcgaattcttgcccttttcggtgtgtcttcgtggttgtgaacgctctcataggggcggtccaggccgcatggcataattattcgagtttttgtgtgtaagccgtcagttctcggagggtacatgtcttacaaagtcggcgatatggtcgtctatccgcgtcatggtgcagcgaaggtggaggccattaccgagcggacggtcaagggagtgacgcgcgaatatctgcagttgtccgtactctcttccgatggtttggtcatcaacgttcccgtggacaatgccaggaaggtcggcgtgcgtgacatcgtctccgcatccgaagtggccaaggtattcggcatcctgcggaccccgatcatcgagaaagagatgaactggtctcgccgttacaagctgaacgtcgaaaagatcgccaccggcgatgtcaacaagatcgccgaagtggttcgcgatctcgcccagcgcgatgtcgacgagcacggcctgtccgcgggggagaagcgtatgctcaccaaggcccgcgccattctgacttctgagatcgccttgtccgagaagatcgacgaggcggaagcccagcgtctgctcgacgtgaacctgggctacgagcccgc

SEQ ID NO: 1945 - DNA, 2697 bp, Unknown
  R17_18m  MAG No. k141_8204
aaggacatcatgaacgccgagctcgaagccggcgaacgcatcgtgatgcgcaaccacagctgggtcgcctacgtgccggccgccgcccgttggcccctcgaggtccacgtggctccggtgcgcgacgtgctcaccctcgaccagctcaacgacgaagagcgttgggacctcgcctccatgtactcgcacctcctgaagcgcggcaacgccttcttcgacaagggcgacggcaagggcatggatctgccatacatcgccgcctggcaccaggccccgatccacgacgcccgccgcgagaactaccgcctgaacctgcagttcttctccttccgccgcgccgccaacaagatcaagtacctcgccggctccgaatccggcatggccgcctggatctccgacaccacgccggaactcatcgccaagcgcttccacgagctcggctccatcgacatcgccgactgatagaaagataacatcaatgactgctgttgaattcattgagccgctgacccatgaggaaggcgtctcgcaagccaccaagctgtttgtggacacctacggcgctgcgcccgagggcgtgtgggctgctccgggccgtgtgaacctgatcggtgagcacaccgattacaacgccggcctgtgcctgccgatcgctctgccgcatcgcaccttcatcgccctgaagccgcgcgaagacaccaaggttcgcgtcgtctccggcgtggctcccgacaaggtcgccgaagctgatctcgatggcctcaaggcccgtggcgtggacggctggtccgcctacccgaccggtgtggcctgggcgctgcgtcaggctggtttcgacaaggtcaagggctttgatgccgccttcgtctcctgcgtgccgctgggctccggcctgagctcctccgccgccatgacctgctccaccgctctggctctggacgacgtgtacggccttggctacggcgattccgacgccggccgtgtgaccctcatcaacgccgccatcaagtccgagaacgagatggccggcgcctccaccggcggtcttgaccagaacgcttccatgcgttgcaccgaaggccacgcgctgctgcttgactgccgctcggagctgaccccgctggagaacgtctcccagcaggagttcgacctcgacaagtacaacctcgagctgcttgtggtcgatacccaggctccgcaccagctcaacgatggccagtacgctcagcgtcgcgccacctgcgaggaagccgccaagattcttggtgtggccaacctgcgtgtgaccgccgacggcatctccaaggccgatgaccagttccaggccctcaaggaaacgcttgacgccctgcctgacgagaccatgaagaagcgcgtgcgccatgtggtcaccgagatcgagcgcgtgcgttccttcgtgcgtgccttcgctcagggcgacatcaaggctgcgggccgtctgttcaacgcttcccacgattcgctggccgccgactacgaggtcaccgtccccgagctggacatcgccgtggacgtggcccgcaagaacggcgcctacggtgcgcgtatgaccggcggcggcttcggcggctccatcatcgctctggttgataagggccgttctcaggaagtcgctcagaagatcgccgacgaattcgaaaatcaaggcttccacgcaccgcgcgccctggccgcgtacgcagcgccgagcgcttcgcgcgaggcctaggacaacccggtgggttgtccggcggatgcggtcgaggtcgagccaataggcgaggccgaggtaatgctgggtcggccgtaggtcgtccgtaattgcaggaccgcgtgcgcagcgccgagcgctttgcgcgaggcctgagccattgcaagctccctctgacgagggagcttcgttttatcccgcaccaccaccatgcccgccggcgaatccggcaccacttattcccataacccccataacgctcctgaaaccaggcatttcgaccatccgcataaggtgatgctcggcctgtacatcggcgcattcctcggcatgctgtccgagacatccatgaacatcgccctgcccgatttgatggacgagttctccgtatcctccggtaccgcccagtggatggtcgtcggctgcatactggccattggcgtggtgatgaccgcgatcggcggcgcacagttctttaccatcggcgtcaactcgggcgttgtgctggtgttctccttcatgttcaagggcggcaaacgatacatgaatcggtaatgaacataatggcgggtgtcttccctataattgggtagtcacccgctttttgtatacgaccagggagagccatgaacaaggcaatcatcaccgtcgtcggtcaggacaccgtcggcatcatcgcacgcgtctgcacctacctgtcccagcacaacgtcaacgtgcttgacatttcccagaccatcatcgacggttacttcaacatgatgatgattgtcgactacgccaacgcggacaaggacttcggcgcgatggtcggcaaccttgaggacctcggcgacgacatcggtgtgcgcatccgctgccagcgtgaggaaatcttcaccaagatgcaccgtatttgaggcggcccgctcagcaggccgccgcacgcgaggaggcggaaagcccggtgggctttccgctgacggagccatccttatccctctgat

SEQ ID NO: 1946 - DNA, 47032 bp, Unknown
  R17_18m  MAG No. k141_8547
cgcaacgccgtgcacgtctgctcaaggcggtcggcgcggacccggacgaaccggccatgcccgtcgcctccaaggatctggccgaagcggccacggccttgcgttccagctaccggaaccaactggccgccatcatcgcccaggatgccgtggcggacgacccggcctccatccaaccgaccatcagccgcgaactgtccgacctcgcggacgcggcgctcgaaggcgcgctggccatcgcccgccacgaaaccgagggcagcgagcacgtgcgcttcaccatcatcggcatgggcaaactcggcgcacaggaactgaactacgtctccgacgtggacctcatctacgtggtcgaaccggccgacaaggacgtggaccatcagacgctgatccgcgtgggcaccaagatgggcaccatgctgcagcgtgtctgccagtccgccatcatgggcgtggccgagcagccgctgtggcagatcgacggcggcctgcgcccggaaggcaaggacggcgcgctggtgcgcgtgctctcctcgcacaagaactactacgagcagtgggccgagaactgggagttccaggcgttgctcaaggcccgcccggtggctggcgaccccgacctcggccgggcctacatggatatgactcggccgttcgtgtggagcgcgtccaagcgtaagaacttcgtctacgactgccagaaaatgcgcaagcgcgtggaagatctgattcccgcacctctgaaggatcgcgaaatcaagctcggccgcggtggtctgcgcgatgtggaattcaccgtgcagatgcttcagcttgtgcacggccgtaccgatgaatcgctgcgcaccagcaacacgctcgactcgctgcagcgcctgtccgaaggcggctacgtctcgcgcaaacaggccgtgcgcatgtcccaggactaccgcttcgagcgcgtgatggagcatcgccagcagatctggtccctgaagcgcacgcacctgttcccggacctcggccgggcctcggtcggaggcctcgaaaagaagcgcgacatcgacgtggatgagctcaaccagaaccaggagctgcgtcgcctcgcccgcgcattcggcctgcacccggaagaactcgtcgacaaatacgacgacacccgtcgcgaagtacgccacctgcacctcgacatctactatcgcccgatgctgccggtcaacgcccagatggagaacgaccagatcgtgctgagcgtcgaggccgcacaggaacgattcgaatccatcggcttcggcgacccggacgccgccatccgccacgtgcaggcgctcactgccggcgtggggcgcgcggccaaaatcaaccgcatcatcctgcccgccgtcttgcagtggctgggcgagggccagaacccggacatgggcctgctcaactggcgcaagctggaggagaacttcggcaccgaatccggctacctcggcttcctgcgcgactccacctccgctgcccagcgtctgtgccacatcctgtccaactcgcgattcctgggcgacgcgctcaacaagtcggtcgaatcgatcagttggctcggtgatgacggcaatctgcaggcccgcacgcgcgaggcattggatgtgcagaccggctcggcgctggaacgtttcggctcgaacatcaacgagttcgccacctccatgcgcgccatgcgccgccacgaaatcgaacgcatcggcctgtcttggatgagcggtgtgatcagcgactccgacagtctcaaggccatgaccgacgtgtatgacgcgatcatcgacgcctcactgacctgggccgtgcgccaccagatcgccgcgttcggcgtcgaaaccgcgccggccggcatcaccgtcatcgccatgggccgttacggcgggcgcgaagtgaacttcagctccgatgcggatgccattctcatctaccgtccggccgacgatgccgacgacggccaagccaacgccttcgccaagaaggtcgtggaagacctgcgcaacatcctgcaaggcccgacgacgctggaacccaagatcgaactcgacctggacctgcgcccggaaggcaagaacggcccgctcgtgcgctcctacgcctcctgcgaggaatactacgaatcctgggcctcgacctgggagcgccaggcgctgctgcgcgcccggtacgcggccggcgacgccgaactggcgcgggacttcctgatcaacatcgccgacccgttgcgctacccgaccacggagctgaccgaggccgaattgcagaacatccgcaagctcaaggcccgtatggaggccgagcgtctgccgcgcggcgtgcgtcgagaacgtcatctgaagctcggcaagggcggtctgtctgacgtggaatggaccgtgcaactcatgcagctccagcacgccggcgatatcaaagatctgcgcgtcaacggcacattggaggcattggacgtgctggaggccaagaagctcatcagcgctatcgatgcgattcagctgcgcaaggcatggacgttgtgcaccgcggcccgcaacggcaactatctgtggagcgggcgcgccaaccaggccgatattctgcctgatgacatctattcgctgggcggcatcgccgtctacctcggctacggcgcccaccgcggccagcatttcgagaacgacctgctggccgtgatgcgcaaatgccgtgacgtatgccagcgcctgttctacgggcaggccgaagacgaggcgactgcggcaaccaccgccacggcctccgccgcaacgcagcagccgcaaaccgcgcttcgcccgcgtatgcacgtgatcgcaccgcgactggagcggaaccgacgccgcgcgcagcgatagacctttcttgtattgcgttcactacgttcattaggtcgattcatcgttcattaggtcggtccgccgccgcataccttgttggaatggcggcattccaacaacagatacgagggtgcagtgacctaatgaacgtcaaatcgacctaatgaatgagctctggcgttccaaagcagatatcagctatacagacacagcatattcgttggattttcaggtgaacactcggtgaatgcggctgtccgaaaaatggcgtaagttatattaggtcacacaagggtggccacctgaaaaccacgagcgaaaaggtgagccttgtctgaagaaacgccaatggtcggcaaaagcgtcgtaacgctggacggcctgtctacaaaccagattctcgacctgctgcataaggccgaatacatcgattcccaccgcaaagaggttgcccatacctgcgatgggcgagtgctggccacgctgttctacgagccctccacccgtacgcgcctgagctttgagacggcaatgctgcgtctcggcggcaaggtcatcggattcgccggcgcgcagctggcctccgtgaccaagggcgaatccatcgccgacacgttgaagaccgtgtccaactacgtggacgtggtcgccatccgtcacccgaaggagggtgccgcgctggtggcctcccgcgccgcatccgtgccggtgatcaacgccggcgacggcggtcacatgcatcccacgcagacgctggccgacctggccacgctgcagtcgcgcttcggccgcatcaccgacctgaccgtgggactgtgcggcgatttgaccttcggccgcaccgtgcactccctgatcgagaccctgtgccgcttcggcaacgtgcgcttcgtgcttatcagcccggacgagctcaagaccccgcagtacgtgatcgaccgcatcaacgccactgacaactgctcctacgtggaagtgcgcgacctggcctccgtgatcggcgacctcgacgtgctgtacatgacccgcgtgcagaaggaacgcttcttcaacgaagacgactacctgcgcctgcgcgacaccgaccttctcgacgaagaaaagctgcagctcgccaagccgtccatggccgtacttcacccgctgccgcgcgtcaacgaaatctccgtggacgtggacgacgacccgcgtgccgcctacttcgaacaggtcaagaacggcatgctcgtgcgcatggccctcgaaagcaccgtggtgggcgacgaactacccggatacgaaccgctcaaccccaaggaggttcaggcctgatggaagtcaccagcattcagaacggcatcatcatcgaccatgtgccggccggaacctcgctgaaggttctcgaatacctgaaaatcgaaccggccaaaaccaagcttgcgctcatcatgaacgccaactccaagcgttacggctccaaggacatcatcaaaatcgaggatgacaaggacatcgacctcgacgtgctcggcttcgtggccttccaggccaccgtagacggggtgcgcggaggcaagatcgtcgaaaagaagcagccgaacctgcccgagcacatcgtcggcgtgatctcctgcgtgaacccgcgctgcgtgaccaccaccgagcccggcatcaagcagatgttccacctcgtgcactccgaacggctcgaataccgctgcgactactgcgacgaggaagccaaactgtgagcatcaccctacgcaacatcaaggtctggaacaccggcgaagtcatcgacctcgtggtgcccgggaccgctgccgcctacttcgccgacacctccgccgtggctgacggtgccgatatcgacgccaccggactgaccgtggcccccggtttcgaagacccgcacgtccacttccgcgatcccggccagacctacaaggaatctatggtctccggctgccgcgcgtccgcatccggcggatacacgaacgtgctcatcatgccgaacacgttgccggcactggatgggcagaccgtgtctgacctggaagcggccggtgcgaaagaggttctggatgccggcttcgacaacgtcatcgacttcctgcagcagtacgatactgcgcacgatgttcaattgccggttcgttacgatctgtgcgtgtgcgcgtccaaggatcgcgccggtcatgaggcaagcgacgttgccgactggctcaggtacgtgcccggattcgaggacgacgccaagacgccggccatgctcacgcaccccatcaccgcaattagcgacgacggttccgctgtgacgccggagatcctggaccaggtgctggagaacgtcaaggcctccgacctgtacctaatcgagcattgcgagcatcacgatacaggtgccgtgaacgaaggcccggtctcgcgcgaacttggcgtgcccggcattccggaagacaccgagctcaagatcgtggcccgcgatatagaagcggcccgccgcactggtgtccacgtacacttccagcatgtgagcactgccatctcgttcgaggcgattcgcaaggccaaggccgaaggattgccaatcacctgcgagaccgcgccgcactatctggcgttgagcgacgaggcgctgctcaagtacggcacgctcgccaagatgaatccgccgctgcgctccgaagcggaccgcaaagccaccatcgcggccatcgccgacggcaccgtggatctgctggccaccgaccatgcgccgcacacgttggcagagaaggaactcggcttccttgaggcgcccaacggcatcatcggactggaatgcgcgtacggcgtgtgccacaaggtgctcgtcgacggcggcttcatttccgatgagcgtctgatcgagctcatgtccgtgggacccgccgaactcatggggcatgtgccaaccgacgtggccgcgctggtcgaggactacgccgaacccgcgcccactggggatgatccggatggcgtgattgcgggggagagcgacgctcagccgcagcgtgaaggcgtcaaccgactgctcgacctgagccgcgtggatgacgccgacaatgtcgacctcgtggtgctcaacaccgctgaggaatggaccgtggaccctgaacagttccactccagggctcgtaacaccccgttcggcggctggcaggtcaccggacgccccctcgccacgatcatcggctcccagctgatgttcagccgtctgtagataacataaggagcagcatggatcgcctgatcgaagcgattgacaacactcagaaccccagcgtcgtgggcctcgaccccaccgaggcgttggtaccgccgcaggtcgtggcgagctttgccgacgaggtgcgtgactcggtcgaatccccggaggaaatcgaatccgcgcagctggccgtcgcctacttcgaatacaaccgcacgatcatcgacgccatcgccgacatcgtgcccgccgtcaaaccgcagatcgccatgtacgaggcgctcggccccgccggcgtggacatctacacgatgacctgcgaatacgcggcccagcagggcctctacgtgctcggcgacatcaaacgcggcgacatcggctccactgcagccgcctacgcccaccacctgaacggcgtgggcgacttcgacccgtggcatgaggatgcggtgaccgtcaacccgtatctcggcaccgacggcatcaccccgttcgtcgaggccgccgccgaagccgacaaggacatcttcgtgctcgtgcgcacctccaacccgtcctccagcgaactgcagatgctcgacctggccgacggcacgaaggtctacgagcatgtggccgttctcgtggaaggctggggcgccgagaccatcggcagccacggctactcccgcgtgggcgcggtggtcggtgccacccaccccgaggaaggcaaggcgttgcgtgaacgtatgccgcacacgttcttcctcgtgccgggctacggtgcgcagggcggcacggccgcggacgtggcaggcatgttcgacaagcagggcagcggcgccatcgtcaactcgtcgcgcggcatcatcggcgcatggaagaagagcggcaagtactccgaatccatgaccgccgacgaggcgctggaccttgtggcgagcagcgcgcgccaggcggcgctcgacatgcgcgataatctgcgggttgccgtatataggtaggtagattgtccggctgtgggctatacgtgagtgtgggctggaaaccggagccgagtgtgtttaactacccctcagtcaacctgcggttgacagctcccctgatagggggagcttgatgtgctgaataggaatgaaatgacaactttcacccccacccatgatgtggttgcggaggcgactgcggccggattcttcccgccgcgccacaacgtcgaaatcacgcaggttacggaactgaccgaccgcgtgatgcgactgacattccgcgacccgttcatcgcctcccacgccaagcccgcccagttcgtcaacctgttcacgcacgacgacttcatgctcatgccgcgtccgttcggcgtcagcgaagtcgacggcgatgaagtcagcgtgatcttcgccgtcgtgggccacggcaccgaacagttggcaaggctgcaggccggcgacaccgtcgacgtgctcggcccgctcggccgcggcttcaacctcaaggaagacgccaactacattctcgtcggcggcggactcggcgtgcccccgctaatctacgccgcgcaaaagctcgccgaacacgacgcctcctttgccaccgccgtattcggctaccgcaacgaccacttcgctgaggaatacgtctcccggtacgcggactggtcgtggagcatcgacgacgccgaaggcaacgtggtcgacctgctcaacaaactcgaacaaggcgacgacctgaaggcctacgatcgcaagccgatcatcttgtcctgcggaccgctgcctatgatgaaggccgtggccgcttgggccgccgaacgcggcatccccgcgcagctgagcatggaacagcgcatgggctgcggctacggcacctgcgtgctgtgcaccatcgacaccgtggacggccggctcaaggtctgctccgacggacccgtgttcactcgcgaacagctcggatggggggagtgacgatgagcgcaaacaaccagtccgcgcagggcagcgacaaccacatcaacctgtacgagccccacgtgtggaagcaccacaccaaggtggccggtctggaatggaagaatccggtcggcaccgcctccggcaccttccagtacgccgccgtacgctggttctacgacgtcagccagctcggcgccgtatgcaccaagggcgcctcgcccgtgccgtgggagggcaacccctcgccgcgcaccgccgaatcgccggccgcgaacatcaacgctgtaggcctgcagaaccccggcatcgaccattacttggccgaagacctgcccaagctcaaggccgcgggcgcgttcgtcatctccaatgtcgccggacattgcgatgacgattacgcggcggtcgtggaaaagctcgccgactccgacgcggacatgctggaaatcaacgtcagctgcccgaacgtttccgccggcggcatgagcgtgggcaccgacccggtggccctcgccaatcttatggaccggctgcgctcgatgaccgacaagccgatgatcgtcaaactcacgccgaacgtcaccgacatcaccgtgccggcgcgcgcggccgtggaacacggcgccgacgcgttgagcatgatcaacacgctcaaaggtatgcgcatcaacattcgcacaggccagccgatcatcgccaacgtcaccggcggcgtatccggcccggccgtgctgccggtcggcctggcagccgtctatcgggtgcgcaccgcactgccggagattccgatcatcggactcggcggcatcgacagtggtgagaaggcgctcgaatacctgtacgccggcgcgaacgccgtcgaagtgggtgcggccgcgctcttcgacccggtggccccgctgcgcgtcgcccgcgaacttgacgacctgctggacagccgtcccgaactcgctgctaaactggccgcaggacagacttggaggtaaggaacatcatggcagaaacactcgcacatcgcttcactgaattcctgttggaatccaacgcgctgaagttcggcgacttcacgctgaagtccggccgcaagagcccgtacttcatcaacgccggcgccttcgacgacggcaagaagatcgccgcgctcggcacgttctacgccgaaaagattagccaggccatcgtgcacaacacgattccccgcaacatcgacaccgtgttcggccccgcctacaagggcattccgctggccgtgtccaccgcgatcgcgctgaacgccggccacaacatgaccgttggatacaccttcgaccgcaaggagaagaaggaccacggcgacggcggctggatggtcggcaccccgctgaccgacggcatgaaggtgctgctcgtggacgacgtgatgaccgccggcaccgccgtgcgcgaagtcatccccaagctcaaggccgaggcgaacgtcgaggtcgtgggtctcgtgctctccgtggaccgcatggagaagaccaaggactccgacctgtccgccgtgaaggccgtggaagccgaattcggcttcccggtgctctccatcgccaacgtgcgcgagatcttcgacgccgccgccaagatgaagaaccccgacggcaccccgttgctcagccacgatatccagcagcgcgccgccgcctaccttgaggaatacggcgcctgatcgtcttcaacctaaaaccaaaagcgggcttgcgagcccgctttttttattacgatccatgaacagcagtaccatattaaggcagaagctttggcaaggagcgtgctatgaactggttagttggtatagggctgtttgcgctcgtggggatatgcagttacttcggcatcgagcatcatctggacagtaaagcgaacaagttgtcgcaaggtaatgaagaagaccgccgagatgctgccgaattacgtgatatcgccgccaaaatcgatcacggtaagtattacccgatgctgtaacgggcaatctgggcctaaatggatgctatctccgcttcaaggggctgatttcgtgatttccggaggtctacttccgcttcaaggggctggtgcccaagtagaggcagcatgaaaatggcggaatgacgttgacatgttgccgtttgtacttgggatatgacggatgaacagccccttgaagcagagatagatgttcccgggaggccaaatcagccccttgaaggcgagatcggcatctagacggtagggtcgcccgtggtggaaactcgcgcggcgtagaattgtcgtaggttcgtttctctcgaatacattcgaacaaggaaggccgccatggggaacatcaccgacgatatccggcaacatttcgacaccttcgccgcactgccgttcaccgaggcggacagtctcgccctgtcccagctggcctacgcgcgcatgccggataacgtgccgcgctatcacgaggattcggcggacgtcagcggcatgattcccgcggtctccatccgcgacctgctacgtgccgaatgctatgacgacatgttcggcaaggtgtggtcgccgcagatgaacgtcgatctgctgcgtgcgatgggggagagcccgcgctggcgcgacctgcgcgtcggcgaatacgtggatgaattcgacgccgaaaccaccaaacagttctcggcctgcgtcttcgaactgggcgacggcacgctgtacgtggctttccgtggcaccgacagttcgatcgtcgggtggaaggaggatttcacgatggccttccgccgtccggtcgcctcgcaggaggccgctgtgcggtatgtgactgatattgccggccgctgggccgggccgattatggtcggcggccattccaaaggcggcaatctggcggtatacgcggcggccaatgtgcccggcgaaattcagggacgtatcacggccgtgtattcgcacgatggtccaggcttcgatgaggcgttcttcgatgaggatgggtacgcgcgcattgcgccgaaaatccataaatcggtaccgggatcgtcgatcatcggcatgctgtttgagacccgcgagcatgtggaagacggctatacggtggtcagcagcgacggtgccagcatcatgcagcatttcgcattgcactggcaagtcgatcatggccaattcgtacaggctgatggactgacaagtagcgcgcgatacctggcacgcacgatcaacggatggatggcaaaatacgacgacgagcatcgccgcaagttcatcgaaaacctgttcgcgatcttcgaggccggcggatacgccacattcggcgacctcacttcgcatttgacacagtcattgccggttatgctcgccgcggcccgcaacattgatgtcgaagatcgcgacgtgatgatcgaagtgctcaaaggcttcgccgcgacagccgccacgtcggtaatctcggccaagtagccggaggccatcaaactggttttgccagtcagtctcaatagcgcaagagccggcccctgagatactcaggggccggctcttacttccatttccccagcggggttggcttaatcgcagtatatctcactgctgaccatgactgttttacttactcctaatcaatgagcttgtagccgtgatcggcgactacggacttgagcttggtgaggtaggtttcggcggccttggatagcttggaacgctcgttcgtgatccagccgaccagcatcgtttcgtcggtgtcgagcggcacggtgacgatcttctcattgttgaggtcgccgttgtcgatgccggtgcacaccgtgtagccgttgaggccgatgatgaagttcagaatcgtggcgcggtcggtcacgttgatctgcttgggggagtattccggccagaccgcctcctcatagaagtagaacgagccttcctcgccctgttcgtactggatgaacggatagggcttcagatcctccatggtgatgatctttttggcggccaatgggttgtcccgtgagatgaacacgtgcaggggggcgcggaagagcggatggaattcaaggtgtttctcgcgcaggagtttgccgatcacgtccttattgaaatcggacaggtagatgatgccgatctcggactgcatgttcgccacctggttgatgatgtcacgtgtacgggtctcacggatcgtgaactcgtattcgtcggacttaatggagttgatcatctccacgaaagcctcgacggcgaacatgtagtgctgggtggagacctggcacagctgcttgcgcggtttggcgtgcttgtagcgctcttcgagcaggtcggcctggtcgagcacctggcgggcgtaggtcaggaattccgcgccgtccacggtcagggcgatgccctgcgaggagcgggtgaaaatctcgatgcccagctcgttctccaattccttgaccgacgagctcagggccggctgggagacgtacagggcatgggaggcctcgttcatcgagccgcactcgacgatcttgacgatgtatttcagctgcagcagtgtcataaagtctatttatatcgctagggatggtcgccacacgggtttataacctcatcaatccactatggcgacacaatatgagatgcctcgcatatcgcggacgctgtgtaacgggatatgcgccacattggtaacctgaggcaggaccagtacgatgccatccagaccttctccttctccagtatcgaccgcttctccacgccgagcctgatgaccaggctcggcgccgacgtgatgaacatccagaacgccttcatgatgattctgcgcatggtgccgcgtgccgcgtcgttgaagtgctcaccgaacagtgcgacatgccggtcgccaaacggccggtcaccgtcgtcaaggacgggtccatagacttcaactgccgcgacgcaatatttggcgacttacaggcgtacgccgagttcggcgagcgattcgcgcgcctgcgacgcgttctcgaagaggatgctgtggatgccgacctcgttggcgccgacgatgttcttggcggtgtcgtcgaagaacacgcagcgctcggccgtgaggccgaagcgggtcaggaccagctcgtagatgtcggcgttcggcttgtgcatcttctccacgccggagaccacggtgccctgcagcagctgttcgaggcgcgggtacttctcgaaggccaggtggaaggtctcatgcgaccagttggtcagaccccatacgccgtagccgtgggccttcaaatccgccagcagttcgaccatgcccggcagcgtgcggggcagcgcgtccgcgtagtggccgatgtagaacttgaagatgtcggcgagttcctggccttgttcgcgtaccacatccgggtagatgtccgcgaaatcctcgccggcgtccatgcggtcctcgtagtggaagaagccgcaggggtcgtcgtcggcgcagatgcgttccacgatttcatcggggaatcggccttcaaggcatgcgcgggtgttccagtccagcagcacgccgcagaagtcgaaaatcacgtcggtgatgggggagttggccatgatggttccttgtgtgtttgggtcgttgggtggggtctgcgatttagtgtacggggtttgtgtataggtcggggtatgtggagtttgaggcttatgtttctctccctccgtctcggctttgccgagacacctccctcgtcagagggaggtcaacaaggttatgcgatgacgtcggcgatggcttcggggatggcgtggatcacgtcgccggccacgattgggtggccgagcgtcatgaagcgctggcgatgctcgcggccgatcagttccggctcctgccagccctgctgctcggattcggaggcgatcgccgccgccaggccatgcaggtaggcggccgaggccacggtctcgcccgtggtggccacgtcatcctgctgggcgagtagggcgccggtcagaccggccagtacgtcgcccgcgccggcggtgcccagccaggccggcgcactgcccgacgcatagacatggtcctcatccaccacgatggtcaccgcgcccttcagcaatacggtggcaccggtgagctcgtgggcgcgcttcgcgctggccaacgggttcagccgcacgtcgtcggcggtgtacggctcgtgcgaatcggcatgctccgcggtgctggcggtggtttcgaaccggttgagcagtttcgccatctcgccggcatgtggcgtgatcaccacctggccgggcacacgctccggcagcaggtcgagtgcgccggcatccaccacgattggcggcatgtcgtaggcgtccttgttctcatcctcgctgccgagcgcgtaatgcttgagcaatgcggcgatggtgtcccgctgcatatcgccgtcggcgccctcgacgctagcctcgggcacgccggaccccacgacccaggactgcacatgtcccttgccgatcacggcttccggcagtgcggtgagcaccatgttctgcgcgcgctccgggcccagataccggaccatgccggtgttcgcgcgggcggcggcgccggtggtgagcacggcggcaccggggtagcgctgcgagccggtcaccagaccaaccacgccccgggaatatttggaatcctcgaaccgggggagacggaccgcgtcggacgcgaacgaattatccaccacctcgacgtccggatccttgtcgtcgatatcgaatccgaaatcgaacaactcgatacggccgcaggcgaacgtggcgggcggcagcaccgcgcacggcttcatcgcgccgaacgtgaccgtgaccgtggccggaatgtacgggccgggcagagaaccatcgttcacaccgacgccggatggcgtatccacagcaagtaccagcggaaaatcgcctgacgactcacggttcggcagggcgggctcatcgggagactcgccgtcgagaccaagggcggaggcgagcgcggcgggaatgccgcgtagcgagccttgaatgccgatgccggtcatcgcgtcgatgatcagatgcgatttcctggccacggcgatggcggtctgcaatcgctcaccggcctcaccggaggaaaacccggacgcgcagccgggaatatcggctgccgggtcaagcaccagcaccttgccgccggcgcgcacgagcgcggcgaatccggcctcatgcagcgaccggcccacggcgatggcagtgacgttcgcgccctcctgggccagcgcggcggccgcgaacagaccatcgccaccattgtctccggccccggccagcagcacgatcgacgtgtcctccagcgccagatcctcgtcgtccagcatgccggccgccatgtgggccgcggcctgggcggccatgcgcatcagcggcacgcctttgtccagcaggggtcgctccatggcccggaccgtatcggagtcataggcgctgtgcagcagcagttcgcgatgatcggcgtcttcggtgtattccatggcaacccctttcttgtgtttgttacttgcggcccgtgtttacaggccgtacacctcgtgggcgaacttttcgagcacggggatcgaacgcttgactttctcggtgtcgatgcagtaggccatgcggaagtatccgggcacgccgaagctgtcggacggcacgaggatcaggtcgtattccttggccttcatgcagaacgccacggcgtcgtcctctaacgccttggggaagatgtagaacgtgccgccggggcgcaccacgtcgaagccgatgccggtgagcgcatcgtagagcaggttcatgttcgtctcgtagacgttgaggtcggcggtctggtcgatgattttggctacgcccagctggatcgagctcggcgggcagttgtggccggtgccgcgcgagatttggcccatcatcggcacgagcaggtcggcgtcggtggctgcggggttcaccgcgacgtagccgatgcgttcgcccggcaggctcagcgacttcgaccacgagtagcaggtcagcgagttcgcatagaagctggccgggtagggctgggtggctccgtcgaacacgatttcgcggtaaggttcgtcgctgatcaggaagatgtcgtggccgtactcggcctgcttggcggtcaggatcgcggccagacgcttgagcgtgtccgccgaatacaccgcgccggacgggttgttcggggtgttgatgagcacggcctgcacgttcgggttgagcgcggcctcgaacgcctcgaagttgatccggaagttctcggtgtcggccggcacgatggtcagcttggcgccggtgcccttgacgtacggctggtattcggggaagtagggggcgaaggtgatgatctcgtcgcccggcttggtcaccgcgcgcatcgcgtgggacagcgcgcccgccgcgcccgtggtcgggaagatatggttgccggtgtatgccatgccgaaacgttcgttgaggttttcggcgatcgcgtccttgacggacgggatgccgagcgagggggagtagccgtggatggccgcaggatcgccgttttcgtagaggtcgaccatggcgtcggtgaaggatttcggagccggcaccgagggattgccaaggctgtaatcgaacacgttctggtagccgatttcggcaccgcggctcgtggcatactcgctcagcccgcgaatcacggacttgccgccaagcatggccttgtattcctcattgatcatggctgttctcctcgcatggttgtactggtatgcaccacgctactactatcgcggccggtttgcgccatttaccgcgccgtgcctaagtcggctgttctatttgttctattagttctatcagtggagtttgaaccggcatatacccttgcaataaagccatttgtagggtctggggctttccggggttgcttgtctcatagattttcggcctcttgatatttgcggttgatagctgtgatgtgtgtgggcgatggctgttgaggcatcatggggatcttttcgactgtccgccgtcgccatgccgccatgatgcctgcagaaagtcgagttgcgtatttccgccaagcagggtggtgaccggtgggggcgatcggtgggggtgaccgacacccgctataggcagcaggcagccgcacacatcccaatatctgtgggacggcagacgagtcaatcgtttgtcgtccgcgccgtccctcaagagcgcgggatggcagacaagtaaaccgtttaacgtccgtagcgtcccacaccgacgactgtagaaaccgcggaataacgccgattctcgctgcagctccatgattatgcacaaccgttcatagcgagcgctgtgggacggcgagcggaaaacggccgaatccgcgtgccgtcccacacctcgtacaatccgcgttttgggaaagcatcaccgtaaggctgacgcgcatccgcatccacagcaggagccttaccggccgtaatcccgcactcgattattttttctgacaggaaatcgaacccgaaacactaacccatgcccgccccaccgcaaacagcgaataaccaaaaaaatgcatgatctatccttggtgccgaataatgagagcctgactgtagtggctacgggtagctatatcggagaaggattcgatcagaagcgtttcgacacgcttctgcttgccgctccggtctcgtttgagggtactctctcgcaatatgtagggcgacttcatcgcgagaatgatggcaagaccgaggttcgtgtctatgattacatcgacgtgaccgtgcctttatccgctgtcatgtatcgaaaacggctgaaggcatacgcaaatcaaggatattcggtaaatcctgaccatactgagaaaatggacatgctcagtgcaaaggcggaagcgttgcgcgcttgcatgacggccgcgacgcagggcgaagatgctgcggatgcgttgctcgacacccggtctgacggattattcgaaggcagcatcgttacagccacgaattatgcagagatactccgcaaggatattgccggttgcgcacgttccctgattatctcggctgaatatgtatcacaacagggactcagcgcaattgacgatgaattgctccgactggccgacaggaaagcgctcatcgaagtttatgtccgtttgccggcgactgctgcggtggcaaccagaacacgaatagaacggaatattaatcggctgcgtgctattgggtgcattgtccggaccgtcgaatcgtgttccgattttgccataatcgatgacggattgatttggtttggaggcatccctttacttggcaatccaaggagtgacgactgtgcacttcgattcaaagatacgaaaatcggcgagaatctagcagatggactgaaacgacggtcgtcctgagtcaatattcagttaagataatcgcgcagtacgagggcgtgattgacgtgcgggtccttggcggcgtagagcagggtcacgtcgggatgctccgcgcagatgcggcgcagattgtccacggcggcattggcgtcgagttcggcgatgtaacgtatgcggaattccgcgaatttggcggggtcatggccgaaccatttgcgcaggaggggagagggggcgacgtccttcagccacaggtccaacgccgcacgctccttcgtcatgccgcgaggccacaggcgatccaccagcacccgatacccgtccgacgcagtcggctcttcatatatacgtttgattgcaatacccatacgccccatgattggcgtgcgcttgccggaagtcaaggggagacgcgatccatctacccgttcgatttctgggtgttctgtctaaggccttgtgctatgacagctagcgattcagcagcttttggtgatatcgtccaaccggaccgccttgcccctgtcgaaggtgttcatagtgagatcgacgggtttggtcttgatgaacgccgacagcgcggtgtgcggcgggttgccgatcaagtgggtgatggggcatcgcctcctcgacgctgacgcccacaatggcgtaaatggcacgcgccagcagcttcatcagtggcgaatcgaaactgttcaatgccccattgctgcgcacggcccaagggttgaacaacacatagcggatgcggcctccggtctgctgttggttttccgcgaagagcgctccccagcagatcgttcagacgactcgtacagatagtcgcgcaatgctagaacgtgattgatgtgcacccttcattgacggtctctcaattgatctcctgcgattcatgccgtataaggaagttctcgaccaaggcgatcatcgtgtccttccccgcaggtgcggacagcgcaatcatcagtgtcatcgccgccaaggcgttaccctccacaagcaggggagtcatcgtcgcccggtatactgttgccgttcaggaaatacacgaacagtgcggcggcacaacgtttattgccgtcggagaacgggtgatccttgacaacttgatacagcaggttcgcggctttctcccgggtggaacggtacagttcttcgcctccgaacgtctggtagagtcctgcgacgattccttggaacgaaccgttgcgttccctcccgaacagatcggattgcgtgtagaacggcatcgaccggatgaacagcatcgcgtcctcataggtcaagacccactgggactcgtcgcccttgggtatagggacattgcctgtgtcatagtcgttaagcagcacaagactcggcaaatatcgttccaagatctctgcggtgccagcaatttccggttcggtggacctcgatagcaccttgacgacggcgtgaagtgcgtcaagccgcttgcgattgatgatataaccatcaacgagatgctgcttcagaactgagttggcccatcgccgggaatagatgccttccttggatttgacgcggtatccgaccgacaggatcatatccaagttgtaatgctcgacttggtatgtcttaccgtcagatgcagttgtcgcaaattctgcgacaactgaaaatccattgagctcttccctcaatgcattgccgacatgcttgccgattgttttgatatcgcggccaaacagcaaggccaattgctttctgttaagccacaccgtatcctcgtccaccttcacatcgaggtgcacggtgtggtccgcgctttcgtactgccggttgagaaccgggtggcaggggcggccaccaccagtatagtcaccacaccggcgcacaggatgccggcgatggaggccacatccgaagcgatgtccgcacctgcggccggcagcagtgtgccggaagcgtagtcgaagcgcgcgatgtacaggatgtagagagcgaccgtcaccaccgtctgcaatgccacgtacacggcgtagataccaaacagggcaaggattttcgcattgatgatcgtggcgcggtccagatccttgtacaggaacatgcggccggaggccacgggcgtatagatggcaccagccaccagataggccatgaccaccatcggcagcatcaagcatgttctgtacgacgaactcgccagcgaggaaatccagcacactcaccgaaccggtctttccgctgactttcatgaaatcggagttgaacaggttcacggccggcagaatcagtatgaatgacggcggccggatccaaagccgcgaccgccgcacgtttcgcgacaccgagcggccggccaagctcgataaccgtgatccgcttctgttcgccggcgaattcgtccgcaagccggccgcctttgatgaacaggaatcgcccgcacaactcctgcaattcgttgagctgatggctggagatgagcatggcgatgctgcggtcgcggtacggccaaagtcccacaagttcaagcaccgggcggattgggaggcgcgagcggtgggtcggacgattacagtgtgagccgaatacgttcatgaatcatcgaatcacaaggcgaggcggcccgcaagtattcgagagtcgccagttcggtcgatttcaatgacaatggtgtggacgattacgcggatatcgtggcgggtgcgcgcaaggacgccgaaaaccatccggcttacgattccggctactatcagggcggctatccgccggccgattgcggggcgtgcaccgtacgtgattcacaacatggcgcagcggcagcgcgaaaacgactacttcgccttcaagaagtacatgacggtcaccgggcactaccgtttcgacgcttcgaaagtgctgtagagcgtactcagggcttggcggtgacggtcggagcggcgtcggcattgccggctttggctccggctgcatcagctgaatcggtgccggccgcactggcgttagcactatcgtcagcgttggcaccgccggctttggccttggcgtcagccgcgctcccgccatcgatcaccagtcgcagataatcgcggtcggcggacttgcggcgcggcacgaaccgactgatgatggagtttttcttgccgcggttcttcacgtacaggaagccgaacacggagaacacgaccgcgccgatgaagttgacgataagatcctccatcgtgtcgatcagaccgatgtcgaggtagccgccgaggcccaagtcttggccattgaccgtgacctgggtgatgtcgttgatgcgaatcgcatggttggtgtgcgtggggtcgagcatcaccgagctgatggaatgcacgatggcgtctttctgcatgtcgaatccgaacaactggtccatgccgaattcgaagaactcccagatcacgccgatggtcatggagaagcagaaggagacgatcgccagatacaggggcgaaagctcgaacttcacccggtcggaccggttgagcaggtcgaccagcgagaagccgatcgccgcggcgaggaagccgttcatcgtgtgcaacaccgtgtcccagaacgggaagatctcatagaacgaactgatctcgccaagaatctcggacgagaacacgaacaccagcacgatgacttccagcgccgaaggcagctcgatgcggaactgcacctggatgaacgccggcgccaacagcaacagcaacgtcaggatgcacaggaacacattttcgtagtcgccgttaaagaactggagtattgccatggcgagcaccagcatgcgcagcaccacatagaccgcgaatgagcttttgtgttcgcggatttccatgtctacggctcggctcatggtcttccagcgtacgcgccaggacggtttgcgttgtgcgtcgtgctgttgtgaccgtttccgggtcattcttgcctctttctcgcattgttctcgcgccagtctatccgaacctgcttacaggcaatcggcaagaacgggcgatagtctggccgcatgaaccgaatggaaaccgatgctgcctcgattgtggaccgcacgaatcatgcggcgatgctcgataggacattgtgccggcggcacgccaccgcgtgtgctgattgcagtgctcgccgtgctgctgtaccgccgtatgggcatgattacaccgctgatcgtggctcatggcatgtatgacgtctccgccgccatgaccaatctgaccggaatcgccggctcctcatggtcactggtcgtagggctggcaatcatggccatgccggtggtttgggctatcgtgaggtgtgcgagataggctttgtaccggttggcagcaaatcaaaccagcgagacaacggaatgaacgaagcgaaaggaacggtatctgatgactccgattgaattgtcaacccgacgccgggttacgggactgacttcggatgagttcgccaggctgttcgtctctttgcaacgcgatgtggacggcgaagccgcgcattggagcgccacggacgtcgaatcctgggagctggtcggcccgccggtgaccgccgaacagcatcttatcgacacgttcgccgcggccaacgaattcgtggccacgcttgcggaccgtctgtaccacacgatcatgccagtcacggaagaatcggtcatcaccgcatacgctgatgacctcacattctgggcatcgcatccggaccttggcggagtgccgtgcgcattatggaacatcgccgcactgcaggcggccgaatgggcccgcaaggaaaccggcatcgcctgtgaactagacgtgcgcgaaccgctggtgtgacagctgagctcaaacatgggcgtaggtaacggcatggtttgaggactatggtgttgcgttaccggtcggaaaggatatgatggtgggacgtcatagcaaaaaagcgcgtggacagtcgaggagacatgcgcgaaagccctccgtttggagtgaaattcgcggctatctgctgacggtgatcgcggtgatgctggtcgtgttgctgggacgcaccttcgtgttcaacgtctatgtgattccatcccgtagcatggaagacacgttgcaaatcggcgaccgcgtatttgcctcgcgattgactccgagactctttgcactgcaccgtggcgacatcatcgtgttcaaagatcccgcagactggatggagggggagcagcttcccaccaatctgatgtcgataatcgacagcaatcgttacctaatcaaacgtgtcatcggtctgcccggcgataccgtcgcctgcaagggatccggggagcccatcacggtcaacggcaaacccattgatgaaagcgcttatcttaagtccggcgtgaatccaagcgacagtcctttttccgtaaccgttactgacggcaacgtgttcgtgcttggtgataatcgctccaattccagagattctcgataccatcttgacgacggcaacaatgggctagtgccatacgacgatatccaaggtgtggcgttgttccgcttctggccatttacgagaatcggcttgctcaattgagtttggcgtgaatacgcaagttgacatgtgtcgcacggcccggtgcatcctgcagtcggaccgtttccggaaccctccccccgaaatctgacgaccccctgtctcacagctatcgtacagctccgatacgggaaacgtgcgggtgattccataacgactacgtacttcaggaagtgacgtgtatcacattatggtcatgtgttcagtgccgcagataggcgaagtttattcatgagccgaatagggccggtgaagcgggctctcactgcgttcataatacggcatatcgtgaacggcgttatcatcacagtcaggccgaattaaaggaggctcggtcatggtcgccgcatccacggcattcagcccgtcaagcacgatgacggccagtttggtggaatcgactggcctgcccagtgccgctattcctgtgcacgaggatggtaacaacggcaacggcgacagtagtgccgatggcagcggcgacgacggcggcatggtcagatcgctgagcctgtggaactacttcaccatgggattcggcgcaatcatcggcaccgtatgggtgctgctggtcggtgactggatgatcgtcggcggtggcccggtcgaggcgatgatcgccttcgtgctgggcgccgtgtttctgctgccgatcggctcgacgtccggcgcggttaccatggtcgggtcgtttctgcccggagtgctggtgatgacgccgctcttctacaccggtttcgacacgattccgcagagtgccgaagaggcaagcgaaggccttgactggaagaagttcggtatggtcatctcagcttcgctgctggccgccggcttaatcatcattggcctgcaggtgctgccgttctccccggccgcgctcaaacccacatcatgggcaatcgtggcggtgtggatttgctgggtctggcattgcgttggatcagtgcacgttcacggcgcgaatagcggtgcgccggtaggtcgcgagccgttcagtcgcgcgcgacccaaagcgtatcgaggtcgtcggcctcggtcgcctttttgcgcttgcgtacccactgttgcaggaaatacgccccatagcaggccacgatgaacacgagctcggccacgagcgcgaaccgttgctccacgtcgaaaatcaccaatacgaacgatgcggtgcacaggatgaacgccgcccaagacacgtacggatagccgggcgtgcggtatttgagttcgctggtggaatggccggactccagccaacggcgacggaacacgatctggcagtaggcgatggcgatccacaccaccacggcggacaggccggaaagcgccaccagcaccaggtacacagtcgaggcggcgatcacggaagacaggagcgccagcaggccaccggccatcgcggcgcacaaggcgagcatcggcacgccgcgacggttcgttttggcgaaccagcgcggaatcatgccttcgttgcccatcgaccacaccatgcgtgtggaggcgtacaggccggaattcgaggcggaaagcacggccgtcagcaccacgaaattcatgatgtcgcccgcataggggatgccgatgctgttgaagacgagcacgaacgggctttcgcccacgccggcctggcgccacgggatcagcgcgcacatcacggtgatcgagccgatgaagaagagcaccagacgccacagggtggtgtggatggctttcggcacggcggtttgtgggtccctcgtctcaccggcggtcacgccgatgagttcggtgccggagaacgcgaagttgacggtcagaatcgtggcgaacaccggcatgaagccgttggggaagacgccgtccttgatgagattgccgaacatcggggcatgttggtagccggcgaccgggatgacgccgaagatggcgagcgatccgatgacgatgaacgcgcagatggcgaacaccttgatggaggcgaaccagaactccgcctcggcgaagaaacgcaccgacaaggcgttcagggtgaagatgagtgtgatgcacgccgcgctccacgcccatgtgggactgttcgggaaccagcgctgcatgagcagcccggcggcggtgaactcggatccgagcgccaccgtccatgtgagccagtactggatcgcgatcacgaagccggtgccagggccgatgaacttctcggcatacacatggaaggagccggtcaccggcatggccacggacagttcgccgagcgtgagcatgaccaggtagacgatcagcgcgccgatgccatacgccagaatggtgccgatggggcccgcctgctggatggtgtatccggagctcaggaacaggccggtgccgatcacgccgcccaacgagatcatctgcaggtggcgggattccatgccgcgcttcaggttggtatgtagggcgtgctcgtctttgccatcatgtgacgactcggactggctggtttgcgctggttggttcatctgttccgaatggcttcgacggccatccgtctgaatctgcggttcctgttgcgaggacggcgattgtgccgccgtgtcggtgtcgggctgactcatgtttctctctttgccatgcgtgcgttccataggcgtcgtcgtgacggcccggaatagtatacccgcactgaggatatagctgcgctgcatgatgctgagtcaaaatcagcttcaaggggctgatttggcgtttgccggaggtctacttccgtttcaaggggctggtcaactggcggaacgcagatagaaatggcattgttctatcactattccgccgtttttaaccagtggctactttggcatcagccccttgaaacggaagtagatgttccgcaaagtcaaaatcagccccttgaaacggagataggcactcgcagcggctacttcaccttctggatacgcagcacgaacacggcagcgcacacggccatgacgatggagatggcgaacgccggcgtgtaggtgccggtcgtggtcttgaccacggaggtgatggtggggccgactgcttggccgagcgtggtggccaagctgaggatgccgaggtccttgtcggcctcttccttgttcggcaacacgtcgacgttgagtgcctggtcgatggccgagtacacgccatagccgaagccggcgatgcccgcgtacaggtacatgcccgtgacactcggcatgatccacggcatcacggcgccaatcgcgaacagcagcgaggcgatgatgaccggtaccttgcgcgtgtgcatcttgtcggagatcgggctggagatcagcgaagcggtcagggaaacgaccagggtgatgacggacatggtggcgatggtgccggcagcctcggtcttggtctggtgcacgtaatcctcgacgatgtagagctggtacacggagatcatctgggagctgagcaacatgcatactcggcagccgaacgccttgtagaagtcacgcgaggtggagaacttcgggaagtggaaggagacagcgagatccttgagcgtcatcttggtgcgttccatgtcctttgaggattcctcgcgaggtcagatggcaagcgccacgaatccggaagccagcatgatcacggcgccgatgatgaagccggcttgcgcattgttgatcatgcgagagccgatcatggtgccgatgggctggccggcgaccatgccgccgccgtagaaagaggagacggtgcctcacgattcgccgcacccatcagccgcagtcgtgccggcctacagatacatgacctacgcagattgcagccagctggtgcaaggcgggaatgtgaagtcattgtgcgtttgcttcgcgaagccgcgcaatgccggattcaaagcagctgctcatcattgctatggatgcgggactgaatggtcacttctcttggaccgccggtctcactgggagctagcgcgtcaccgtcgttgttccagaagcgcaatgcgccttgtcgggtctcatcgttgacggatagcaagagatctccctcaaatagtgtgcgtgctgtgcgatgctccgaacgagcatcttgatgttctgcacgaagcatgaggttcctgccccaacgatccggcatgcagtcttgaaagatgcgatgcatcgcattatgctcggccgggaacgttccgggggagaggggcatctctggacagagggatactgcgtttgaagagcgcatataggccgtatcgtatgtgaaatttgccgattcgatgccgcgcttgatattggtgaataatttcccgacggtgacgtctgtgccgttgagctgcagggtgacgattgcttccatgatgtgttgcgcctcctgctgtgctatcgaatacgtttcggagtgtcttcgtcggcgcgtagtttgccgatatctgtgttaagagggtccgtcgcttgctgtacgccgcccagcagtccaagcagacgagcaatgcggaggaagttctcaaagctgccattacccgtacgcagcattttggtgaccgttggcacggataatccagcccgctcggccagcaaggctacgggaatgcgctgttgtctgcgcgccaaatcgaggttggcggatatctgacgcatcgcccgactgaccgggattggtgtgcgtgtcggcatattggcacctcctatcccaaattttaacataaataattctttagcttatagttacatagctaaagaattatttatgtaaatttgtatggactagccttatgcggaggttacgccaatatacgacaagaacgaaccaacgtcagcccggaatcttctcgatgatggtgttcaaggtgtcgaaagcctcatcgatttggtccactacctgcttgccctggttgaccatttcggtgatctgttctgtgtggggttgcggcagcgcataaatcgacgtcttgacgcgcttcaagaccacgccggcgtcggacagatcctgcttgatggaggcgattttgggaatggacagcgtgccgtcggagaagttcatgccggacagcagctcttcgatattgaagtccaccaacgtgccctgcgcggcactgtcgattttgggcagggcgttggtcgcggcgtcggcggccgcgcccagcatgccgtgcaccgctttcacgtccgaaccgtaatatggcacgtattcggcggcctgccatagcgcgccctgggtttcgtcgtgcgccgtgacgatgtgactgccagcgctgtccatctgctcaagcgcctgcttgaagtcgccctgcccgacggattgctgtgcttcagccgcatattcgcccgcctgctgcgcctcgccgatcacccgttgtaccgactgccagaatagccagccggaaacgcccaccgtcagcagaatagcgaccagtattgcaataacaacagtgccgatatgtttgcgcttagccataggaccaatgtacctgccactctgaccagtattatttacggattagcatcgtggcctgggcctcattctggctcatcggtatgttattggcgatgcgtagcggtggttatgcaagtgtcttttgattgatatcggcgcatgacaggtgaataacgtgtagcgggaaagcacgtctatggtcatattggcgttctcggcacagcaataaccgcggtatttttaaggtttgccaattcttccatctggtatgtgccgaacatggtgctgtcatgcgattgcttgacggcatattgcctggcttgaacgatacatcccattatcgattgcggttgacgttgcgtaaacgtctatcctgacggcaacgccgcgaaacacgcacggcgggtagaggataatcggcttcaagggggatgatcgatcatgaacgagaacgacaacacggcgaacgccgtcaacggttccggcgcgttcgatgtggagggcaatccgctggatacgggccggttgtggcccattgatcaggcggcattgatcagcggcgtgacgacgcgcacgttgcgctactgcgacgagaccggtctggtcaagaccgcccgcacccgggcggcacagaatcaaaccgcgaccgtgatgaacgccatgccgctgtccggctcgttcggggccattcgctccgcgctggtcggcgatccgcgtttcgccgacccgtgtggtgaggcgctctacggcagcaaggcatgcgccgacttcgtcaacgaagccaagaacatccacgcacggcaaatcgccgaacggttcgcggcggaacaggatgtacggaatcagccgaaatgacagggcgtccggctccgattgcgcgacgaaccctgcgaccacgtcaccggcttaatcatccaagctgcgcgaagcggcgcaaaagatgatgagtcggcataagcggcgtagggttcagtctgcgtgttttgcacagtgagttacaggtcctgaacgttcatacgggccagctcggcgcgacgattgatcttgtcacgctgatacaagtagatgccggccagcacgatggtggatacgttgttggacaggaacgcgatgaatgcggaaagcacgacgttccacatgttgccatacgcaccgatgtccgccctggcgaagacggtaatcgccgccacaagcgacagcagcaatgtgatggcgggcaataccagaccgggccacttgctgtccatcttcgaaagcctgatctgcaatatgatgaagccgatgcagatggcgatgagaaacacgaaaaacactacggcaaatattgtggcgccaatcatgattactctccttgcttgagctgcttgcgatattcgctgatgaggattttggcggtgtcgaagtcgagcttgtcgtcgaccgcgagccgtttgatgagcgcgatatacggctcgttctcgatctgctcgcccaacttgattttctggatgagccggtcgagccgaagccgaacggtggggtaggagacgttgtactgcgcggcgacctccttcatggagcctgatgcgagcagaaaccgtttgatgaacgtcatatcctcgtcatcgaggttcgacatccacggcgggatcatcgtcgtatccatacctgcctccttcaattcacggcgggtttaataaaattaagtataccataaataatattaaaatcaaatagatatctgtttaaagtttttcgtagattagtttgaggtcgtgatgtaagaatgcgtacgcggacgcgaaggaccggcacatgtcggcacgcatgtagaagcatcggtcaatcggatatgcatcgacagcaccctaaggcattgacggatagccgattcctgtcatgcgatcgcttgacagcatgttgtctgattgactctttgagtgccataattgagatggcatgcgtacgcgtcggactttatggaatgcggggacgatatggttgcggacgatgaggtgcgggcctcccatggtgggcgtcggaatcaaggtctgctgtggtttttcggcgcttccgccacattgggcgtggccgccgtcacggccatcacgtgcgccgtcatccggtacggctggaatgacggggagttctggaagctggtggtgccggcggccgtggcgttggtggcggccatcgtgtgggcggcgctcggcttcatgcgtcgcgccgggcggacgcctgacgttccggccgacgcgaacgataccagcccggccgaatccaggttcgattcggcggccgcccagattctggcgatcgtcgccatcaacgtgtggggcgtcatgttcatcgtcttcgatacgttccagattgacccgtggcggtacgtgacatgggtcgtgcccgtgatgttcctgctttatctggcggtcttgggcatcggcagggcttgtttccgcaaacgacagaaggatattcgcttcccggaggaaccaagtatgacgagcagccgtccatcatacttggcataggcgggcagttggacgatgccgggcaggtcctcgttgtcgctggtctggttgagggcatattgggtgccggtcatggaacgctactggaatctgtcaccctagggtgtcactttccgtgtttacctcgacctgccatgcccctggcgcgaaggttgagaaaaacggcgtcaactttcacgacagggggctacctcatgacttggcaaaatgccggcacaccgattcaggcgctcggactggtgaaacggacagggttcgatgctcgaaccgcctcccgacccgcaaacacgcagactgttctcaataatgtttcgttggatattgatggagcgggcttgacggcgatcgtcggtccgtccggcgcaggcaagacctcgctgctgtatgtgctgtccggattggacaggcccgattccgggcgggtgaccatcggcggtaccgacgtctacgcactgaatgaggaacggcgttcgcggttcattcgcgggcatatcggtttcgtgttccagcaatacaatctcgtgccgtatctgacggtcgaggagaacgtgatgttgccgctctcgctcgcccatcgcaaggccgactacgtgcaggtcacgcagctgctgtcccggttcggtcttcgccagagggcgaagacgacggtaagcgccctgtccggtggcgaacagcagcgcgtcgccctgtgccgtgcgctgctcatgcgtccggcggtggtgttcgccgacgagccgaccggcgcgctcgacaccgcgaacagcgagcttgtgctgcaggtgctgcgcgagctggcggatgcgggctccagcgtggtcatggtcacgcatgacacggatgccgccgctttggccgaccacgtgatcttcctgcgcgacggtcaggtcacccacatcgctggcagactcaccgccgagcagattgccgatggcatacgccgcactttcgtaccggccgggtcgccgccgttggttgcggcggcgcggtctgtcggcccgatgatggtgaacgcccagcctatccaatccgtccaaccgggccgaccggtccagcgcgtggcgtatccgcagcagcggaaggaggctcatcgtggctaggtatgtgctgcgtgtgttccgcgacaatgtcacgggatgggtacccacgattctggtggtcgcagtggtgaccacgctggtgggcatatgcatgaaccaattcgtgtggacctcgtctccgtcgttcacattggccgcgcggcaggcgggtcttgatccggccgagttcggcatggtgtcggtcacgatctatgtggtggtgtcattactcgcgttcttctcgttgacggtggtcggctcggccacggtcaaccgtattcacagcacgttcgcgcaatggcggcttatgggcgccagcccgagtcaggtgcttgccagcatgtggatgctcgtgggtgtggcgagcctgttcggttccctgatcggctctctggctgcagtgccggccagcctgctggcggttcccgagttcaacgccatggctgcggaaagcttcgccgatggattcggctcgttcgcacctcctgcgttcacgccgtcgatggccgcgtggctcggatccctgctgttgggtgtggccacgtgcatgttgggcgcgtccatcccctcgctgcgcgcagcgaagatccgtcccatcgaggtgattcgcggcacgggagccatcgggatacggcacggttggcggtcttgggcgcactgggcacttggtttgattgtcatggcggcggcgctggcattggcgttctccggcatgggcacgccacgggcgctcgcgttcggccaggaggcggggcagacattcaacagcgcgctgtgggccggcatcatcgcctcgttcggcatgtacatccttgtcagcatgctgattccgattctgttgggcatcggacgtgtcgtgtgtcgcctgtgcgggtccgcgaccggtgtgctcgccgcccgttccgccgaggcgaaggccgccagcaacacgaacacgattgccccgctcgcccttgccatgggactgtcggtcaccctgctgacctgcgcgcgatcctatggccggatactcgccttgggcggccatccgaagagcctgaactacgcggactcgctgctgctcataacgatgctgtgcatcgtgtccctggccaccagcatggcggtcatcgccctgtcgaaccgcagcatggtcgccgaccaggcattgctgcgcagcatcggcctgtccccacgtcgtgtgatccgcatgtatctctggcagagcctgcagctggccgccggcgcggtcattctctcgctcatcccggtcgccgtcagcgcaagcgttttcgccgcaagatccgcggcgctcgtcggcatccccgtggccgaaatcccatggccgggcgtaatcggcatgggcacggcctgctggctggcattgttcctcatccagttcacgcagattcgccccgcgctacaccgcagcgtggccgacacgatacgcacatgctgacatgcacgcaacatcatacaaaaagagccacaatgggagccatgaaaccgcaatccgcgcaggccaataaggtcacggtcctggccgtgccactggtcatcgccgtggtcgaatgtgcagcgatgctgtgggagcatgcgatcggagcgccggccgacaccatgtatacgtttgccaaagatccgctgggattggctctgctgctggcgatgaccatagccagcagtgcgatactgcttgtccgttactggctgccagccgttgccttggcgcttgaagcggtattgttaatagttgcctcgtactggcggttggactcaatcgtgatgattcagacgctcgtcgcctgctatgcgttcgcccggacagcgaggggacgcgggctgtgcgttggaggcatcggcatgatgctgtcgatgaccgcgtcggccatcatggtgcattcggacgttctcgcgaccgaatgggtgagtcgagtggtaacgttggcagccgtgggaggcggcgcgcttgcagtacgtggcaggcaacaggccaaggaagccgaacacaaagctgccgaggaatgccgtcgggcagccgagctggccttccaacgcgatgccgcaatacgccgttcgcgcatagccggtcaactacacgacagtgtgggccaggatctgaccgtaatcatcgcactgtctgagggtctggccggcaaaaccgatgacccacgcgtggaggatgcgctgcacggcatcaacgaaatcgcacgagagagtctgggcgacacgcgcaaagccgtccgcgcactgaccgagttcgatggagcggcgaacggtgacgatacgcacacccaagaatcagaccagcattcatgggatgacattcggccgattctcgcgcacgcacgccggctgggcatcgtcacggtgttcaccgagactggtacgcgcgccgatgacgaagctcaggctgatttgtgtttcgatgtgactcgcgaagccatcaccaacgccatacgtcacggacagaacgtggtgcatatcagcatcgcctggaaccacagcgagaacggcaccgtcgccgtgattatccgcaatgacggcagtcccgcgcgcaaggacgcgcgcaaggatgacggtactgggctcgtccgtctattccaccgcgtcgaatcggcaagcggcatcttcgaatacggtccaaacgaagacggcgaatgggtcgtcgaggcgaccatcccgtccaacggagtgaacgaaaaggaccacaccgcatgattcgtataatgctcgtagacgaccagcgtttcgcgcgacttggcttccaactcatgcttgacgatgcttccgacatcgtcgtcactgcccagtccgctgacggccgatccgccatcgagacgctcgaacagctcgccgttcagcatcgtccattgccgaatgtaatcctcatggatgtgcggatgcccggtatggacggcatcgaagccactcgccgcatcaccagacgctggcccaccatcagcattctcatccttaccacgtacgacgaggacgattacgcctttggcggtctcgacgccggagccagcggcttcctgctcaaggacgtcaccaagcacaacctcatcgacgcggttcacgccatcgccaacggtgacgcaatactcaccccacgaatcaccagacaagtgcttgaacgaggcgttccgcatcccaccagcagccagcgccagcaagaaatgcgcaaagctttcgacgcactcacccctcgccagcgtgaaatctgcgcactcatctccgaagggctcatcaacgaggaaatcgccaatcaactcaccgtcgaacctgcctccgtcaaacgtgccgtgacccgtatcctcgcaactttgggcctgcgcaatcgcactcaaatcgccatcggctggttcaaagcaggcatgtagacctgctatttgctcagcagctcattcaagcggattgttgttacgaatgcgactaccgcacgcccccccccaagacggattccatgttcgacaccccattcggcaaggtgggcttggcggattttagtggtggttgcaacacctgtgtgttttgccgctcttgatggcggtcttggattggtgcgatcgtatcatgctgtgttgatgagttcgagtattttctcggatggtttcctgtagccgagtgttttgcggggccggtcgttgagttcctcggcgaccgcgtcgaggtagtcctcggggtatgcgctcaggtcggtgcccttggggaagtattggcgcaggagcccgttggtgttctcgttggtgccgcgctgccagggtgaatgcgggtcgcggaaatacacctgcatgtccagcgtggtcgagatgcgtttgtgcagggtgagctcgcttccctggtcccaggtcagcgagttcctcaggagcttgggcaggtattgcattttccggatgacggcctgccggacgtgtttggcgtcgtgcccgtcgggcaggtgcaggaggatcgtgaaccgtgtcgagcgttccacgagcgtgccgatcgcgcttttgttggccgcgctgcagatcaggtcgccttcccaatgaccgggtatcgcccggtcctcgacttcggcgggccgctcgctgatcatgatcatgggctcgcggaaacgggcctgcgcgaacccgcctgcccgtgcggccggcgttgggcgcgcccgctcctcagggccttgatgacgtcctttttcagttcgcctttggcctggacgtagatggcctggtagatcgtctccgcgcacacatgcatagcatcattatccgggaaatcggcgcgcaggtgccccgcgatctgctcgggactccaatgcgcccgcaatcctgcacgaatgtatgcgagcaggccgggcaccgtatggatcttcgcgggcttgggtcgtctgggccgtccgcgctcatctgctggggccggtacggctcgtacatgccggtcgcgggattcgtgttgcgcaccagctcgcggctggcggtcgacgcgagacgattgagcgtgcgcgcgatcccgcgcacgctcatgccggccttccgccagtcggcgatgctgatgcgctcgtcctggctcagatacctcgaactgatcttttggggaatgtccacggtggaacgataccagtccaccgatggcttctcgttcctgccgttcgatcgtgtccttccgttgcgccacaccttgccggtgcgtttggacacgcccaccgcccgcgcggcctgcgtgaagttcatgcccgcctccagcagctcggcgtagcggcgccgccgcgccgcgcacatctcgccacgcgtcgcgtactccacgccctcgaacacccacctgtccacctggccctcccatcagtcagccaggcgttgcgacgatcactggaacccgcccttcgccattttttttgggggggggagagagaccggtggcggcaagtgtgcgatgggagtcggatgcatcgtccttgcggatgatgcgcaggttcattcctttggccgatggatagtttcggcgaatcgagggagcatggagctaccgtcatgcgattggcctgacatgttgttgcgtttgcggccgctgaagggtgcaatagcggcgacattgcaacgcgcgggtctgggcaaggcatcctgcctttgccttcaggcccgcctttcgtgaagggtgattatgccagttatatcggctacgaatctctcgatcgggtacaagggttccccaatcgtcagcaacattaacctgcggttgagcacgggtaggattatctgtctgcttggggcaaacggcgcgggcaaaaccacgttgatgaagacgctactcggacggataaagcccgtgagcggagaggtcacgtacacagggacgaatatcaatgagatgtccgcggcgatagaccatcccagtttctttccttacctgagtggtagagagaacgtcgaggtggtctccgcgttctggggtctggatgtggacccggaggcggcgttggacggtgtgggcatcaatcgcgcggtgtatgggcggaaggcgaaggactactcgacgggcatgaaagagcgtctggagctgtgcctcgcccttgtgccgcatccgaggttcctgttcctcgacgagccgcagaacggtctggaccccgatggcatagcctccttgtccgaaacgcttcgcgcctaccgggacaaggggaactgcgtcgtcatctccacgcatctgcttcatgagatccagggcgtcccggacgagtgcatcatgattcgtcacggccgggccgtgcaggtcacggatctgaccggggtgaacctcgcggatctgtatcaggggaggtagggtcttgaacgccgtttcccctgttcgcgcgttggtcgcctactactggaacacgtggtatttcctcgccgcggtgtttggggccgtctcgtcccttctgctgggtgcgtggatctcaagcgcggcgaacggaaccccgataaccggagggtattgcgtctatttcaccgccacccagccgttgatctgtctttcgctgctcttcgcatgcgatgccagggtcgcgaaggcgtactacggtggcctgccgcgccacgtgtattccgcgtggacgccatgctcgctcagggccgtgttccgggccctgatcctgacctccgtgaacctgattggcgtactgtgcttcgacgccatcatggtcctgacgggtaccggaatgcacccgcatctggcagctgtcctgtgcttcgtcgtgctgcagagccttgcgacctccctgatctactcgatcgtcgagatcgccgccgatcccagaaccgccggaatcgtctcggccatcctttgctatgcatggattctcctgccgggcgaccttcccgactatgcgacgccctacgtcgcgaacgccctacggaccgtcgggctgaacctgaacggcaccgtgatgtcgccggcggaagcggcgagtcgagcgtccgtcggccccgtgatggtcgtcgtcccgatcgtggtgcttttggttgcctatgtgctgttgagccggttccgtcgcgaaggagtggagaggaaatgaagtccctattgcgtattgagcgtgtggcggtgatccgctggtcgacgctcgccttcgtggccgtgctgctgtttccgttgttctttttgcgttacgggaacacgggtgcggtggtgcagtcggcgatggtgatggcgcttcccgtaaccgcggccggtctcgtcttctcccatgcgagggtgccctcctcgtaccgttccttcagcatccacgaccggctcctgcttcgcttcagcgtgaagtcgctgtcgctcggcgtcgtgatcaacgtctgcctgactttgctgtacgggcttgccgtcgggctcgtcgtcaacgagccgctttcgtcgcgtaccattctgatgcttgcgttcaccgccgtcgtcctttccctggcatgcttcgttctgcgactctatgccagtcctctcgtcgcctggaacgtcgtcgccttcttcatcgtcgccggacttacggtgagttccggcatgttcgaggacgcgccgatgctgtacgccgtcataccaaccacatgggtgttgaacggggtgaaattcgccggttacgtgattccggtcggcgtcgccatcgccgcgataagcgcatgtctgctgttcaaggcggtgaaacgtgtctgaccgaagccgtatacgggtgcactgtttcggatcgtaatcgtccggcagccagctttctcaccgtattccgttgcgggagtgagcctgccgctttccgctgatcccgccatacaaagtcgactccgcacgtcgcgagtcttcgccgaacactatcattggtggcgcagaggtcgtgtgggaatggccgtgacaggggaggggtattgggcaagcttcgggcgccgcgttcggcgcgtggccgtgtgatggcggcggccggcatggtgatggtggggtcgttgggtatccagacgtcgtcgtccctgtcggcgtcgttgttcggcgcgttgggaccaattccggtcagttcgatgcgcatgctggtcgccgcgatcgtcattctcgcactcacccgcccgaaactggctggccggtcgaaaggcgaatggctgggcatcgtaatctacgggcttgcgatggcggcgatgaacgtctgcctgtactcggccatcgaccgcattccgatgggcgtggccgtcaccctggaattcctcggaccctgcgtggtcgccctggccggttcgcatcactggcgcgagggcctgtgcgcggtggtcgcgctggtgggtgtgggcttgatctcgtttacgccgggcggctacttcaatccggccggctacctgttcgcgctgggctcggccgtgtgcttcggcctgtacacgctcttcgccgaccgggtcggcaaggcaggcaccgggctcgacgggctcgccctgtcggtcacggttgcggcgctggccacttcgccggtatccatcactcgcgcgccgcatgtgtcggccgcccagtggggcgtcatcgcagcctcggcggtgctgggagttgcgattccctacacgatggacacgttgtccgggcgtatcacgtcggcgcgcgtggtcggcacgctgttctccatcgaccccgccatgagcgtgattatcgccgcgctgatattgcgacagaccatcaccgcggtggccgtgatcggcgtcatcgtcgtctccctcgcgggtgccctgctggtgtggtcatccggcggcgatgccgtaaacggatgattcttgtcatacgattgcttgacagcatgttgtgaatgcttgagccccgctcataccattcaaatataatggtttttcgcatgattcgttagcgttgacggatcccccaataaggaggtaatcatgtcagatcctcgcgttgaaggcggaagattgtcggtcgcgcccgaggccgtatatacgggtgctctggtgatgttcttcagcaatctcgctatgccggacaccgatccgcagggcaggcccatagtgctgtggttcaacggtatcatcgccgtctgcgccctgatctggggattggcggagacgatgcgcgtccgtaaggaatacccgtggcggtgggcgcgcacgctgttctacgacgtcctgattctcgtcgggctgctcatccgtaattccgattggacccggctcgtcgtgctggtcgcactggtgctatacgcgattgttacggagaaaacggcggcggaaccgcgccggtcctgactgcaagacgatgctgaaccgtcagcgtcacaggattctcgcggtatgcgcacggtggtcgacatcgacacggccgccggcagcgggcgcatgattatttcacgtcgcagacggtgaaggcgaagctggtgagggtgccggtggatttgccgtcggcgaggagctgattgatgtcgggcaggtccttgttgtcgctggtctggttgagggcgtattgggtgccgtcgggcgcggtgaagcgcatgacgggatcgcctttgctgttgtgcgtgcagctgacggtgccgtggtcgacggtgaggggccatgtgtggccgagttggtcggcgctgatgtcctgtgggttgctggtcgcggtgattttcttgctgccgttggtagggtagttttcggggtgttcgatgccgtccatgcaggcggtcagtcccagggccatgatggcggcgaggccggtggcggtgatggtttggatggcgtgtgtcgtgttggtcatgctggtttcctttgtcgtgttcggtggtggtcggggtgcttgttcgtctgccgtcaatgctggtcggggtgttcctcgatgaggaccatgtagccgtcctccaatgtggggtccatgggatgcgcgtcggcgggcggggtgtcggtgatgacgcggtagcgtacgccgcgtgcggtggtgacggcgttggcgacgatcatgccggccggtggcggggtgttggatggctgggtgagccagacacggcccgtggcgtgttcggtgaggtgttcggtcggcccgtcgtagcggatgcggccttggcgcaggacgaacacgtatgggcaagtctgggcgatgtcgtcgaggatgtgggtggacaggatcacggtgcggtcgccgccgaggccggcgagcagcgtgcggaaacgcatgcgttcctcggggtcgagtccggcggtgggttcgtccacgatgatgagccggggatccgccatgagggcctgggcgatgccgacgcggcggcgcatgcctccggagaagccgccgatgcgccggtcggccacgtccgtgagcccgacccgttcgatgagctcgtgcgcctggcgcatgcgctttcgcgtgtcgtcgatgcctttgaggacgcccacgtagtcgaggaattcgagcggggtgagctgcgggtagggttcgatgtcctgcggcaggtagccgagcgtgcgtttgagcgcacggcgggtcctctcgtccttcagatcgtggccgtccatgagtacctggcccgatgtggggcggatgatgccggcgaggatgcgcatgagcgtggtcttgcctgcgccgttcggcccgatcagaccgaccatgccgtgcggcaggtcgcaggtcacgtcgtccagcgcgcggggcttcctcaggaagtccttggtcaggtggttgatggagatgaacatgacgtcttctttccgtgtgatgttttttcggtgggggttccgccggtgccgttcagcgcgttgtgcgcgggtgtgccgagcaccatccacccaacgccatgagcagcatggcgacggcgagctgcgcgatcagggatatggccgcgttggcgggcgtgccggtgaccgcgaggatgcctcccgtggccgggtagacggggccgagcccgaaccatccggcgccgacggcgtcgccgatcacgttgaggatggtgccgttgacggtcggcacgggcagcatcggcgaggagaacacgagcgcgaaccatgcgagcacgccggtgatgcgcgcgacgatcatgggcaggatcgcgccgagcagcgaggacaggctcatcgcggtcagcacggccggcccggtgatcgcgagtccggcggccaatgcctgtggtatggcccgccacgagccgtgcagggtctggacgacgccggcgcactccagcagcaggagcgacggggtgatgaggatcagaaacgcgccgagcgtgcgagccgcggccagcatgggcgcggggatgggcgtggaatcctccaattgaccaatgccaagtcgggagtgccgcgtgtggaagtcggtgaacgcggccatgtaggcgatcggcatgaacatggccatcgccttggccatgaacgccaaatcgcccgcaccgtggtcatgcggtcctgccggggagatcacgcccagcagaaccgcgagcaaggccagcgggacagccgcgacccataatgaacgttgccgccacacgatgatcatgtggacgcgggtcagatgccggaaaccggtgcaaggactcatatgcttctccttgcgagcgtcacgttgcgttcctcgtcgcccagcagacgccacgcgaacactacggcgatcatggagacggcgattgggatgccgcgttgcgtgaccggatcgagcacgtacgggtcccacagcagggcgaggaacatccatacggcgaccaccgccatgaccgtggcctgtgcggacgcggaccatgcggcggccgcgaacccggccaggcccacgaccagtatcgcgccggccggcgcgatcagacttatccatcccatatcctgcggccataggcccaatacatgcaacggcgcgaacataagcacggcacccacaagagtggatacagccgtgagcgcgaaccgtgtggtttgcacgcgcctccaacccacgggcgtggactcgctcgcctcgaccagcgggtcaccggtcaatgcgaccgccacgcacacgcccgagccgatcaccatcagctgggcgagccagttcaccaccatcaatgtttgcgtacgcgaccacacgccggataccatgacgccggctgccgccaccgcaatcccacaggccacgggcattgccagcaatcccatgccgatgcgccttgcctgagcgcgaatcattcccgtcatgccgaccctccttgaagtccgatgaagttgacggtcattctttttgttcgtcaccaagtaggtagcggccgcctgtcctgaagttcacgcgacatgccgaacgaccagatgagttatcggcttcgagtcggtcagacggtcgcggccgccatgcgcgccccggacaatcgtccggccagcgccaccgcccccacacaggccatcagccccgcgacggccagacctagctgtccggaggattgtgctgcaccggaccggcttgcgtccgccagacccgcgaacccgaacggattcagccggattgcgataatcaacagcaggccgacgccgaagccgacgcccgaggagaaacggatcgcgagcatcgcgcccacgccggcgaccagcagcaggggcgacagccatccgaccagcagtacgccgaacgtcccatacccctgcgcgcccatcacggtggtcaccatcaggccgaacacgacgtcgcaggcgagtatgaacaccagccggaccagcgtgaccgcccccgtacccaacggggtggccgacgagatcatgtccgcgcgggaatccccgaacgccatcgtcacgctcagcagcacgccggccagcaccatcgagcagaacgcatgggacacgatcgtcgcactccagccgaccgcgaagaaccgcgcccccaatccggcgaacgccatcaacgccagtgtggccggcaccacctgccacggcaccacccgcgactgccggcccagcagcagcatgaacaaccgcagactgcgcgcccacgaccatgccggtccgtccaacggggaccgcgacgcgcggatgcgcgccatcaccgccgcagcgggaggcgcgtctcccgaacgggatcgttccacggcgtccaatgccgcaagcagacgcccgtcgggcgtctcgtccgtcaaacggtcgatcgtttcgtcaagatgatcggtcatcaggattcaccgttcctttccatccgcatcgttttagcggtcgagttgcgcgcgcagcagacggcgcgcacgcgagatacgggatttgaccgtgccttccggcacgtccgacaaatcggcgatctgccggtacgacaggccgtgcagccacgccaacgtggccgtctccaccagttcgacgggcagccggcgcaacaacgccatcagatcatccacgcccgcttcggacagcacggccgtctccggactcggtccatcgtcacgcggttcgggcgcatcgtccaacgcggtcacattcgggcgtacgcgccgcacgcgcatgtagatctgccgtttcgcgatgcccagcagccaggacagcaccttcgcatcaccacggaacgccctcgccgaccgccagcagcccagccagacgtcggcgcacacctcctcggccgtgccggcatccggcacgcgcacgcgcacgagcgcccgcaccgccgcagcgtgacgcccatacagggtctcgaaggcgcgttcgtccccggaggcgacccgcgcgagcagatcctcgtcgcgcatcaccgccccaccgggcgaggtcatgtcatcctgcgtatgcggctccttccacggcacatcgtaaacaaacgttcattgatgtatgtagctagaaacgaaccgacggttcacgacacgagcaacgacacgcccggaaggcatatcggattaagttgtgtagaagaacagaaactcacagaagaaatcgttgcgcgcgtgcattaccgagtcccaagcctggctagttcttggcaggaatgctgacatccagctgccagtgggcttgttcggtgtgggtttggaaggtgccgccgtgtgtttcgatgatggtccggtagcggtcgaggccgctgcccaggccgagtcccatgtcggcgggtgtggtggtgtcgctggcggagacgtggatggcgtccgtgtcgaaggtgacgcagatggcgtaccattcgccccggtcggcgtgttcggcgatgttcgcgtacagttccgccggcaagcccgacagcagtcgcatggtctccggcgtgagcggccggtgtggttcggcgagcaggttgtcgccggtgaatcccggggcttcgagcctggactcctcctcgtcgatcagcgattgcagaccggcacgctgcgaggcgatgccggcttctgcgggcacgggccgactgccgcactcaaatcgccatcggccggttcaaagcaggatgtaaacccgctatttgcccaacagttcgtcatggctgccggttcgcatgaacatggcggtaccatcatcgcgaatccatagaagcagccagtcgccggcattgccgatgtggcattccagtacgccgtttaaatcaccggtaagtgtgtgggcgcgatgcctacgcctcaatacttccttggagtccgccgtgtcctcaagaaccagacgaatgacttctttcagcgggcgtaaatcagtgtgcttgcgtttgagtttcttgatatctcgctggaatgccgctgtgtaatccggtttgagcattgatcagattcccaacgaatcgaacatctcatcggcactgttgaaacgaggtttgccgtcggcgagcctgttcttcgcctcgtcaagggcctccatggtttcgggcggcacggtcgtataggaaaggtttagaggaatgcgc

SEQ ID NO: 1947 - DNA, 4528 bp, Unknown
  R17_18m  MAG No. k141_8976
agccgctgatgcggttcgagcatggtatgcggttgggtcaggcttggccggttcgcatatccctcgataagtcgaatctcgttctccacgcgcgaacggacccgcagtcgcatacggtcgatggcaccttcgatgagctgcgactgctcacgcacatccggcaccacgcgcttggccgcatcggtgggggtggaggctctaagatcggcgaccagatccagcaacgtccagtcatcctcatgcccgatggaggagattaatggtgtggtgcaggcatacgccgcacgaaccacacgctcatccgagaaaccgatgagatcctcaaacgagccgccgccacgggccacgatgatcacatccacgctcgggtcggcatcgagttgtgcaatggcctgaaccacttcggccgggcattgctcgccctgaacatgcacatggaccaccttgaaggttacggaaggccaacgaaggttcacattggtgatcacatcgccttccgcgcgtgcctgaggtgcgcaaatcaggccaatagtcttcggaaactccgggagaggcagtttgtgatcggcatcgaacaggccctcgcccttaagctgcttgcgcaattcgtcgatcatggccttgaggctgccaccggctccgaccttgagaatcgtgtccccgcgcaacgacagcgaagtgcgcttcatccacaggttcggtttgccatgaatcaccacgcggtcgccctgaacgaactggctggccgcggccgcgaacctgccgaagccattgacttccatggcgatatcctcgaagtcgtcgcgcagcgtgatgtaggccgagccggcgcgacgggtattgatctgcgtgatctggccggtgacccacgcggacggccatcgttccacggcaccgtagaacttctggctcagcacacttaccggccacggattttgcgcgctggtttcagcggcgcgtgcaggcagctgatcgatagggcgaggctcattcggcagattgatggtgccctgatcaggcgcgaaagtgccttgacccggctcaaagccagccgaggccagtgaagcggcggtcggtggacggccggtagatgggtagcccattgcagtagtcatgcactccactataagtgcgttggttgatgacggtaaatatttaccgtcgcctgaaaacggtgtgatgatgaatgcgagaaccgtacgaagcgatgtatcagccgatgatggagatggtctggtgcatcagaagaaaggagtcattatggcgaagaaacgggtgctatgaagaggagtgagatatgcgttgcgctgacgattgagagtcgttagtgagctcgctgtgcgacacgcgagcagaaaacagttacgctaatcacacacttgtggttttggcggaaaatagccgaaaaccctataaatagttcgacacaccactgttgagcactagatatagtggtggagatgccgtattcttctagaggttcaaaaaaacgacatcaatgtaatttcgtgtggcccacgtcgagtgtggccaaaatgcggaactcaggagagtgttcgccttataggaaaggggtgcccgatgggcgcacaggtgttggaggaaatcgtcaccgataacgagaccaaggtggccgccaaggcctccaccgtgctcgttgagaagcgtgatggtcgtgtggtcgacttcgaccccattaacatcatctctgcggtcaagtctgctttcggtgacctgaacaaggaagtcggccccgaagaagatgccatgatccgtggtttcgccaaccaagtcgaaggcgaaatcaaggggcgttacgccggccccgccaagatcgaggacatccagaacctcgtggagcacgccctcattgacgcccacctgtacgatgtggctcgcgcctacaccaactaccgtctcgacaaggacattcagcgtgccaaggccactgatgtcaacgaggccgtttcccgcttcatcaaccacgacccgaccctgattcacgagaacgcgaacaaggattccaacgtctactccacccagcgtgatctgctggccggtgccgtgtccaaggccgccgcgttcaacatgctgccgccggcggtgtccaacgcccacatgaagggcgacattcacttccacgatgccgactactcgccgttcactgcccagtccaactgctccttgccgaacttctgggacatgttggccaatggcttcactcttggcaacgctccgatggcttccccgaagtccatcgccattgcggccacccagattacccagatcatgaaggacgtggcctccagccagtatggtggccagaccgccaaccgtgccgacgagcatcttgcccagtatgccaagaaggattacgagaagttcctcgaggaagctcgtgagaccatccccgacggcatgccggttgaattcgcccgtcgtcaggtcgagagcgccaagaggaacgagcccgccaagctgcatttcggttcccgcgaaccgctgccgatggacaccccgttccacaccgacgttgacgaacttgagcaggagcgtgaaatcctcgccaagattcgtacccgcaaggccatctatgatgccatgcagaccatggaataccagatcaactccaaccgtgtgtccaacggccagaccccgttcgtgactgtcggctttggtctcggcgccgactggttctcccgcgaggtgcagcgcgcgatcctgctgaaccgtattcgcggcctcggcaaggaacaccacaccgccatcttcccgaagctcgtctttactgtgcagcacggcgtgaacgccgacccgggtgacccgaactacgatttgaagcagctcgccctcgagtccgccaccaagcgcatgtacccggatgtggtgttctacgagaacatcgtcaagatcacaggctccttcaaggctccgatgggttgccgctccttcctgcagggttggatcaacccggagaccggcaaggacgaggaggatggccgtatgaacctcggcgtggtcaccgtcaatgtgccgcgtatcgccatcgaatcccacggtgacaaggctcgcttctggaagctgttcgaggagcgtatggaagtcgcccatcaggccctccagttccgcatcatgcgctgcaaggaagccaccccggtcaacgccccgaccctgttccgcttcggtgcgtttggtcgtcttggtgccaacgacaacgtggaccagctgttcaagaacgagcgtgccaccgtgtcgctcggctacatcggccttgccgagaccaccgcggtcttctacggcaagaactggattcgcgaccacggctgggatccggaaggcaaggagttcgcgctgtccatcgtcaagcgcatgaacgagctgtgcaagcagtggagcaaagcggagggctaccactattccgtgtactccactccggctgaatccctgaccgaccgcttcaaccgcatggaccgtgaaaagttcggccgtatcgaaggcgtgactgaccacgacttctacaccaactccttccactacccggtgtggttgcagcccaccccgatggagaagctcagctacgagaaggacttcccgtactacgcttccggcggcttcatcaactactgcgagtacccgtgcctgcaggacaacccgaaggcgctcgaagccgtgtgggattacgcctacaacatcggcatcggctacctgggcaccaacaccccgatcgaccactgcttcgtgtgcggcttccagggcgacttcgagccgaccgaggaaggcttcaagtgcccggagtgcggtaactccaacccggacaagtgcaacgtcaccaagcgcacctgcggctacctcggcagcccggtccagcgcccgatggtgcacggccgtcacgaggagatcgcccaccgagtcaagcacatgagcggcgaaaccggtcgtgtgacgctggatgacggcaccacccgcgagtggttcgaagaggccaagtagggttattcgtgagtaggctcccctctctgaggggagctgtcagcaaagctgactgaggggagtccgaagagctattccgaagctcccctcagtcgcctacgacgacagctccccctcaaagaggggagctaatgctttccgcaaggagggaatcatgccggagttgcatacgaccaagcccgaacccaagcgccatgactttgcggccggcgagaccgggcgtggcccctccgtaccctccaacggtcttgccaacgatccgaaagccggtcaatgggatggccggcgcatgtccaagcggatgatcgccgactacaaaaccttcatcgtcaccgacggagaaggcgtgcgcaactccctttacgtctccgggtgccccttccactgcgtcgactgcttcaacgcctccatctgggacttccaagcaggccacgaatacacgcaaaaacttgaagacaagatcatcgaagacctgaaagcgccatgggtgcaaggcattacgttccttggcggcgagccattcctcaacactcccgtg

SEQ ID NO: 1948 - DNA, 7603 bp, Unknown
  R17_18m  MAG No. k141_9403
ccaacaatcgctgtgctaaccgggctttgtattgagccgtgaactggctggaacattgttccattgggacttgcggcgggaaaatcagcccatcatgggacgcccagtcaggtagcttgagtgaagcgcgctgccagccggcaatctgctccagcgcgaacggcacatccacgtcgccatcatgtttggcgtgcaaggccacatcacgcacatcttcacggcggtgtttggcgatgaacgcccaggtcgactcagaaatctccatgccgccattctaggggttgtgctgagatgagtatggcaaaccgcaagagaacgaggtggcgaaaaccgatgatcgatgaagtgatgatgctgcgtcatggccgtacgcaatacaatctcgaacatcgcttgcaaggccagatcgatgtgccgctcgacatcgtaggccaatggcaggtcgaccagaccggattcgcgctcgcttcacggtattactgggccaaggtgaaccgacttgccgagcatcccgaagccatcgcccagcccggtcctgacgccgccgaacgcactgatacgcgacagttcgaggaggcccccgccgccggccggcgcatggtggtgatgacctccgacctgttccgtgcccaacagaccgcacacgccttcgccgatattttgggattgccggtcacctgtgaccaacgactgcgtgaacgcagcttcggcgagtgggaaggcatgacccgcgccgaaatcaaagccgtggcagccgacgactacgcctcttggaaacagcacactgggggcgaaaccaagcatggtgtggaaagccgtgccgccgtgggccagcgaggtgccgatgccgtgcgcgcactggtcaccgactccgcctattcagacagcatgcccaccacgctgatgctcgtcacccatggctcatggattaccgccaccatctccaacctgctcgaactcgacccggacggcatgaacgcactcggcggcatgcgcaacgcctgttggtgccggctcaaagtgcgccacagcgtcaacggcatccccgccgaacagcccctgtgggagttggaggaatacaacaaggctcccgccatcgccgacagcgccgactgggagaacgggccgaccgatctgcgcggaccgcacatgccaagttggcagccaatcgtctggtgacggtcgctatgcgaaaccccgctcgcaaattcgaacggtgggtctagactaatctcggtttggaaccgtacagcgatagaacagtaggaaagcgcggaaggcgggtgaggcgacatgctgagaatcttcagctcaatcaatggccaagtggagcagatcgagaaaccggaaaacggctcctggttatgtttgagcgaacccactgatgtggagctcgccaccgtcgcatcacagaccggcatcgacctggccgacctgcgcgcccctttggatgacgaggaacgttcacgtgtggacgtcgaagacgattacacgatgatcatcgtcgacatccccaccgtggaggagcgtggcggacgcgactggtacgagaccatcccgctgtcgatcatcgtcaccgaaaacctcatcatcaccgtctgcatgcaggacacgcccgtgctccacccattcatggaaggcacgatccgaggcttcaacaccttcatgcgttcgcgcttcatcctgcagatcctgtaccgcaacgccacgatgtacctgcgttacctgcgcatcatcgaccgcgaaagcgacaagcttgaactgaagctgcgccactccatgcagaaccgcgagatcgtgatgctcatggaactgagcaagaccttggtgtacttcaccacatcgctgaaatcgaacgaaatcgtgatggagaaactcaccaccctgcaacgcatcaagcagtatccggacgatgaggatctgctcgacgacgtcatcaccgaaaacaagcaggccatcgagatggccaacatctacagcggcgttcttgcgaacatgaccgacgccttcgcctcgatcgtgtccaacaacctgaacaacgtgatgcgcatcttcaccatcatctccatcaccctgtccatcccgacgctgattttctcgatgtacggcatgaacttcgacggcggcatgatgggcatgccgttcaccgacaagccttggggcttcctgctcatcatcgtgatctccatggtgctttccggtgtggttgcctggttcctcacacgttcgcgcatgttcaagtaaggcgtttgacggttatgcaccactggtcatcgttcgtcagccgtagcatgctccgcgcccgccgcccgatgcggcgcggatttcgctcccggctgatggcaggattcgccgcggcctttggcatgatattgccattgtccggtctggccggttgcggccaaattcaagtcaccaccgtctccggagcgccggagggacccaccatcgccattggggtcgcagccgacgaaccatcggtgggagcatggcatgacggcacataccagggcttcgacatcaccatcgccaaatacgtggccgccaaactcggctatgcgaacaagcagatcgtcttcaagcaggttcgccccgaaaaccggcgctccatgctggacaatggacaggtcgacatggtcgtcgcctcttggcctatcaccgatgggtccagcgcgatcgttgattttgccggaccatacctcacgaccagcgtcggtttgctggtcaggtcggatgagcgtggccgattcaccaatgacgcaggttcggtgggcgacgtaggcgacggcacggtgtgcgcagtgaaaggtgacgagacagtcggcatcttccgcggcaaccacccgcaggctcggattcaggagcgtagcagttatgcgcagtgcgtcacggccgtgcaagtagggtcggcggatgccatagcctccgatatggcggtgctttccggtcttcaagcggccaacgggccccagtatatggacgtgattgcggacaagggcgaggtcagttatggcatcgccgtgagtcaaggcaccagccaattggcgcagaaaatcgcggaagcattggaagacatggttgaggatggcagctggacggccgccaaggatacgttcacaagccaaacaaagctcatggtttcgctgaacggtgaccccaaagccatcgtctcggatgctgaataacgattgacgacgtgtccagttgcgaggctaccttgctgatttatgagtgacaacgagaagagcacgcaaaccgaagagcccaacttccgctacaacgccgcactggcgcaggacatcgaaaacaagtggcagaagatctgggatgagcaaggcaccttctgggcggccaacgtcaacggcgatttgaaggacggcaagggccgcaacgccgaggggcgcaccgcctacttcgccatggacatgttcccgtacccctccggcaagggtctgcatgtgggccacccgctgggctacctggcctccgacgtggtgagccgctaccaccgcatgaagggcgagaacgtcctgcacgccatgggctatgacgccttcggcctgcctgcggaacagtacgcagtccagaccggccagcatcctcgcgtgaccaccgaggcgaacatcgccaacatgagccgccagctgcaccgcatgggcctgagcttcgacaaacgccgcacgttcgccaccatcgaccctggctacgtgcgttggacccaatggatcttctcgcgcatctacgattcctggtacgacgaggacgccaccaacccgtccggctccaagggctccgcacgcccgatcgccgagctcgtggccaagttcgaatccggcgaaaaggccattccgggccacgagtccgatggcaagcagtggtccgacctcactgacgccgagcagcaggatatcttgaacgacttccgcctggcctacatctccaagtccccggtcaactggtgcccgggtctgggcaccgtgctggccaacgaggaggtcaccgccgaaggcaagtccgagcgtggcaacttcccggtcttccagcgtgagctacgccagtggtccatgcgcatcaccaagtacggccaccgtctgatcgccgaccttgacggcatcaactggcctgagaaggtcaagctcatgcagcgcaactggatcggtgaatcccatggtgcctccgtgcacttcaccgtggccactgccgacggtgacaaggacatggaaatctacaccacccgtcccgacacgctgttcggcaccacgttcgccgttgtttccccggaacatcacctgctggagaacgtgcccgccgaatggccggccgatgtacccgaagactggaagggcggctatgccaacccggtcgaggcggtgaaggcctacaggctcgccgccgaagccaagaccgccaaggaccgcgtggacgaaggcggtgagaagacaggtctgttcaccggcctgtacgccaccaacccgatcaccggcgcgaagctcccgctgttcaccgccgactacgtgctgatggactacggcaccggcgccatcatggccgtgcctggtggcgaccagcgcgattacgactttgccgtgaagttcggtctgccggtcatctacaccgttgaaccgctgccggaatccggcgatgacttggccaactacgagggcaaggcgccgttcgtctcccatgacggcatcgtgatcaactcccacgtcgaatccacgtacgctaagggcgacgcgctgtcgctcgacggcttgcgcgtggacgacgccatcgccaaggtcaacgcctggctcgaatccgccggcgtgggcaagggcaccgtaagctaccgtctgcgcgactggctgttctcccgccagcgctactggggcgagcccttcccgatcgtgtacggcgaagacggcaccccgcacctgctgccggattccgcattgccaatcaacctgcccgacgtgcccgactacgagccgcgcaccttcgatccgatggacgccgagtccaatcccgaggcaccgttgagccgcaacgaggactgggtcaaggtcgagctcgacttgggcgacggcaagaagacctactaccgcgacaccaacaccatgccgaactgggccggctcctgctggtactacatgcgttacatcgacccgaccgacaccaagcacatggtggagaaggacgagttcgactactggatgggcccgaaccacaacaagtactcgggtgatgaaggcggtgtggacctgtacatcggcggcgtcgaacacgctgtgctccacctgctctactcccgtttctggcacaaggtgctcttcgatctgggctatgtggattcggccgagccgttccacaagctgttcaaccagggcatgatccaggcctacgcctataccgacgaccgcggccagtacgtgccggcggacgaggtcgtggaagggccggccgacgcctccggcgagccgacgttcacctggaacggcgaacatgccaatcgcgagttcggcaagatgggcaagtccctcaagaacatcgtgaccccggactacatgtacgaaaactatggcgccgacaccttccgcctgtatgagatgagcatggggccgctggacgaatcccgcccgtggaacacccgcaacgtggtcggcggcatgcgcttcctgcagcgcctgtggcgcaacgtggtggacgagaccaccggcgaggcccacgtgaccgaggacgcgcccgatgagaagaccctgaaactgctcaacaacacgatcgccgaagtgaccgcggagatggagggcatgcgtccgaacaccgccatcgccaagctcatcgtgctcaacaaccacctgaccggcctgaaggccgtgccgcgtgccgcggtggaaccgctgatcctgatgctcgccccgatcgccccgcacatctgcgaggagatgtggagcaagctgggccaccccgagtccctgtccgccgagccgtggccggtggccgacgaacgctacgtgggccacgacaccgtgaccgccgtggtgcagatcaagggcaaggtgcgcgccaagctcgaagtgccggtcgacatcgacccggccgacctcgaacggcaggcgctggccgccgtcgccgaccgtctcggcggcaaggagccgcgcaaggtgatcgtcaaggccccgaagatcgtctccatcgtccccgcggagtgacttgttgcgggttaggctcccctctttgaggggagccgctcgcgtcgcgagactgaggggagcgtcaaccgccccacctcaattgtggataacttcataagctagaaccacataccccgtttcagctggacaaacgcccatgaatccatcagcgtggatgcatgggcgtttctcataaccatcgcgcagaccatgccgccaaccgtttgcgcgcattcagcaggcagagcgaagccatgccccaaccgcgagtggaacggcccacgacgcctccgccgcctcccggccatgcacggattcgtccggccggccacccgccccaaagggcgcagagcggcctgcggcaggcgacccgtgacaaacgtgcgttatcggatctgattggcgtacgttccgccgatgccgtcggagaatcagccagactcacccgggatcagccgcgattgtcgttcaccattgggcatgccttggccgtgatattgctgctgatcgtcgcccttggcatcagcttggcattgctggtccagcagtcgatgaatatggccatgctgtctcaaccgaccgccatgcagaccacgggcggctccgctggagatcagacgatgccatcgcagaacaccacggatgagaaacgcacggatccgcagcagtcggagcattccgatgccacagcgaaccccgaatcggataccacgcaatctccgcacatgcagacggacggcagcgatgccggcgcttccacgcatggtctcatcaacctcaacacggccaccgctgaggaattgcaatccatcaaaggtattgggccggttaccgctcagcggatcatcgatcatcgcacggcgattggcgggtatgcatcagtcgatcagctgctggatgtcaaaggcatcggctccaagacgctggagaccatgcgagggcaggtgacggtcggatgagcagggatcggatactgcgcgagcaggggagccgcgattggaggatgctgccgatcgccatagtgatgtgggcggcgagcctgggagcgcacgcattattcgcatggaggatgtctgatggactcggcaccggtcaggtaaaagccgatgccggagctggcattgacgtcaccataatcggcatggaatggcctgtcacgcgaatattgcctataacagtggcgtcatgtgccgctgtggcggcgacgatcgtggtgtctttccgcctgcggatcaggtggacgggaacattgaccgtatgcgtcgcggtggcgtgcatcggcagtatgacggcaatcgcgtcggacaccattgcctggcatgatcctgcctccgcacaagctcgccaatccagttcataccacgaagtcatggccacggtgacgacgcccgtgatcgcttcggaccaacgcacatacgattgtcagacgg

SEQ ID NO: 1949 - DNA, 9209 bp, Unknown
  R17_18m  MAG No. k141_9509
ccgtatccggctcatcaaagcttgcatccgcaccgactgtattatcggcgttatcggtatcatcggcatccgactccggctcagtgccgcgtaatcccttgcgagcgctggaggatagcacgttcttcggaatcgccacggtggcggaatcgtccaaatcggattctttcgtctcgtgcgacggaatcgcataaatctgttcctgcagcaaacgcagttcctcattcatcggcacgcggttggtggatcccctggccgcacgcggcatgtgctcgccgattggctgcaatacgtgctcgccgaacgcctcggacgcctcgacgatcttggacttcttctccggagtcggatcgttcatcagcggtgagtcaatcagctcatagcgcttggtgtacgcacggaagatggcctgcagcgatgcggtgaccggcagcgccaggaacgcgccgaatgcgccgaacagcgagccgaacgccagcaccgagaggaaggcgacggccgcgttgatatccatcgtgcgctgcgaaatcctcggcgagagaatcaggttctcgatctgctggtagacgatgatgaacaccagcaccgccacggcgtacgtccacccgcggttgccccaagcgaacagcaccggcagcgcaccgccgatataggtgccgaccgtggggatgaactgggataccacgccgcagaacagggccaacggcagccagtagggcacatgcaggatctccaagaagatggcggtgcaggtggcgttgatcagcgccagaatcgaacgggagaacaggaaggacgaaatctggccttgggccacggtccacaccagcaggaatcgacgctgcgtgttgggggccagccactggcagaaggagcggcgcagctttgggccggcggcggagatgtaatacgtggtcattaccacggtcatgaggttcagcaggaaggagaacaggccacccaccgtactcatggcggtgccggcgaaatcggtgacccacgaggtctggatattgttgaagatttccatgccaagattgctgatttccggcatcttgaacgtggcgtgctggtccacgaactcacgaatctgcccatacattgccggcaaaccgcggaccatggcaatcatctgctgtacaaacatattgccgaacagcgtgagcagcacacccacgaccacggccacgcccaccagactgacggcggaagccacgccacgcttccagccatgagccaccagcgccaccaccagcggttcgacggccagcgccaggaacagcgagatgatgatgtcgaacaccagataggagatgtcgccccacgagcgccagcagaacatgaatacgatgacggcgagggccacatacagcagcgcgcggccgaaccattccggtggcctgcgggaatctcccttggcggggaacaaagtaccaaagtcgatacgattctcgtcgtccgggtctgccccggcttctgcggcaccgcttctcgacgtgtcggtgctgtttatgtttcgcgcgcgttcgctcatggctccccattgtagcgaggggtttgaagctcggatacgccggcggcgtacacccgcttttctattgttgatgttatgctcaacgtttcgatcatcatcccagcgtggaacgaagccgaacgcatccgcgactgtctgctgaacgccactcgccagaccatcatgccgcatgaggtgctggtggtggacaatcgttctacggacaacacctgcgcgattgtcgaacagttcatcgccgaacatcccgaggccccggtcaaactgttgcaccagaacgatgaacaggggctgattcccacccgcaactttggcctgaacgccgcgaccggcgatgtgctgggccgttttgacgccgactgtatgatccggcctgactgggtggaggtggtctccggcatcttcaccgaagacccggccgcgatgggtgccactggtccggtgatgtattacgacatgccctcacgtcatttcgggttgaaaggcgacaattccttacgcaagcgaatctaccgtgccgatggcggccagccgctgctgttcggctcgaatatggccttgcgcgcttcggcctggcatcaaatcgcgaatgaggtctgccgagataaggccgatgtgatgcacgaggatatcgatatttccctgcatctgatgggcaagaatctgaaaaccgtgtactcgccgcgcatgatcgccgcgatgagcgcgcgacggatggacacgtcgctgagttcattcctgaactacatgcgacgttttaagaatacgtttgatgcgcatccgcaacatacgcgcacgcataagccggaggtgttgttcaccgccatgtatccggcgatgcatatgttctacccggtgtggcagaaagtgctgaattccgcggatatcaatcctgctgaagccgcgtggatcaacgagcagatgaaactggcggaggcgcaaggcaagcagctgtacgacgagacccccaccgacgaagtctacgacgaaaagcacgaaaagtagctggatatacgagccccctctgcttatgcaagctccctctgatgagggagctgtcgaacgaagtgagactgagggagagactgcgacgcagccgctaaaacatcgaatcggccgcaggccgatacctattattcagcggctacgccgcaacttctctcccagtcagctacgctgacagctccctcatcagagggagctaatgtttaccgtcatcgactgatcacatcagcgacttgtaaatcgcgagaatgtcctcttcggtggcctgacgcgggttgccgggggtgcacacgtcgttgaaggcgtcgtgggccagcggttccagatcagcctcggtggcgccgacctcgctgatcgtggtcgggttcttcagatccacggtcagcttgtggacggcctgcacggcctcttcgcgcaccttctccaggtcgccggtgtaggcgtcctcgacgccgaacgcgtcggcgatgtcgcggtaattctcgcccgtgtagtccttgttgtattccatgaccggggccagcagaataccgttggccacaccgtgggccacgcccagacggccgcccagcgggtgagccatgccgtgcaccaggccgaggcccacgttggagtaggccataccggtgatgtaggaggcgtacgccatctgctcgccagccggaatgtcgccgtcggcggacttggctaggttcttggcaatcatgcgaatagtctgcatggacaggcagtcggacaggctccaggcacccggggtaatgtaaccctcgatggcgtgggtcagggcgtcaagtccggtggcaaccttcaggccgcgcggcatggagtcggtcagatccgggtccacgaaggcgacgatcgggatatcgtgcgggtcgacagccacgaacttacgcttgttggcggtatcggtgaccacgtagttgatggtcgtctcggaagcggtaccggcggtggtcggcacgccgaagatcgggacggacgggttcttggtatccgcgacgccttccagggacagcacgtcggcgaactccgggttggcggtgatgatgccgatgcccttgcaggtgtcttgcggggaaccgccgcccaggccgatcaggaagtccgcaccggactcggcgaacttggcgacgccgtccttgatgcactcgaccggcgggttcggcttgacgttggagaacacctcgtacggcaggccggcctcatccagaaccttggtgaccttctcggcggtgccggtctccagcagtaccggatcagtgacgataaatgccttggtgaagccgtgctgcttggcgacggccgggatttccttgatcgcgccacgtccgaagtatgcagtctggttgaaaatcatgcggtataccatagggactctccttttgagctagtgtcttaactggtggtccactcactctttgagtggtccaacggttccccagtctactccgcgcatgagcattcacctgaaaacacgctgaaagaacaacactgaaaataatggcaagaaatggcggaattccgcacttgtcgaattattgtccattgaccaaaccagttcaatcgcccgagatctcaacgataagaccattttccggagtcgcttggtgctctccgagaaactcgtctctcatccgcttacttcgcgcgtacacaatcaatatgcgagatgcctaattccattcgtgtttcatcagccgaacgcgaactggttcaccagatggtgtattcaacggtttcagtctcttgaagaggactaagatacctcgacaattggggtgatcatcataagagaatgaggcagataatggcaaatggcaaggctatgacggtcggcgagatggcgtccctgtttctcgaccccgacactcccgttcgtatcgacgcttttgacggctcgcatttcggcccggcagacgcggatttgaaggtcaaaatcgccgcgccgaactgcatgtaccagctgctcgcgcacccgaatgaaatcggcatcgtgcgcgcatacattctgggcgatttcgacgtggacgacattgactacgccgacccgtatccggcgatgcgcaagctggtgtcgctggccaaatacgttcgcccgctcgctcccgcatccattgcccgcgtatccgccggcattctgagtcacggcttcaagaagccgccggtgcccgccaccgagggcccgagcaagttcgcccgcatcaagcgtggcctgatgccgcacaccgaaaaggccgattcggaaaccgtcagcttccactacgacatgtccaacgagttctacgccgacttcctcggcccctccatgacgtacacctgcgcggtattcgacaacgagcacatgagtcttgaagacgcacaggccaacaaactgcgcctgattctcgacaaactggacttgcaacccggccagcgcttactggacatcggctgtggctggggttcgatggtcatcaccgccgcccgtcgcggcatcaaggcgctcggcgtcaccctctccaaggaacaggccgcgtacgccaacgaatggatcgcccgtgaggggctgcaggatctggccgaagtgcgcgtacaggactaccgcgaggtgcccgagcatgacttcgacggtatctgctcgatcggcatgatggagcacgtaggcgtcaagaactaccagagctacttcgaagagatgttccgtctcctgaagccgatgggccgactgctgaaccaccagatcaccatcagccatgacaagcctcacggcaagcccggcaccgacgaattcctcgaccgttacatcttcccggacggcgacctcggcgcgcccggcttcatcgaatcgtgcatccatgacgccggcttcaacgtggtgcatcaggagaacctgcgccagcactatgcgctcaccctgcatcactggaaccagaacctctccgagcattgggacgacgcggtcaagcaggtcggctttgaacgcgccaaggtatggggtatgtacatggccgcctgcgctctgaacttcgagctcgacggcatccagattcaccagttcctggctgtcaagccggatcgcgtgggccacccggacggcaagtggtaccctctgcgccaatggtggcaggcctgactccgtttctgtgggacggcacgcggtttttaccattgttcatctgccgtcccacagaagtgtgggatagcagatacatcaatcgtttgacgtatctgctatcccgcatgacataagccgagaaccgcagaatagagccgttctttgccctcagctctgagggcgttcttcgaacgctgtgggacggcacatcgaaaatcggcaaaatcacgtgccgtcccacacgattcccttcgcacgcgcatttcgcaggtgctttttctgcaatactgactctatgagcgccacagccccagaaacggctggggcggacgatcgcaccgaccatgacacgcgcggataagacccacgtttctttatttaaccctaacccgatgttcgcattggtgctgttggcgtgcgtagttgcggcgaggaggacagttgttggcgaacgcgagcctttgcattgactggccagcccgccggagtaggtacgtgacggatatgcaaaagccccgcacaaggcggggcttcattgtggtggctccgaacggcgtcgatccgttgacctagcgattttcagtcgctcgctctaccaactgagctacagagccatgaacagtcaaaaacccggataatccgggtttcataaccattccagcgaccccggccggacttgaaccggtgacctccgccgtgacagggcggcgctctaaccaactgagctacggggccattgttctcacttgcgtgaggcaacagatgtatatattactgaaattcgccggtcgtgcaaatttcggcgtgttccgcgtaatttcaaggtttttgctatcaccagcacacggacacgtctgccataaacatccacaaacgacgaagggcgcgaccggaaccccggtcacgcccttatgaacagaagcacttcacggcatccaccgcaaagcaatcgtcaatctcagtcagcctgcttccaggtgtcgacgtcgatgtggtgttcggggttggcctgccaggcatcccacgcggacttgacgatgtcttccacgtcgtacttggcgtgccagcccatctcctcgttgatgcgcttcggggagccgatcaggtgcggcgggtcgccggcgcggcgggccatgacagcctcggtgaacggcagaccggtgaccttcttgacttcgtcgacgatctggcgcacggaggtgccttcaccggtgccgacgttgaaggcgtcgtacttgcgctcgtcacggtcgaggtacttgagggcggcgatgtgggcgtcggccaagtcggagacgtggatgtagtcgcgcacgcaggtgccgtccggggtcgggtagtcgtcgccgaagatggcgggggccttgccctgcttgaggcggttgaacagcatcgggatgaggttcagaatagccgggtcttcgagttcgaccgggccgcagccggccacgttgaagtagcgcagcgcgcagaagcggatgccgaacggctgctcgcaggcgcgagccatccactcgccgaacagcttggtctggccgtaggggttgatcggcagcatcgggacgacgtcctcgggcaccacatcgaccggcggcacaccgtaggtggcggcggaagaggagaagacgagcttcttggcgttcttggactgggtcatgccggtgagcacgttgagcatgccgttgatgttctgctggtagtaccacagcggcttctccacggattcgccgacctgcttgcgcgcggcgaagtggatcacggagtcgacgccttcggcgtcgaggatttcggccagacgctcgccggcgcccggagcggcgatatccatgccgtacagacgggagccttcgatgcgggtgggcttgccgtagctcagatcgtcgacgacgacgaccttttcgccggcctgatgaagtgcgtgaacgacatgcgcgccgatgtagccgcagcctccggtgacgagaactgtcatagttgacctttccttatgcgggttgcaagtgtcggccgtgtggagttcagcggctgttcacttttggtccgctttgttaccttttgaaacaatttgagtatatcacacgaacataatcgcacaaaacggtggtgtcgtccggcaatatctgcattcattaggtcgatctggcgttcattaggtaggtcggcccggagccggcccgcacgaacaccgggtaaatggcttgatatggtggttggtatcgcacaccacccacctaatgaacgccaaatcgacctaacgaatgaacagcggtgcggcgcacaaggaaaatccgaggaatatatgaccgatcccgaatccacagcaatcgattccgtcaccgcgatggccgcggaccacaccgaggcaccggcgcaccccctgcacaaggtgctttccttcgtgcgccgctccggacgtttggacgatcgcctgcagcgcgcctgggacaactatgccgacacatatctgttggacattgcggccggcaacctgctggacgtgcgcgaaggcgtcacgctcgaccgcgcgttcgtggagtcctcatggggcaacgacaatccgctcattgtggaaatcggcaccgggcagggagaaaacgtggcggccgcagccgcggcccatccggagacgaacttcctagccttggaggtctatgaccccggtgtggcccacacgctgctgctcgccggcaagcaggggctgaccaacattcgtgtggcccaggtcaatgcgcccgagctgttcaaggtgaccgcgcccggcaccgtggccgaggtatggaccttcttccccgatccatggcccaagaagaagcaccacaagcgccgcatcgtgcaggaggccatggccggcgacattcatcgcgcgctggtcacagacggcgtctggcgcatcgccaccgacatcgaggactacgccctgcacgtgcacgaggtgatggacggcctcgatggctggaagaacctgggcagcataaccgtcagcctcccgctggagcacgtgggcaagggcaatgccgacatggccgccgacatgccgcacgccgacttcaccgaatccgagcggttcgagggccgcgtgctcaccaacttcgagaagaagggcctggccgccggccgcgcgatccacgacttcacctatcaggccgtcgccctgaactgattgcgacacgccgaaatgccgtcgatttgcataaccgaacaacctcccgtaaagtaactcgagttgttcgcccccatcgtctaacggttaggacaccagactttcaatctgacaacgagagttcgactctctctgggggtacttctttgaagacctcggtcatagcgaccgaggtcttttcgtattcgcgggaccaggcctgaaagcattcggcgggttataggccaaaatgtgtgtccgttttggcttgtgttcctttgtggcggtgggcgttcctcctgttcgagttgtatgggcggggaactcgaggtcggccagaatgtgtgtccggaatggccggtcaggccttgcggcacaacggttgagtgactttcgagttggcgtggcagattgggtggatgaacacaccttgttgc

SEQ ID NO: 1950 - DNA, 3003 bp, Unknown
  R17_18m  MAG No. k141_9517
tgatggaaccgcaattcctggaatacgtcttggtccatgagatgacgcatctgtgggaaagcggccatggcgccggattccaacgccgcatgaccgcctacctacccggctggaagacgctgcgtcgcgacctcaaccgccgcgtggtgctgtgacgatgacgggtcaggcttcagtgccggcgatgtggctgatggcctgatcggattcgttcgcatggtccgaatgcgccaccatctcgatggccgccggacacccgctcaccgacgaagaccgctggccttggctcgacaccatcgccgcgtggatcgacgagcgcgtggccgccggcgagcccgccgtggtcacctgctcggcgttgaagaagatctaccgcgacaagctgcgccgtcaaggcgtggtgttcgtctacatgcagggcacattcgacgaggtgatggaacgcctttcccaccgccaaggccacttcatgaagccgagcatgctgcaatcccagtccgacattctcgaagagccgggcgatgacgaaattcacgtcaacgtacacatcggccaggccgatcccgaacacgaggccatggccgtggccggtgccctcggcctgtgagcattttgtaggctcccctcagtctcacttcgccacaagtacggcgcatcgacgaactcgaacggcgcatcagcgaacttcagctggagctgaagcagtgtgaaggccagcaagggcgaaccggatcggtccaaacgggctactcaggccgaccagcccagccagtccgttcagaccgacctaactgatcagagcgggccctctgaccagtccgaaccatctgaccgacatgtacttgttgactaagtgtgcggcccgcatgtgggcctgccactcgttgttgaacgtacggctacatttttacaaccacagaaatacggttccagtcacgttttccaaccataagatgcggttttggctacgttttccaacctcaaaatgtggagttttatacacttttccaacttatgtatgtggagactctctatttcacgtgagacgaaagtggctcccctctttgaggggagccacgtaatactgcttttacttatgccaggtgagagcgcatgaaccactggaacttttcgagttcctgcacgtggtcctggatgatgttggagctgatcacatccagctcgtccagctcggcgatggccttgcggtcgtcggcgatgaaggcgtcatagtactcgatcagcgccttgagatactcctcggtgcccacgcggccctcggcgtcgaacgacttccacgtgcggttgcgcacgatggcgtccgcgcggccgtccggggtgccgcccagagtggcgatgcgctcggcggtctcgtcggcctgagccagcacggcctcgacctcggggtcaagcatctcgtgaacggcgatgaagttcgggccggtcacgttccagtgcgcgtgcttgaggaccagagcggcctcctgctcctggctcagtcggttctgtaggatggcgatggccttctcgctggccgcttcatcaaggcccggcacaacaaacgcaagtgtcataatgttccttctttcagtaggtggaacctgtccatataattctacgatttttggttatgccccgggccgaacgaataggtggtgaatatcacgtggctagttggcatcgtcgctttgtgattcggctggcagtggcgcatggtccggggcgccggctttgcggacttcgatggtttcgatgcggcggccatccaccttggtgacgaccatgttgtagccgtcgtcggaatgcagcacgtcgcctaccgctcccatcttgccggtcttggacaagaagtagccggcgaccgtctcgtacgggccgtcctccagctcgatgccggtcagatcggcgaagtcctcaatggtcatgctggcctcgatcgtggccacaccattgacgaacgcggtgcgggtggtgcgttcgccgcccttctcgctgggcagatcgtactcatcgcgaatatcgcccacaagctcctcggtcatatcctcaagcgtcacgatgccgtccgtgcctccgtactcgtcgatgaccacggccagatggatgccgcgcttacgcagcagttccaggctcggcagcagcttggaggtgccgggcagggagatgccttcgcgcaccacatcgcgcacgatcttggcgttcggatcgcgcacgtccagcagatcgcgcacatgcacgaagccgatcacgtcgtcgaaatccttgccggtcaccgggtaacgggagtacggctggtcgcgtacgaacgcggcggcctcggccaagggctggtcgccctcgatgaagaccacgtcggcacgcgggcgcatcacctcggcgacgatggtttcggacgcgtcgaacacatcgtccagaatcgtgcgttcgtccttggagaggttggtgttggagctgaccagcacgcgcagctcgtcgtcggacacctcggactcggtctgctgcgggtcgaagccgagcaggcggacgatgccgttcgtgttcttgccgatgagccagatgatcgggcggcagattgtggcgaacgcgtcgatggcgggtaccacggcgcgcgcgatctgctcggtgcgctgcatggcgatgcgcttgggcaccatctcggagatcacgatggagcagtaggagatgatgagggtcaggatgatgttcaccaggccgccggcgatgccggggtgcacgccccagctttcgaccaccggaatcaggtagggggcgatggaggaggcaccgaacgaggcggacaggaagccggagagcgtcacgccgatttgcacggtggagaggaaggtgttcgggtcacgtgcgattttggcgactttggcgccgcgagcgtcctcctgctccatttgctcgatctgcgagccgcgcagagagaccaatgccaactcggtgccggagaacacggaaccgataacgagaaatacaaaaatcaggaggatgttcaaa

SEQ ID NO: 1951 - DNA, 3580 bp, Unknown
  R17_18m  MAG No. k141_9601
attacgaagctgatgagaccgcaaccggggaaggtgaacacccaggtgagcatcatgtcgcgcaccacgccgaagttgatggcggagaggcggcgtaccgcgcccacgcccatgatggtgctgcacaggatcatgagccagaccagaatcatcacaccggtcacgctgggttggccattgcagaacgccatgccgaggaacagcacgccgatgaacttctggccgtcctgcgcgccatgcataaagctcatggccgccgcgcccacgatctgcgcgtaggtgaagaacccgttggtgcggcggcggtccatgccggcgcagatcagggtcacggccttgcacaccaaccaacggaacgggggcaggctcatactttgcttcgatatgctcgtcgacatttcccgtcatctaccgaggattcggtcatgcgtgtgcgaaaatggacacggtgtcaatcaggaggtgcacagtggttgtaagcacggattcgagccgcacaatgcccgattgggtgaagtacggggtgttctggcacgtgtatccgctgggcttctgcggcaccgatatcaggcccgccggcccgcgccagttccatggccgcggccttgacgcgatgatcccttggctggagtacgtgcgcgatctaggcgcgtccggcctgctgctgggtccggtgttcgagtcggcgacgcatggatacgacacgctcgaccatatgcacatcgatgtgcgattgggcggggatgccgcgttcgaccagctgattgcgacctgccgggacatgggattgcaagtgatattggatggcgtgttcaatcatgtgagccgcgatcatcctgccgtccgggcgtcgcttgacgaagccgccggccgcttgaatccggccgacaacccgtggcatggtctggtccgcgcgcatgtcggtgataatgacgaacccgctttggatgtgttcgaggggcacggggatctggtggcgctggaccattcggctgacgagaccgttgactatgtggtccatgtgatgagccattggctggatcgcggagccgccggctggcgcctcgacgccgcgtatgccgtgccgagcccgttctgggcgcgcgtgttgccgcaggtcaaagccgcacacccgtattcgtggattttcggtgaggtgatccatggcgattacccgcgcatcatcgaggaatccacgatggattcgatcacgcaatacgagctatggaagtcgatccagcatgcgctggagacggagaacttcttcgagctggattggaatctcaagcggcacaacgcgttcctgaattccttcgtgccgcagacgttcatcggcaaccatgacgtgacgcgtatcgcatcgcagattggcccggccaaggcggcgttggcattggcggtgctcatgacggtcggcggcgtgccaagcatctattacggcgacgagcagggctatgtgggcgtcaagcaggagcgtttcggcggcgatgacgacgtacgtccgaagttccccgactcccctgccgaactgtccacgctgggagagccgacataccggctgcatcaggcgctgatcgcgctgcgccgtcgcaacccatggctgatggatgcgcgtaccgaggccgtgaagctggaaaacaagcacttcgtctatcgctcagtgagcgccgacgcccaacactccctaaccgtggacctcaacatcgagcaatcccccaccttcaccatccacaacgccgacggcagtacagcgtatcaatactgagctacctcatcagagggagctcaccatttaccgccgaatgcctcggatcagcaggtcgagcaggtacccgtacgaccggtcgacccgttcgcggccgcgtgtgcggggttgggcggaacgcagttcgaattggatgaacccgtgtatggacacccagatggaggatgcaatcaggtgagggtcatcgtcgcggatgcgaccgagtcatccagcaatctgcgcagggtgcccggcagggagccggaaatggattcggcagccatcacggattccttggatgcgccaaggatgtcctggggcaggtaggatcctcgcggcgcgtccgtcaggccggtggtgtacgtaccggcctgcagcgaccccatgatgccgacgccgagcgtgccactgagttcgcggatcgtgtcgttgacggcactgcccataccttcctcgctgatcggcacggccgtcatcagtgtgtcggtggcggtccctggacgagggcgatgcctgcggccatgacggccgcgaacggcagtgtggcaatcgccgtctcgagcgccgaacacccacgcagcacctggaaccattaggtcgtgaggaagatgaaaccgaacaggcacaggaaggcggcgcaaatggccaacgtgccgatgacggcgcacacccagaacacgctatcccatgcgaaccgttgcagcaggatgccgccgatgaccgggccgagcgctatgcccaccccggatgtgccgacccacagtccgacggccagcccacgcataggcgatccgtcgaacaacccgatgatggatgacagcgcggctcccatcaagttgtgtattaatataccatatttatgaaacattgatacacatcatgtcgggaacaggcatccgcatcgaaaacaccgacctacaacacaatcaggcccgacgaccatcaaaggtcgtcgggcctgattcatacgcgctgtcggactaacggcgtccggacttcatacggaatggcgcattgttgcgattcttcttggaatggcggcggtttgggccttccgtgttgccgtatttggcgatcatgcggcgttcgtgacgcttggcaccttctgaacgctcgtcgcgtacgatgcggttctcgttcttgcgatggatgcgcttgtcgaattttccgcccttgccgtaccgatcattgcgacggttcttgccgtactcgttgcggccatcgtcctggcgctcgtcgtaacggtttttgccgtatccgtcgcgacggccgcccttacggcggtcatcgccatgctcgaacagatagtcgcggcgctcggcctcgaggttgctcatgccggcgcggcgttccgcacggttgcggttcttcttcacggccttcttgctggccttgtcgccgtgcttgcgctgcggctcgccttcggcaacaaactcgccaccttcgttctcgtgctggaattcggtcttggcaacgttctgctcgtcgcgattgcgattgcgattgccgccgcggccggactcgtcgcccgccgcgttcttggcacccttgttcttgcccttgcgcgggttgcccacgggctgcgacttgtcgaggctccagccatccacgcgctcggcgcggtcgcccacaagctcaagcacttcgggcgaatcgtgggtcacttcaatcatcttggtcttgatgccggcctggttcagcaagcggcgcgtctcgcggcgctgctcgggcagcacgagggtgaccacgtcgcccgccttgccggcgcgggcggtacgaccggagcggtgtacaaaggacttcgggtcggccggcggctcgacctgcaccacgagc

SEQ ID NO: 1952 - DNA, 9268 bp, Unknown
  R17_18m  MAG No. k141_9722
accatcgtgaccaccatcgtgatcaacgtgatcgccttcgccatcgcctacatgctgaccaaggcgatcaagggctccacgctgttccgctcggtattcttcatgccgaaccttatcggcggcatcatcctgggctacatctggctgctgctcctgaacggcgtactagcccactggggccgcgccctgacctataaggcgtcctacgggttctggggcttggtcatcctggtgtgctggcagcagatcggctacatgatgatcatctacatcgccggcctgcaggccctgcccaccgacgtgctggaggccgcggccgtggacggcgccaacggacggcagaccatgttccgcatcatcatcccgctgatgatgccgtccatcaccgtgtgctccttcctgaccgtgaccaacggtttcaagctctacgatcagaacctcgcattgaccaacggtgcgccgagcaacatgtctgaaggtctggcgctgaacatcacccgcaccttctacggccgtatgggctgggaaggcgtcggccaggcgaaggccgtgctgttcttcatcctggtcgcggtcatcgccctgattcagaacaagctcaccacgagcaaggaggtggcagcctgatgaacgagaacaagcctgtgaagcatggcgcattatggaccgtgctgtttgccgtcgtctccctgttctggattttcccgatcgtcctggtgctgatcaactccttcaagcagaaggcgtacatctccaagaacgcgttctccctgcctgccggcaaggcgttcgtgggacttgagaactatgtgcgcggcatcgagaccacgcagttcttcgcctccttcggctggacgctgcttatcaccgtcggctcggtggtgctgattctggtgtgcacctcgatgtgcgcatggtggatcgtgcgcgtgaacaactgggccgcgaagctgctctacaccctgttcctgttcaatatgatcgtgccgttccagatggtgatgttcaccctctccaagatcgccgacatgctgaagctcaataccccgtggggcctgtgcatcgtgtacctcggtttcggggccggtctggccgtgttcatcttcaccggcgtgatcaagggcatcccgcaggagcttgaggagtccgccatgatcgacggcgcgtcagtgccgcgcatcttcttccagatcgtggtgccaatcatgaagccgtcgatcgtctcggtggccatcctcgaagccatgtggatctggaacgattacctgctgccgtacctgacgctcgacctcggcaaatacaagaccatctcggtcgccgtgcaatacctcaagggcggctacggttccgtggatatgggcgccatgatggcctgcctggtgctggcaatcatccccatcatcgtcttctacttggtatgccagaagtatatagtctctggtgtcatggcgggagccgtcaagggctgacgactcgcgtcgtcagcccatggctggaagcccagtgggcttccagcaggctccaggctgagccgcgacagcggcgaagctaatgatgagcctcgtcgtaggcgagtccgtaattgcagggccgaaggcggagcggtcaagggctgagctccaccaatccggctcccctctttgagggggagccgtcggcggaagccgactgaggggagtatcctgagctccatcaagtctcccctcagtcatctgcgatgacagctcccctcagagaggggagccacaggcgacacaaggagtagttgatgaactggctggcaccggactcgaaattcatgcgcgcgtggagcaatcttgttgacggcgtatggatcaacattctgatgctggtcacttcgattccgctcatcaccatcggtgcggccctgaccgccggccatgatgcttgccgccgctccatcgagggcgagggcaaaggcgtaaccgccaactacttcaagtcattcaaagccaacttcatcaaagccacactgctgtggctgccgttcttggtggtgctgattgcactggtctggtcatggatcgtcctgcagatcacgccgctgctcatcatcaaattcgcgctgaccatcctctggcttatcggcttcgaatgggtgttcgcgcttcaggcacgcttcgagaacaccgtggccggcaccttgaagaacgccttcatcttcggtatctcccacatcgcgatgaccgtggccctggtcatcgtggatgccgtgttcgtggcgctgctggtggccagctggttctacatgcccggtggactgttcctgctggtgattcttggttacggcaccatgctgatgctccatatccccgtcaccgagcgtgttttcaatccatatctcattgactaggcgggttctctcgcgaatatgcggcgatcttcgaggtctgagcgttctctgtccacgcaagcgcggtaaagataacaaattgataacagtttggggcggctggcggagcggggtgccgattgaggggtattagtgattggcttggaagggggcttttggcatacggggagtgttcgggctgggcggttgccccctgtaagtgcttatatacataaggaatctggcacactgagtctcagtgccgtaatggtatcatcgcaaataatgtttgcgttcacgtagatgcgaacgagacacccgacaagtgggtcgaggcaaagggcaaggagagatgcggtgaagcattggaagaagatggcagcatcgttggttgcaatatcaacgatgctggcagtagttccgacgacgtatgccatggagtcggaagattcccaaccacagacaaccgataccgcgacagtgcagactactaaggctgctgaaccgacgctgctcgccagctgggacttcacgggcaaaaacggcaccacgaacagcgcgattgccgattcgaccggcaagtacaacctgacgctgaaagacaacgccaagatcgaacagtacggtgaccgcagcaacaacgaggcgctctcactgcgcggcgatggccagtacgcccagatcgatgaccagctgttcaaggacgccggcgactccttcactctggagttcgcgtccaagactcgtcacgacgacagcggcaagttcttctcgttcatcgtcggcaaggacggctcgaacgacgccaacaccaccgatcagtccaacgccaacaagtacctgatgttctacaacagcaagaccgccatcaagggcgttatctccaacaacaactggggtaacgaacagggatccaaggtcaccgtttccggcaacgacaacagctgggccgattacaagattgtcgtggacggcaccaaccttgccgtgttccgcaacaatgccctgattattttcaaggccaacaccggcatcaagatgagcgatctcggcgcgaccaccgcctacatcggcaagtcgttctactccgtcgatgagtactggaatggtgcaatggatgacatcaaggtctacaggggcgctgacctgaccatgccgaccgccgttgcgatttccggcaccggtgtggtgaacaacaagctcaccctgattgagaaggactccaccaagctcgccgccaccgtcaccccggacgacgccgtgagcaagaacgtcacctggtcctcctccgatgagtccgtggccaaggtcgccgcagacggtactgtaaccggcgttaaggctggtactgccaccatcaccgccaccactgagctgggtggtgtgaaggccgaactgcccgtcaccgttgagccgatgaacgcccagaacgccgccgcagccgacctcgatgccgcgattgctgcgctgaaagttccggcggccgagaatctgccgctagtcgccaagggcaccaagaacggctcggcgattacgtggaagtcctcggacgagaagctcattacgtccactaacgagaagtacgaaaacaagaccactggtgccgatgacccgtatcgtggtgctggcatcatcaatcgtccggcctacggcgacggtgattccaagccggttacgctgaccgccaccgcttcctacaacggcggtgagaaggtcaccaagaccatcgaggtcactgtcaaggagaagacccgcatcgcgcctgacaccggctatgcggccgtcacttttgagagcgacagcaacggtggagaaaaggcctgggtggcttccactgagaagaacgatttcttcacgtttaagactcgcaacaatggccaggcggtacttaccaatgatgcagacacgggtggcttgcgtgacatgttcgtgctgcgttcccacgaaggcgacaagtactacctgattgccactgatctcaaggtctcgtcaatgggctggagccagaaccaggttaacggttctcggaaagttgaggtctacgagtccaccgatatgatgaactggacccgtaccaacggcgacggcaacggcggcatcaccatcaacacgccgaacgccggtatgacctgggcgccggaagcttactgggatgatgacctgaacgcttacgtggtgttcttctcttcccgcatgttcactgatgacacccgtaccactccggtcaagaacgacaaaaccggcaatagctcctatgctcaggtgcgttacgccatcacccgcgacttcgtgaacttcaccgagccgcagatgtggcaggacaccggctactcgcgcattgattccaccgtgcgtaagatcggtggctactactaccgattcaccaagaatgagcagggcggtgccgctggcgattacatcaccactggtaagagcatcttccttgagcgttccaaggtgctgactgcaccgaccaccgaggcatctccgggtcaggacccgaacaccggttggcagctgctcgagcaggcattgctgccgttcgaaggaccagagaccatcaagctcaacaaggatgacgaactcaacacgaaggacgacgacggctacattctgctgtccgacaacttcgcctaccgtgcatttatgaccacgggtgccgagctttccaagaccacgtgggacaacccgatgaccaagcgttacccggacttcaacaacgaaaagaagccggtcaaagccgagccgggcgctcagggctacatcactcagggtgctaacggcggtctgccggacaaggtgcgtcacggtgcgttcgtgaacgtgactgagtctgtgctcaaggtgacgaagtcctggaccgctgccaacccgacgcacatcgaggctgttgactccaccaccaaggccgtgtacaacgccggcacccgcgagctcaccgccacggtgaccgccgccgataagggcacgctcgccggttcggtgaagttctctgctggcgactggtccaagaccgtgaagctcgacgccgaaggcaaggccactgtgaccctcccggccagcgtctctggcactgttgcggttgcttacgacggctacaccgatggtttggtcaatccatccgatactacggttgacggcattgaacagggcaaggtcgatttggctgagctcaacaagcagatcgccgccgccgaagcgctcaaggaatccgactacacggccgattcctgggccaagcttgccgccgcgctgaagactgccaaggccgcgctcgccgctgagaatcagggcgaggtcgataccgccgcagccgaccttaagaccgcaatcgaagccctgcagaaggctccgaccaatccgggcgaaggtgacggagataagggcgacggcaataagccgactaccccgaccaccggcgacaagaccaacgtcaacaagcccggcagcgcgctgagcaataccggtacggccgtgctcggcctgggtggtgccgtggtagcactcgccatcgccggcatctccctaaccctctggcgcaagcgtcgcgcctgagctgctacggcaaccaagcccccctctgacgagggggggctgtcagccgaaggctgactgggggagagaccgcggcgaagccaccgaaagaacggcatggccttcggccgattctgtatcccgcggctgccgccgcaggtctctcccccgactgcctaacggcggccacctcgaacgcaattaaggaccagctttcagctggcttcatatttgctcactgtcgttcgccttcgcctaaaaacgactctggcgttttcttcacggctcagctcatcagagggcggccacaaaacttcgctccataactgaaggcgcaaccacaatcaaccctatcaatgaggagaaacatggggaagctgatacgaaaggcaaccggactcacggtcggcgtggcaacactgctcgctggtctggtgctgccgatgacggccagtgccgagagcgcatcgccaatcgatgccagtccgatcatccactattcattcgataacgcactgacgtccaagaccatcgccaacgagggcagcgcggccaacagcgatgccaccctatccggcgacgccacggtggccaatggccagatcaacctgaccggctcgcaaaccattagcgtgccgaccacggccatcgccggtaagaaggacgtcaccgtctccatctggctcaagaacaattacggcaacggcaataccgccgccgcgtacatcggcgcggccaagaccggcaattatccggccaacggttactggctgctcaacccggccaacccgagtggctacgcgaaatccgtaatgaccaatgccactgcggccgacccgaataacagcccgtggggcaccgaagtcggccctggatcgacgaacgccgccatcaccggcaccaaggccaccagcgatttggctctgtacaccaccgtcatcaacggcaccaacagcactatgagcttctacctcaacggcaagcaggttggagacgccacctacgccattccggccggtggcctgaccaattacggcgatctcgtcgcctacattggcaagtcctcctacgctgacccgaactccaagctcgacgtggacgattacgccgtatacgacactgccatcagcgccgcagacgtgaccaagctgtatgacgctcaggtgctcgacaaggccgaggccgctgtcaaggccgctgtgcccgcatccgctaccgaggacttcgcgctgccgaccagcgccgctggcgtgagcatcgcgtggaagtcggacaacgcagctatcgccgttgacaacgctaccggcaaggccacagtcactcgtccggccgcaaccgcagctgatgccgaggtgaccctcaccgccacgttcggcaacaacgccaaaaccgccgcctacacggtcctcgtgccgaagcagctctccgatgccgagcaagccaaggccgaccttgacgccgtcaccatcgaggactccgacgacatccgtagcaacttctccgtgcccaccaagggcgacaacggttcgaccatctcgtggggagtgaccggtggcaaggatatcgccacactaggcgaaggcgtgagcgacaaatctcgaacggtcactgttaagcgccctgccgccggtagcgatgccgccactgtgacgctcaaagccactgccaagtacgataccgccactgaaactaagaccttcaccgtcaccattcagccgatgcctgccgccgaagagaaggacgaggcctacgtgtgggcgttcttcaccggcgagggcgtgggcggcgagaaaatcagcctcgcggcctccaagggcaacgatgcgctcgactggaacacgctgaacaatggcactccgctgttcacttccgagtttggcgagaagggtttgcgcgatccgttcatcatgaagtccaaggatggtgacaagttctacatgcttgctaccgatctgaagattgacggtcgtgcccccctcaacgggctgaatggctttgctggtgcacaggctaacggttccaagtacattgagatctggaagtccgacgatctggtcaactggtccaagcaaagccacgtcaaagtgagctctgattacgcaggcaacacttgggcgcctgaggcctactacgacgaggaaatcggcaagtacgtggtctattgggcctcgaacctgtacgacaacaccgacgagaacagccgcaagcagctgacctacaaccgcatggtgtacgtcaccaccgatgacttcgtcaacttctccgacccgacagtgtggattgacgttgatcgccgaggcggtgcaggcagtggatccatcgatgtgaccgtgcaaaaggtaggggatacctactaccgcatctacaaagatgaaaacacgatgtctttgcgtcaggagaagtccacagatttgactgccgcaattggtggtgccggcgtgaagaactacgccgatgcgcttaagggtagtgcatggagcgaagttgccacgaacatcggtaaaggccaggctaacggttacggtaaaaccttcacttccggcgaaggtccatcgctattcaaggccaacgatggcgatgtgaacggctaccagtactacctgttcgccgaccagccgagctatcatcaaggtccaaaccactatgtgccgatggcgactgaggatatcgccagcggtcagtggaccgttatcggcaataagatgcctgaggcgaacttcccgaccaattccgatggcggcaagccgcgccacggaaccgtgctgcccgtgacccgcgcccagtaccagaaggtgctggaggcatacgccccggctgtggctgtgaagtccgttgacgcgctgtctgccgagacaacggttggtgtggctccgacgctgccggagaccgcgcatctgactcatgcggacggttccgtttctgacgttgcagttgagtgggatgccattgacgcatctttctacgccaagaccggcaccttcaccgtcaagggcatcacccaagacgattcccgtatgccggttgaggctaccgtcattgtgaacggcatcgacctctccaaggcgaccgtcaccgtcgaacccaacgagttcaccgcagacggcgctgccaaggaaccagccgtgaccgttgtactcgatggcgcgacgctcaaggaaggcgccgactacacggtggcctatacgaacaacgtcgaacctggcactgccacagtgaccgtaaccggcgctggcaagtactccggtactgtctcggcaacgttcaccatcaaggccgccgagcccggctccacgctggacaagtccaagttgcaggcgcttgtcgataaggtgaagggctataacaaggctgattaccagtctggttgggatgctttcgccg

SEQ ID NO: 1953 - DNA, 3688 bp, Unknown
  R17_18m  MAG No. k141_10082
gattattcttgggtgcctgtaggtgcctcgtggaaaacgagcgtaaccggcaggtttcccaaaaatcgaaaaccttggaacaaagccaaaaacagttggctaggattatcatgcgaggtgcgcatgataatggtagccatggctccaagtgtctcatgggcttgagaccggcgatggtgcgattgcgggaatggcgcggagagccgtggactggccgcggccgatagccgggaagccgagccgcagcgtgaagcgtcatgcgagttgtctcgcgatggccaacgcgccggcaacgaccatgagcgccgagaagacacgcagaagagtccttttgcgttctcttcccggtttttggatccgatcacgacggatatcaggaccaatccgacggccagcggcaccaaggccagcagaaacagcggtttttccatggcatctcatctcgaatgctgtggttcagatttttcgatgttcggtttttctgcgcttactgacaagagccatggagcagcatgccgatacgcacagattcactatgcaggtcgccgccggcagtagccgtatgaacggctgactgtagaaatcgaggacatctggatccatagatcctgagtatatttcaaaaaccggatatgatgcgagagccggcgccgaactcacgaggaacagtatccaaatgacgggcaatctcaggatggatactgttcggcctttccgatggacttctttcgagaacatgaaaagagcccaagaggtcactgcgattaatgcacccgcgcaatacaacagaccagagaactcgctacgcatgattccgtcctcacttcagtcgcaggtaatttggcttatcgatcttctggctggttcgagattaccatacctgacatggcagtcgaattgcctgttgtctattggcagagcatccgactgttaatcggacggtcgctggttcaagcccagccgcaggagccagacaaaaacccggaacttcggttccgggtttttgttacccgccccccccgaaactcctttatcaaggaatcatccataagggatgccgcagcagacggtctccaaggcactacaccgtgctcatccccatggacgacggcaactggcacgtcaccgtgtactgtcccgcctcgctggacagcccactgctcgacaaggattccaacgaattcgacacggacgacgtgaaacccggcgacaagtcgtacaccgttgccaatccattccacctggatcacgcacccggaacagacggtttcatcttcggccctgacaccctccgacgatagcgatggactaaccattcaaccgcacgcgtaggaggagcgcattccaaccatgaatgaatgacatatagacgtcaagggcttgcggacatcgtgtccgcaagcccttgacgtctcaatccaacgaaatatcgacttttacccgtttgtcggattcaggctttcgcgcaagtccggcgatgaggagggccaccagcagggggatcgtcgtcagtgtaccccaggaaatcgagaacgtgtcggcgatgtagccgcacagcggggtgacgaccgcggtgaaggccatcaatacgagcgatcccacggagaacgcggtcgcgcggatcgaatcgtcaatgctctcgtgcaagctgctggagatcatgttcgccacggacatctgcgcgcaggagaacacgaagaacgccaggatcctcaccgccggcatcggcgtggccgcaagcaccaccgccgacacgatgagcacgaggatcgcaatgtcgccggaacgtggatgcagccgtagcatacccagacgactgccgacgatctgcgcgatattagtgaacactaggccggcgaactgccaccagaccccggtctggtggcccatcagcagcagctgccagaacgtcagcaccgacaacgtacccagattgaacaccaccatattccatatctccggcttccgcagcagcacggccgcggccgcgacggtctgcctgacatgatccaacaccgtcagcgaggtcccggactcgcccggctcggcggatccatcggattcgacggacgcctcggcctgccgttccgtcgtcccgctcccatccgtcgctgcggccttggtgcgcgacccggccctcatcagaccgagaagcgggatgatcgccaatacgtagaacaccgtcgcgcccagccagatcagctgggagtcaagcaggaacagcacggcaccgaccgcaccgccgcatatcgtgcacacagcgatcatcgccgacagtcttgacaccaaggtcttcatacccagcgagggatcgtgcttgcgggcgtattcgatgtacagcgaggacgccgcgccgctttcgaccgcggccccgatgccggccagcacgttggccaggcacagcacggcgaagttcgcggaccagaacagcatcaatatgaatcccgcgacgcggcacaacacgccgatgatcagcgtccgttcccgggaccaccggtcgaacagcacggacgtgggcagctcgctggccgattcgctgacgtcgaacaccacattgacgatggagatcagcagcaccgacaggcccacatcatgataggccaccatatagtagaccgaaaaacatccggtaccaagataaataagcgcattatacaaacaggcaaaccgaaccatcaatcattcccttacataaacaaagaaccggtatacgtgggactgtctctcgaagtgtgtaactggccttaactggccggtcgtgtggccggtcggaaaggctggtggacgatgtgtgctgggacaatgggaaacatgacaccgacgaagaagccggacgcggaaaaacgcaacgccgagcgggaggcagcgctcacattcgtgcgcatggccaaggaaaaaggactggacctgacagggcccgacggactgctcaaacagttcaccaaaagcgtgctggagacggccctggacgaggagatgaccgagcacctgggccgcgccaagcacaagaaatccaaggacggcagggccgcgaacacgcgcaacggcaccaccgccaagaccgtggtcaccgattcggtaggtccggtcaggatcgaggtgccgcgagaccgcgatggctcgttcgagccggtcgtcgtcaggaaacggcagcggcggctgcccggggtgggcgaggtggtgctgtccctgtatgccaggggcctgaccaccggcgagatcagcgcccacttccaggagatctacggggcggacgtgtccagggagaccgtcagtcgcatcaccgagcgggtcgtggccgagaaggacgaatggtgctcgcgttccctggatcgtgtgtacgcggccgtgtccatcgacgcgaccgtcgtcaaggtgcgcgacgggcaggtcgccaaccgcgcgttctacgtggccgttggcgtggatctggagggcgaccgcgacgtgctgggcatctggacgtcgcccgccgccgcggcggcggcccgcgacgcgatgctggacaagtgggaggcgagatatcccgcgatccgcaggctgtgggtggacgcgtgggaacggttcataccgttcctggactatgacgtggagatccggcgcgtgatctgcacgaccaacgccatcgaatcgctcaacgcgagattcaagcgctccattcgcgcccgcggccacttccccgacgagc

SEQ ID NO: 1954 - DNA, 18124 bp, Unknown
  R17_18m  MAG No. k141_11086
cgcagcatacgacggtcatcaagcacatcgtggtacaggtcacgcaggaacgcaagtcgttcacgcagcaaactgttttcgtcacgcatgaatcgcaggttttcgcgattgcgcatctgtacatacccgcatactgcgcccgcaacgaaatacactacaaacgtaatccagttcgacgtatcgtaaaacagtggcgcgaatgacgcaccgttcgacgcgtacgacaacgccatgccggcacatgcgagcgcggccgcgaacacgcctgcgttcagtccgtacatcgtgccaacgatcaccacgaaaaacaggcgcaaatccacggttcccaactggctgtcgccttgtaccgcggtgcgaagcagttcttccaatatgaacgtgaggaagatttcgattgcgatccatggttttgaatggttgcgtagaaaatcccagatcgggtgctttccggattgttcctgcgcacgcgcctctttccagcgttgaagtacagggggaagatcctgtttgagcgaatatcgcggcgaccagccatagcgcaatcgcagcacatgatcgtctgctgggtaacattgggacctgtcttcgccaaaagtcaccgataatccgggaaatgccgcgttaatcacatcagccaaatcaccgtatgtgaagtcaaacgcgttgggcacgtggaatacttcgctttcggcggtccaatcgtcgaacatgcggtagatcagttcggcaagatcgtcggcgcagagaaagcatgtctgctggttcttttgctcgcagaacgacaatgtgcccgattccgcctgttcaaatagatgattgaaatatgcggtgacgccgttgcgatccgacgcatacaggtacgggcttcgaatgattttcgcttccagacggtaggtgcgtacgtagtacaggcagagttcttccgacgctcgagacatcagacttttgctggtatcacgtacgtcggcgttttccggataggtaaattcggattcggggccgctgaccatcagtatttgcgtttgcctgttgcgaatggcatgcagaagtcttcgcaatgctcccagatcgccgtctctatcgctgcgtggggtcagattttcggaaaagaatacgatgcgatcaaattcgtatgtggtgatggtgtcgacaagggtgttggcgtcagacatgttgacgattctgagacggtcattgccgtctacagtgccttctcgttccgctatcaccacatggtctcggggaaaagcatgctgaatccactgtttggtaatgaaatcggtattaccgaccaaaagcacttccatgctgccgccccagtgaatactcccttaaacggggttatggcatagttctgcccacaaaccctccattgttcctgccttacggtattccagtgtaatccgttaacagacaaaatcaccccctcaacgggggcaacgggggggtattagtcactgctaagtaacgcataagatggcacacccgtacggggcattgacacgctcacatcacggattcagcaagacctgagattgagagagccatgaccgaagcatctgccctttcaaaaaatgacaaattcagcgttattgtctacggcttgctgcacgcatgccaccgcacgcctgccacgatgcgtccgcatataaaaagctggctcccctcaggagagggaagccagctgtattacgccgtgcgattgcctcgcttcagcccttacttcgcgagtctggcgtactcgtcaaccatgaactgggcgatcttcttgccgccttcgcccagcagggtgggcagcgagttgatcggcatggagttgaggaacatgcgcatcatggcgttgtcgggcagcttcgtcagctcgccggcctcgccggcggcggccacggcggccacgatcttggcgccgaacggatcggcctcccactcgccgtaggtggaccattcggtgagcggctgggtcttgccgtcgccatcgagggccacggcaacggtgccggcaatgtcgcgggagctcacgcccacttcgatggcatattcgccggcctccacgtgccagtcgttgtatttttcggaccagtaggcgaacgcgcgctcatcgaggtcgatggtcacggtcttggattcgccggccttgaggaacaccttggtgaagcccttgagctcgtgcttcgggcgggccacgtcggccttgcccggagccacgtacacctgcacggtttcggaggcatccacatcggaggtgttggtcacggtggcggtcacggtggcggtgttcgcgccggtcttggcggcggcgacgtcagcgatctcgaatgtggcgtagctcaggccgtagccgaacgggtagtccacaaccttgccgtaggtgtcgtagtagcggtagccgacgaacacgccctcgccgtagtcgacgtggccttcctcgcccggccagttcagcatgctcgggtcatcgttgatgtccagcggaatcgactgggcgagcttgccggacgggctgacctggccgaagatcacatcggcgagcgccgggccaccggactggccgagcagccaggattcgaggatgcccttggcgttcttggcccacggggccacggagaccacggagccgttggacagcacgaccacgacgttctggttcgcggcggcgacctgttcgagcagggcgatctgcttggcgggcatgtcgagggtgtcgcggtcgaagccctcggattccgcggcttccggcaggcccaggaacatgaggaccacgtcggcgttcttggcggtttccacggcttcggattcgagggccgggtcggccggttccagatcgagcgtgaagccgggggcgaagtcggccttgatgccgcgttcggcgagcgtgtcgaggaagctggtcagcttggtgggggtgatatgggaggagccgccgccctggtagcgcggggtgcgggcgaattcgccgatgacggcgatcttccgggccgcggcagggtcggcgttcagcggcagaatcgcatcgtcgttcttgagcaggacgatggattcgatggcggcctggtgggccacttcgtcgtgcgcgtccacgtcgaaacggtagccgtcgatgctcatcgcggcgcgggccttgttgatgaggtcgatcatgccctgggccatgcggtcgagctgggcgggggcgatgcggccatcgcgggcggcgtagacaatctggtcgtcggtgtagctcggcggcatttccaggttgaggccggcgttcagggaggccacgcggtcatggtcggcgccccagtcggacatgacgatgccctcgaagccccattcgtcgcgcagcacgtcggtcagcagccagtgattctgggcggagtgcacgccgttgatacggttgtaggagcacatgatggtccacggctgggcggtcttgacgatgtgttcgaaggccggcaggtagatctcgcgcagggcgcgctggctgatgcgggcatcgacgcgcagacggtcggtctcctggttgttggcggcgaagtgcttgagcgaggtgcccacgcccttggactgcacgccggcgacgatgccgatggcttcatgaccggccaggtacgggtcttcggaccagtattcgaagcagcggccgccgagcgggttgcgcttgatgttgacgccggggcccaggatcacggccaccttctcctggatgcactcctcggccatcgcctcgccgaccttgtggatgagttccgggttccaggagctggacaggccggccgccggcgggaagcaggtggcgggcacggagttgtcgagatcggtctcgccggtgctggaggtcagggacttgcgcaggccgtgggggccgtcggtgatcatgtagccggggatgcctttggcttccacgccctgcaggtgccaggcgtcgccgccggaggtgagggacgccttctcttccagggtcaaatccttgacggacgggtaggtggactcgctcatgttgcctctttccttgagtttcttgagttgtgcggttgtccgatatgcgttggctccgattcggccgggctgcctggctgttgttcgaggttcctccacgaatctcgactgccgttttctctcgaccaaccggttggtaggcagattatcaaaatctacggcacaacacgccgaaatcatttggaatcactactaaccgaccgtaaggttgcctgtatgaacgacccctctcccacagacaccgatcgccgtaccgcgattctcgacgccgccgtcgaatcgtttggcaaacttggctattacggcacgtctctgcaacgcatcgccaccgaagtgggactcaccaaggccggcgtgctgcattacgtgggcagcaaggagggactgctcaagctggcgctgaccgagaaatacgaccggatcaccgaatcgatcaacgccgcgatggtcgcccaggagcgcccgcttatcgcggatatgtggcgtcaggtggtggctgtgaacaacaagaggcccgcgttggtgcatatgttctccacgctgagcgccgaggcgctcgacccggcccaccccgcgcacgattatttcgccgaccgcgagcgccgcacggtcaccacggcgctcaacatcaactgggccgtgccggaaggcgtcaatgtcggacatgtgctgcaggccggattctcgatgatggacggcctccagctgcgctggctgcgcgcccccggccaagatctcaataccatgtgggccgattgcgaggatgttctgatgcctttgcccctttgggagggatatcgctaattggtgcggctgcaggccatccaaccggcgtgccaaacgtgggtgaggtcccatgggtcgagccgtgacgtgtcggattgcgggtcgatggtgggcaggaaagcgcgattgccgcgcagttggtagctccagtagatctgcccggcagatgcgctccacgctttgcgctgcatggcggcgacctcgcgatagacggcattcctcgctgaaggggttcggttcaccagattgttggccacgcaccactcccctacaatcaccggcgtatagcgcgcggcccggcggatgcggcgttcgttccagcgcacgaacaagcgataccagcccatcagccaccgatccgggatcagacggaacagcgggaattgctcggccataaccagatagacatgcgtatcgagcatgacgccccgcatgccctcgcgcacgaaccagtcccgccaacggcccagtcggaagccgtcatggaacacgatgacttgattccctgccagaatcgggcgcaaccggtggtatgtctcgcggtagaaacgcttgaggaacgccatcggaataggcccgcttcctcgcgcttcggaccggtctttcgcctgcctgctcgatggtgacatggcatacgtcagccagtcaatcggctcattcagcacttcgataccgaacagcgccgcgtggtcgcgataccggcgagccagacggaccagcacatccagcgcataggcgaccgctcgcgggctacgatgccagcgcaccacgccggtgaggccgccgttatcgaatccgttctgcgagccgggcaccgtgtgcaggtcgataagaatcttgagcccggcccgctcggcccagtcgaacgctctgtccagatactcggtacagcccgggtgaccgggcacatccccgaacacgaaatacggcactggaatacgcaccagattgcagccatgtgcggcaatgttccggaaatcggcctcggtaatatacgtgtcgcgatgccgcgtcagcaaagcctccagctcagccgacttcgtagcccgatgcagccagatctcgtccgcctcgccgctggcggcaaaaatccccggcttcatccaccgctccagcaccagccaattgccgaggttcaccccattaattcgttcgccaacacccagcgcgcccgatgccatacctgtcacgctaatcgttcaatgcttcaccgtagcgagcgaccaacccctgatttgcacgctcaaactcggggatgtaatcagcgatgatggcgtccacaagacgccgagctcgttcttcatcatagatatgagcagaatcattgcgatcgcgcagcatgcgcagccacaacgattcgtccatgaaatcatagtattgaaaagcggttttgagcacatctcgcggagagccggaagcggaaacagggtctccctcataagccagcagcgccttgaacagtttccaaccaagctcgaactgcaacccgaacttgtcaataatgccgctctggatgaaatcattgccgagatcctgttcgggagccttgcgcagcgaattcaatgcggaaacgtaattctcatactttttcatacagcacctttccgctacgctcaatctccgccctcagcgatgaagaaatcggctcatccagattgatgacatcaactttaagcagtgaccacagattgtcctgaaggttctgctccaagcgattgaaatcgggacaaccggccacggcaagatcgatatcgcttttaggccggttcacgccctttgcgcgagaaccgaacagcacgaccttgcgagcgccggcatcagcggcaaacgcgcgaatctggtcgtacacgtgctcgataggaaccatgacacctcccgccgcatccaacagtcccggaccaatcccggaccacccgcgcttccatcatacggccgcgtcccactcaccgcacggagcccgaaccacccgaacgcggcgacgtagttgcgggaggcgggctggcgctgtagggcgtgcgggaagttcctgacgtctacttttcaggaggtgaatcctcatgttcaccacgctttctctggccatcattctcgactgcaccgtacgcattgtgctcggcacggcattgggcgcgctgatagggctcgaacgccagttgcgcgcccgaagtgctcggcgtgcgctgggatgtggagcacatcaccacgtccgactgaaacgtccgactgacgctgaccagcaacatcgcaacagtacaacaagccaacaagtgggatggggcatcgagcctcatcccactttgttattatccggcgattgtcagactcactcacgccacggtgaacgtggtgcgcttcaggtcctcacggcgcgaggaggggccgatgagcagttcgaattcgccgggctcgacgatgcggttggcgtccgggtccacgatcgtgcagttcgccaccgggatctcgaaggtgacggtcttggtctcgccgggttccagtgcgacgcgctggaacgccttcaattcgcggtcggtccagctgtaggaggtcacgatgtcgccgatgtaggcctgcacgatctccacgccggcgcgctcgccggtgttggtgagggtgatttcggcacgtacggtgtcggtttcggcgaatgtgccgtcggcgttgcttgcgccgcccgtaatggtcggttcgccgtatgcgaacgtcgtgtagctcaggccttcgccgaacgcgaacgccggatcctgggtgaggtcggcgtaccggtcgccgtgctggccgcgaatctggttgtagtagactggcagctggcccgcgtggcgcgggaaggtgatcggcagtcggcccgacgggctggtcaggcccaggattatttcggcgatggcctgaccgccgcgcatgcccgggttcggcgcccacaggatggagccggtgccggtttcagggtcgctgacgcgcttggcgaacacgccgtactcccccacgatggaggcgggcaacacctgcggcttggagctgatgagcacggtgaccatcggcttgccggtttcgcgcgagacggcggcgagcgcgtcgagcagggcgttctggccaccgagcagttcgagcgtggcggtggagcaggtttcgccgaccagctggaccacgtcgccgaccacggccacgatcagatcggactggcgggcgttggccacggcttcgtcgatcattgctcgatcgacggcggcggaaacgccgattttcgggcgaggctggccgtccgggtagaactcgccggcagggtcaggcacgaggtcgatgacgttcgcgccgcgcgagtagaccacttcgcaatcgtcggaggtgagctgggtcaggccgtcgagcacggtggtaatcatgcctcgaggctggccatccggcatccaagagacctgaccggagttgccggtccagtcgccgagctggttctgggcgtcgtcggcaagcgggcctaccacagcgatgcgcttggccttgtttgcggcgaacggcagggcgccgtcgttgcgcagcagggcgacggattcgcgggcgagctccaggttgatttgctggtgttcggccgaaccgatgaccgccttgatacgttcggcgtccggcagacgcgggtcttcgaacaagccgaggcggaatttcagagctaggatgcgagctactgcgtcatcgatcagggattcgtcgagcagaccggtttttacggcttcgatggctccctcatagaactgtggggtggtcatgaccaggtcgttgccggccttgaccgcgtcggctgcggcgtgcacgtaatcgggcttgacatgctgctcccataccgagcggccgacgttgtcccaatcggtgatcagcgtgccgttgtattgccatgcgccgcgcagcttgtcggtcagcagccatttgttgaacgtgaccggcacgccttcgatggactcgtagccgagcatgaacgtgccgcagccttccttggccacgcgttcgaacggcggcaggaaccaggattcgagcttgcggtgggagaggtcggcttcggaggcgtcacggccgccctgggtctcggagtaaccggcgaaatgcttggcgcaggccaggatcgcgttcttcggcagggcctcgccggccttggcgccgccctggtagcccttgaccatggcggaggcgagttcgccgatcagcatcgggtcctcgccaaaggtctcgtccacgcggccccaacgggtgtcgcgggcgatgcacagcaccggggagaacgtccagtgcacgccggtgcaggagacctcttcggcggtggcgcggccagcggcttcgactttggcggcgtcccagctgacggccatgccgagctgggaggggaagatcgtggcgcccggccagaaggagtatccatggatgcagtcatctccgataatcaacgggatgcccagacgcgtcttctcattgacggtcttggcggcacgagataaatcctcggggctggtatgcagaatggatccgacatgcttattcacgatgagatcctcaagatcgccgccgcgggcgtcaagctgcatcatctggccgaccttctcctcaagtgtcatacgggagagcaagtcggcgattcgctcaccagcgggcaaatcaggattcttgtacggtaaggtttcagcagttgcggcaggcgtggtgttgtcggtcatacgaagtcgctttcctcagtgaaatcgaacagctttttaattaccaattggtagtttatctattgacagcatacaacacgcttatgccgcgcgcatcacatacaccaaaacgaccgtatgtatgcgaccccttcgttcgcccgcatacttactgccgctatcaagcacaagcctcggttcaaggcacacagcgaatcagcgatacccgtcccatatcggcgaaggaaatatcgccggctccagatcggcccattcatcgcataagtcaatggccggcccccgtaaccacctcagttgcacaccatccatgatctccagagcatggcgcaacgtgggccggacctcctcaaacgaggtgaattcggaaggcaggttccagttgtatgtcgaatagtatcgccatattgaatcccgacgattggcaaactcgtcatgtaacggatgcgcaggattgaacgattcgacctgcaatatcgagaacagctgaacaagcatggggcgcgtggaattgcaatgtaccaagaacctcagatacgcgggtaatctgaaatcatcgggcactgaaccaggcaggccggaggccatgaagtcttccacactgccaaacgtgttgtaattctcgtgatacatcgcggcaagcaggttatctttgctaggaaaatatcgcaaaactccctgcttggtaacaccgaccgcatcggccacatcctgcacagaagtaccgttgtagccacgctcggaaatcagtcgcacggcggcatcgagaatttcctgccggcgttcccccggcgacttgcgaacacgcttatgctgcaatgaattcccagatgtcatatccgccagtctatccgcattctccccactcccatgcgcaaccacatccaatatccttggccggatatgcaaaacggcgccaaaccaaaacattctgtcatgccttcgacaccgatatcgcgcaatagatttttctgtatatgcttcttcgcttactcctggaacacgtcggggtgcttcagatcgccggggatgtcggacaaaaggccttcgagccccaggaattccttccagaagtcgagcggctggccgtacggcgtggcttcgcggccgtgggcctgaatgttggccttggcctcgaacacctcttcctcgctgatgccctcgaagtagctttccaagcggtcgcgatgctcgggcacgtagaacagagaggacacaatctccgtcagacgttcggcacgctcgatcggcaaggaatcccagtggcgaagctcgatgaagttcttcaggcgtacgtcattgaagtgcgtggagatgatgtggttgatctcgtacgggttgagttcgcggtccgggtacacctcccccgcgttctcgcggaaggccgggcgatgcagttccttgggacttgctccagaagccacagcttcaggggtatgggtcaggtcagcgaacatgagcggcgtggacagcacgtcgatggcgtaatcctcccacccatagcgcgggtcgaacaggcccggcagcacattcgtgcgctggaagtcgagataatcccacatgcgctggcgcagcaacggccatgggttcgtctcaccttcgaaatacggggtgttgcggaagaagtacgccagaatcggaccgatgacggtgcccaaccgcagtttttcgatggaatcgcgctcgtccacgtagtcgatgctgacctgggtggaggcggagcaacgcatcatgcatgggccgaactgacccacgcggccgaggtagtcggtcattgcatcgtagcgatccttggggttgaccggcacatccgcaaagctggatttgggctggtaaccgtagttgaccagtcggaagtcgagatcgtcaagaatcggggcgagctcgcgatggaacttggaatacaacgtattcaggtcggacggcttcttcagaatgccgattgaagtctccacctggccgccgggttcgagcgagacggcgacgccggggcgcgcgagccccaccagatggccgttctcccagtattccttctcctcgtcgtagtacggagccaagcgtttgagcaatgcctcgatgccattcggctcgtagtagcttacggcggtgtcgtcgctgttgtgcacgggcaggtgctcgatctccacgccgaagccgccggtgccacgctgggagcgaccgttctcaaagaacttgagcaggctttcgacgtgcttggggttcggcttggcgagcaggtgcgcgtaactgattcggggagtaaccatgctttgtatcgtattcgagccggccggtgcgcgtgcccgaaagcccgtaatacgctatacgaaaaaccgatagcaggctccggcccggtttctcgctctagagactcccctcagtcgctgcgcgacagctcccctcacagaggccgagccgtaaagcggacagcccagtgggctgtgtttgtggggtttccgatttggttcgggagccccgtttttgttgcgttttacgggttttgcttggtttgtgatggtttggtgtttgtgtctcggtggctctgtttgtgtcggtttgcgcgccttggggtatcatctggggtatcgccggccgatgcgggaaggctggccccatgcgcaggagaagaggtttgagcagacggttcggttcggtggtgaagaggaagaaccacaatggcgtgcccacgtgtctgttggcgcggtatcccaatccgaaggagccgggcaagagggtggtcaggaggttccctcttggcgcggaggcgttggcgtatgcctggctggatggcgaggaggggttcgtcagggattacgagcgcgggctatccgactgggtgccgccggaggagcgcgagcgtgtcgtgaagctcgcacgcgaggatttcgccgtgtacgcggaggatttccttgactcgtatcgcacggttgacggcgggcgtctccgggattccacgatgcggctcaagcgttcggatatggccttgctggtcaaggcgttcggcggcatgccggtgagtgagatcggccggtcggacgtgggcgcgtggcttgacgatggtgtgtccagtccttatacgcggcgtcgttgctatcagttgcttcgcgccatgatgtcgcgtttggtggaggatggcgtgatcgcgtcgagtccttgcgtctttcccgttccccgtcttccggagagtcgccaggccatgattcccgccgccactcgcggggaattggctttgatctatgacgcgatgcccgacgatacggcggtggcggtgtatctgggcgcggtgtgcggcctgaggatcggcgaggtgtgcggtctgagggtcggtgatgtggatctggcccgtcgtgtgctgcatgtgcgtcacgcggtcatgcgcagtctgtcgggcgagtgggtgctcaaggaacccaagaccgcggccagcgccggggacatgccgatccccgagggtctggccgccatgttggaggcgcatatcaaggcccattgcgacgggggcggggacgcgatgctgttgtccggcgcgcgcacgggcggcatccttcccccgtccacgttgcgcggccagttcgaccgggcccgcagggcggcgggacgtcccgacctgcatttccatacgttgagggccaccgcgatcaccgccgccgcgcagtcgggcgcgagcccgaaggaggcccagcggtacggcaggcacgccgacgcccgcatcagcctggagttgtaccagcgtgccaccgaggacggtggcaggagggtcgccgaggcggtgttcgactccctcgtgcagaccggtcgcgaccgcgcgcgtgtggaggccgagctcgcccgggccggggaacgtctcgaagccgcccgccgtgacgtggagcgcctcgagaaggagctttcatcgctgggctaggccgccttcgcgcccggatcgccggaaggggtgtggcctttctgttgttcatactgcgggagtggatcgtcgggactgcccgcccagtctctcagggtggtctcgctgattcctaggaaattgtggagcgacttgacgcttcgtccgtcggtgttgatcagatgccatatggctgatcgcagttctttttgcagcgcttcgcgtatatcggggatgacgtggggctcgtcttgcgggtcgcgggacgggatggaggagctgcatgtcagggtctttgcgacgtggatcagttgcagctcctggtattcgccgatcgtgagggtgcggaccaggtcggcgagctccccctcgtcgttgtacagatccttgtatgcctcgcggtccttcagtttctttttgtggggccgcatccattccacgaacgtgaaatccagtccgagccgtgccatctcctcggtgatgcttggatcggggtcggccgcgtccgaacgcagcaccctgagcatctcctggaggcgcccgatctgggtttcggtcagcatcgccatttcccggatcacgtccgcgcggatcccgttcgcgcggatcctttcccgctcggctatccttttccgctcggttattccgtcgatctgtctgaggaaccgtgcccgttcctcccaggatgccggcccggcgtcctcgatgccgtccatctcgtccgtgtcctcgttgtggtcgtccatgcgctcctccttgtgatgtccttctcccattatccgcttgcccgcgtctcctcttccgatgacgcgcatgggtgtcgaacccgctcgggttccgctctggttacgaccgcgctttcaggcgattatcgaagtgtcaaggaaaacgaaaggagcgatcacgatgggcgcacacgatctcgacaagcggtggctctcggtggccgaggccgtccaatgtaccggcctgtcgcgctcgacgctcaaccgcgcgttcgtctccggccgtcttccgcgatacaaggctggtcgccgcgttctgcttcggcgttcggagctcgacgcctttatcggccagccggtcaactctgccctcctcgcccaacgcgagtaccggcggctcaacaataaatccacaaaggactaagaggactattatggataaaatttttaagttcaatacgctcaatcagccgacgaggtaccccgtcgatctcgatcggctcggtatcaacgtgtacgacgtggcacccaagtgggtctaccaggacggccggcgcaccgatgtgcaggccacgtcgaaggacggcgtgccgcgctggacgatcaaggcgatcctgaccccccagggccgcgcctccggcgctcccgccgagatcacgtactactcggaggaacggcccgaggtcatgggcgcggcgaccttcgccagcctcgacgtttccgtctggcatatgccagagcgggacatggcgggcatcgcgttgcgcggttccggcctacgatccctgggttcctccccggcggtcgctgacgagggcgaggtggagctatgaccacggatggtgtgaatttgggtcaaaaattggattctcgtcgtctcccgtcccgtgtcgaggagttcctggaggggtgttcccgtcagtttctgctgcttggcctggttttcataggtgtgttcgcggtggttgtaccgttcgcgtcccgggacggtgcggtggtggtcgcgctgctggtctcgtccgttgtgacgctgctggtctgtctgacggcgtggtgggatcgcttccgtctttgggtcggccacgtcgagtccccgatgtcgtcccaacgccgccggatccagcgtttcgccaaccgattgtatgcctcttggtttgatggctcggttccggcccaggtcggcctggtgggcgaggcccggcgcacgccgcagcaggacgccgcccttaaggaggctttcgagtcccagcgcgattcgtcgcgccggttcatggcgggccccgagctgcgccgcgtcctgggccagatcgacctgcgagaacggctcgcgaaccagattattccagggctgacgctgtattacaacgaggaaacggatcgactgtacgcgcgtgtcgtcgtgtggtcgccgatgcagaccgagcaggtggtcgccgcgatccccgacttggagcgggcgtggggcgtgtgcatcggcgattcggaatcctccggtggcgaggtcttgatgccgttgcatctgcgtgagcgtgcggggtgggcgcgatgattgggcaggtttccgcgaacgcgcccgtcagggtcggcgagaccgagtaccaagaccccgtagcctatgacttcgccacgccctcgcatatcgccctggccggtgccacgcggtcgggcaagtccgcgctggcgtactggctgcttggccagttggcggcaatgccgtgggtgcggatcgtcggctcggatgtctccagcctgttgttgcatccgttcgccggtgatcctctggtcgccttgggccaggacgacctcgacgcgcatgcgagggcgttggagggcgtcgagaagctcatgcgggatcgtctcgaccgtctgctcgccgagcggcgtgacaagatcgacgagttcaccgtcgcttgtcctctggtgcttgtggtgatcgaagagttccccagcctgctggagctggcgaagaccctggacgcctcgacctcgcccaagggcaggctcgaggcccggttgaggtcagtgttcctgcggctggtcacccagtcggccaagtgcggcatccgggtgatggtcgtcgcccagcgcatggacgcctcgatcctgcagggtgtggcccggtcgaacatcgagacccggttcctcctgcgctccgatgaagccgggatcgagatgatgatccccggcctggatgaccaacagcgctcgttcctcgcccgggcccggcccggcgtcggctatctgggcatgcccggcctggacggtccggtcctgttccgtggggtcgatgtgtcctaccagcagtatttggatcaggcggaggcgtgcgtggccttgtcgtccgcgtcgcttcccgtggcggatccgtgacatgggccgcgcatgcggcgggcggggccggcgtgccgcgaaggcggcggagccggatcccgcccccggccccgccaggggccggggtgcctggcctagtgttacccaggcacttttgtgtctgtgtctttccatcccgttcgtccccgattgcaggcccttccgacccggaggggcttgtgtcgggcagtgtgtcaaaggttgtgtccaatgagcaacagcaacaatccaaccaagcggagggccaagccccggtccgcgtccgcagagggcaggaggagccgtggatggctgatcaccatacccgtcctggccaccgagcccgacgaccccgacgacccggccaggggccggcatcccaccggcgggatccggtacgagagggacatcgccgccgcgttcgccgactggccctggtgcggccagatcgaggagggggcgcaacgcgaggacggagcgtcccacggatacctgcactggcagatctggatggagaccgggaaccccaagaaattcagcaccgtgaagaaccggctcgccaaggcgggcatgccggacgcccacatcgaacccagggaaggcaccaaggcccaggcctacgcctacgtcaccaaggaggaaacccgtgtcaaccgcaccatcgaaatcaacatcggcgaaaccaacggtcccgacgataacggcaagtgacgccgggccgttcttccacggcctgtccgccaacgacataatcgacgagcagggcaaacgcaacgacctcgaagagctgcgcggcatggtcgaacagggcatgacccttgacgagatactgctcgcggacaccgacaaccacgcctcccgatgcgtcggatggctctcgcggctcatcgaggcaagggacaggtcgatctacaactccagcagcagccgcgacatcgaggtctactacctgtacgggcagacgggcgtgggcaagacctcctacgtgatgaacagatacgcgcccgaggacgtgtaccgcgtcagcgactacctgcatcccttcgacggctacgagaaccagaaggtgctgctgatggacgagttctccggcgcgctgccgttcgaccagctcctgaacgtcaccgaccggtggcgcaccaccctggccgcccgctatcacaaccggatcgccatgtacgacaccgtgtggatcgtgagcaacctgcccctcaacgaactgtacagcgagatcgaacggccccgacgcaaggcgatgttcagaaggttccgccaggtcatctacatgaccagacaaggcggcatgcaccgctacgaccccgacgagatctccgactacctcggcgaccccgagcaagccccggccggacgcttccatctcctcggactcgacgacggcctgagggccgaggacatcatatgagcgcacaccggtccgctggttttactgtcgaacacccacgtgccccacgtgttcgcgggggcgttccggttgagggtcgccgtctgctgacccgcgccggtgaacgtcaacgacaccgggtcacccagctgcacgccgccggccgacctgatctggttgagataattgttgatgccggcgtcggtcggatcgcccgtatagggcaggttcctgatgatcgcgtccttcgaaccggtgaagtaataccccttcgccgtcacgctcgtgccgtcgatccaatggtcacccg

SEQ ID NO: 1955 - DNA, 6427 bp, Unknown
  R17_18m  MAG No. k141_11290
catcccagaagcccatcatcaagtgacggcgattccgttggcttcgttggttccgttggttccggggcgatgttcgctccgttggtcctgctgacaacgttggttccgttggtcctgctgacaacgttggttccgttggttccggggcggcgttcgctgccggcgacttgcgcgcgtagcgccatagggtgtatgctgaaaagtccggccgaaaagccggaagtttgataactcaagattgggggcgatcggtttcgacggtgacctgttcgctgcagggaagcgtgccgagaacgccgggtccgctcgtggatgaccccggcaaaagaataagtgctaaatctaaccgcactgagttcgctctcgctgcctgattttagtcaggattaaccagtgagcagccgctccgttcactcctcctcgtctttgggaggatgctgagcgtcgtttagaagacttgctgatgcagttgagcctcagggctgcatcgggactttaactgcggatatgctcgccatcagttgtctgcgacatcgatgggggcagaaaaatcgccaacttggccagcagactacgcacgtagaagactgtgggctcggtcatcggaccggggttcaattccccgcgcctccaccaatccgcctcggcggaaacaagccgcttggctttacgaaagtaaggctgagcggcttttcttattcccgtcgattccctcgtattctctcggtttcacgggataatgtgggcaaaatgtgggcaaaaatcgagcccgcgaagccctctgccacaacgcgagaacggccccgaccggcaagtaggccgactcgggttgagtcgtctgcgatgccggacggggccgaactgtgcgtggtggtcatgcggcgaggtcgaggcgctgtttgatggcgctgacgccgatgagcgcgccggcgaggatgccgagcgcgttgagcgtggtcactatcgcgtccacgtgagtccagccccatgcggggccgaccgtgctgacgaacaggacgagtgcgggcaggacgatgaggcccaaccatttgaggatgtcgtagacgcggctggggattgcgcggttggcttcgatccgacgacctgcggttttggagaccgccgctctaccagctgagctacgcgcataggcggtcatgccggttgattgccatggcacatgaccattgggtggatatgagtaaagcccctgaaccggttgattcagaggctttcacactaatcctgatacggagtgtgccacggggtggattcaccctactcccgcttgtgttttgtttttttcaggcggcttggatggtgaggcgtccgccgagggcgtggattaccttggcgatggtttggaagctggggttgccgtccttgctgaggctcttgtagaggctttcgcgccccacgcccgcgtccttggcgatctgggtcatgccccgggccttggcgacgttgccgagcgcggcctgcatgagtgcggggtcgtcgtattcggctatggcgttgaggtaggcgatgatgtcctgttcgttttcgaggtattcgctggtgtcgtagtcggtgaattcggtgctcattgtcgttgttccttgtagtcgttgaggatgtcgtgggcttgtctgatgtcggtctgctgggtgcttttgtcgccgcctgcgagcagcagcatgagcacgttgccctgcatggcgaagtagacgcggtatccggccccggtgtggaaccgcatctcgctgaccgggcctcccacgggtttgatgtcgccgaatggcctgcctgcgagcttgcagacatcgagccgggcttggatggcggccttcgctttgtggtccctgagtttcttgaaccacttgcggtattcggcagattgcttgatttccatacctctattgtatcctacagactacatcatgtcaagccgaacggccgctggagcccatagccaacgcaagaatctcccgtatgttgaactcccggtagccgtcatcgacgggtctcgagctggggagtttgccccggttgagccagttgctgatccgcttgcggctgacctcgtacccgtagtttcccttgagccattggctcatgcctgccggggttttggtcaggtggattgattcggcctcggcttggctttgctcgcgcagctcctgcacgttgatgggattgccgcacctgcacaggcgcagcgcctcgcccttcgcggccatcacttcgcgtccgcattcggggcagacgccgattatcctgtgggtgcgcggcctgcggtcaaccttggcagagcgtccatggtgcctcgacctgctggctgccgcagtattggcatggttcggtggtgatgactgcacacgttgtactgtagggaaccatgaaagtcgtattgcaacgagtatccgaagcgtccgtggacgtggtcaatgaattgggcacgctggatcccacgttcgagccgcagcagattggcccgggattcatgattctggtgggcgtcaccgatgaggacggcgacaagcagatcgcctggctggcccataagattctgaatctcagggtgttcgaggatgcgcagggcaagatgaaccgttcgatccaggatatcggcggggagattctctccatctcgcagttcacgctgttcgccgacgtgcacaagggcaatcgcccgagcttcatcaaggccggcaagcccgagcgtgccgatttcatgtggatcaagttcgacgaggcgttgcgctccgggggagtgccggtgaaggaaggtcgtttcggtgcgcatatgcgggtcggactggtcaatgacgggccggtgaccatcgtcatcgacaccgagcatgacatgcctgacggaacacgctgaattgcgatagtgatttgacatcatatcccgttccctccaatatgttactaaagcgctttagtcttctgcgggcgagggcgcatgtcgatatgtttcccatgaacgggcagcacaatgatgtggccgcacaagcggcagagataaggggagtgaacagcagatgttcctgaaacctgaacagcaactggagcggtgcaagcgcatagtgcgccagcgcgtggaccctcatatccacccatcgatcgcacagcttgcggtggagtcctttgacattcccggagagccgatgcccactgacgagttcttcgagaagctcaatcgaggggacatcgacttcaagccgtttacgctcggcggtgaatggggcaccacatggggcacagtctggttccgcctgaccggtaccgtgccggccggctacccgaaaggcaagccgctggagctcatcctcgacctcggctggtacccgcactcctgcggcggccatatcgagggcctcgtctaccgtgccgacggcaccgccatcaaagccgtacacccgctcaactattgggtgccgttcatggatgctgagggcaacgcgcaagtgccggtcgccgaagacggcagcttcaccctgtacctcgaagccgccagcaacccgctgctgctcggcgtgcctccgttcattgagaccgaactgggcgaccatgccaccggcaagccggacgagccgtacgtattcaagtccgccgatctggccgaattcgatgaacgctacgagaactactccgtcgatctcgacgtggtgagctccctgatggaattcgccgacaaacagtcgccgcgctactggcaactcgccaaagcattgcagcgttcgctgaacgcctacgacgagcgcaaccctgaatccgtggaagtcgcgcgcgcagcactcgccggcgtactggccaagccggccaatgcctcggccatgaacgtcagcgccatcggccacgcgcatatcgactccgcatggctgtggccggtgcgcgagacccgccgcaaggtggcccgcaccgtatccaacgcattggcgctgatggacgccgaccccgacttcaaatacgcgatgagctccgcccagcagtacgcctggctggaagaggatcatccggacatcttcaagcgcatgaagcggcgcattgaagaaggccggttcatcccggtcggcggcatgtgggtggaagccgatggcatgttgcccgccggtgagtcactgatccgccagattgcatatggccgcaaatacttcaaggaacatctcggtgtggagcccaagggcgtatggctgccggacagcttcggctacaccggcgcatggccgcagatcgcccgccgtgccgggtacgaatggttcctcacgcagaagatctcgtggaacgacactaccaagttcccgcaccactcgttcatgtgggaaggcatcgacggctcgcgcatcttcacccacttcccgccggcggatacctatgctgcttggtgcaaggttcaggaactcgactacgccgagaagaacttccaggacaaggatctctccgaccgctcgcttctgctcttcggtttcggtgatggcggtggcggccccacgcgcaacatgatggagcacctgcaccgctacgagaacctcgaaggcgtctccagggtaactattgagagcccgaacgatttcttcgacaaagcccaccgacagatcgaaaagaacgccggagaggaaatgcccgtctggaagggcgagctgtacctcgaactgcatcgcggcactttgacctcgcagcaggacatgaaacgcggctgccgccaagaggaatcgctgctgcgcacggtcgaatacctgggcgcggccgccacgttggccgacccgaactacgcctatccgcgcgaagagctggaccgtatctggaagacgctgctgctgaaccagttccacgacatcctgcccggctcggccatcgcatgggtgcaccgcgaagcccgcgaggactatcgccgcgacctgaagcgtctcgctgaaatcgcccaagacatgtgcgccgtgctgcgcaaggccaacccgcaggccgacttgctcgccgaggcccgcatcagccagttccgcaatgacggcgcgtcttggcatgccaaccgcatcaacgaaccgaccgacgcgctttccgtactgacccagacattggacaacggccgtgtactgctggccaacggcgtactgtccgtcaccatcgaggccgacggtacaatctcgtcactgcttgacgaggagcatggccgtgaactggttccggccggcacccgattgggccaatacgaactgttgaaggacgaacccgccgtttgggatgcctgggagatcgaacgcgaatccctgctcatggcgaatgccatgaccggatcaatcgaatcggtcgataccgaaaacggtgcggcacgagtccgcgtgcgtaccgccgacgatgacaccgtcatcaccaccaccatcacgctgcgccccggttcgcacacgctcgatttccacgccgacattgactggcacgaacgtgaacgcttcctcaaagtcgatctgccgctgggtatcgtggccgaccaagcaacatacgactgccagtatggtctggtccgccgcccgatcgtcaaaaacaccgcatccgacgaagccaagtatgagagcagcacgaaccgtttcgccattatcggcgacgccggttacgcggcggccgtcatcaacggatcggtgtacgggtccgatgccacgccgatctccgggaacgccgccgagggtcgtgactcgggcaccatgttccgactgtcgctgctctccgcgccgaccttccccgacccgcgcaccgatatcggtgcgcatgagttcgactggtccgtggtggccaacgccacggtgggccgtgcgcttgacgccgcttgcgcactcaacgcaccgacgcttcatgacatgcccgacttagcgccgctcgcctcgatcgagtcagcaaacggcaccgtggtgttggactggataaagctggccgacgatggctccggcgacctgattgtgcgcgcctatgaggcggccggcggcagggccgatgccacgctgcacgtctgcccggcgctcgcaggcgcttcggtgcatgagaccaatgtgctggaaggcgacgatctggccgccgacctgccggtcgcgctgcaagacggcacacagaacgccgaaggcgccacactgcacttcggcccgttccagctcgccaccctgcgcatcacgcgctgaattcccgtctgatgcttctgcctcctcgaaccatgaggaggcagaagtatgtcgtattacggttttcccaattgtcaccacacccatcatttccatcagacacagcaaaggagaactctccatgtttcttctgcccaatcagcagttggagcgctgcgaccgcgtcatgcagcagcgcgtcaaaccgcatatccacaccacactcgccgcatgcaccttgcgttcgttccacaatcccggcgaaccggtgccctccagcgaatttctagccaaagtgc

SEQ ID NO: 1956 - DNA, 8556 bp, Unknown
  R17_18m  MAG No. k141_11307
cttcgctcaggccgtggctactgacagcctactaggctgtcagcttaacgccacagccttgagcaatactgcctgctgggggtggagggacgggggacggatgccgtaacgctgcagggcttcgccggtcaggactacgccttcctcgttccaccagccgagagtgctctggccgttggccagaccggtcaaatccaagctcgggtcgagcgggctgacgcggtaggtgcgctcggggtcaagtccgggcaggtgcacgggcgcggccggataggtctggctggtggtcagctgggtgaagcggtagatggcggcgtcgcggttcggcatcaccatgccatccaagcgcacggccggatcgttggagtcggcgtgcacgcaggtgtcgatggcgaaccagtcgcggtgcttcttgaattcggccacccacacggccagcttggcgagcgcctcgtccggctccttcaacaggttccattcgatgcccatgtggccgaagaacgccatggccatgcgcagttcctggctggtggcacgctgggtggagtgcgcgggactggcacccacgtgctcgcccatcatcgccggcggcaccagcagcgaggtgtagcgctggatgtccgcgcgctcgaccgggtccacgcagtcggagacccagatacggtcagcgtgctctaggatgccgaggtccacgcggccaccgccggaggagcagctttcgatctcaaggcccggatgtgcggtcttgaggcccttgaagatgttgtagacggcgagggtctgcgcgtgcacggccgggcggccggagcggcgggaaccgggctcggtgacgagcttgttgtggtcccacttgatgtagtcgataccaagctcgccgacaagttggtccatgcagccgtagatgtagtcgaacgcatccggattggtcagatcgagcacctgctgagtgcggccctgcagcggcagtcggccggtggtgggcgaaagaatccaatcggggtggttgcgggccacgtcggaatcggggttgaccatttccggctcgaaccacaagccgaattccatacccttggcgtgcacgtagtcggcgagcgccttcagggacttcggaccatcgggccagacgtcctgcgcaatctgccagtcaccgaggccggaggtgtcgtcgcggcgggagccgaaccagccgtcgtccaccacgaatcgttccacgccggagtcggcggccttgtcggcgagcgccttcagcgtatcgaagttgtggtcgaagtacacggcttcccatgtgttgaggatcaccggacggccgtgcgagaacaggcgcgggtgcagggagcgcacgtaggagtggaagcgggcggcgatctcgttgagaccatcgccataggagccgaacagccacggggtgtcgtaggagttctggccttcgccagggccggcgagcgtcacttcgccgccgaacaggagttcgccgccgccgatcacgccggttgtgtagggcagacgttcggcggacagcacggagttgccgctccagcccacgtgcaccgaataggcgtcgccatgctcgaagccgaaaccgggcacgccggcggtcaggagcagggatgcgtcgaagtcagggcggccggcgagctgcggcttttcgaaacggccgacggtcagcggctggcgctgcggactgcgttcacgtagatggtgaccggtggtggtgaggatttcgccggcggattcgggcagcgggaagccgagctcgatcttgccgatctcgagcggggctccggcgtctgcaccgaacaggttggttacggtggccttctgacggaccaggccgccggggagcagttcgaggtgccactcgacttccacgccctgctcctcatcgcgcgcggtgactatgacgccgggcacgcggaccggaccggtggcacgggcatggccggccacatcggtgtagctttcgccggacacggcatcgagggtggcttccagcacgccgccggcctcgatattggtcacagtgaacttggggaagagctcgacgccggcgcggcgcagcaccacgcgctgctcgccgatccagctttcggcctgggtgggcaggatagacggccaggcggtgtcgtcgagcgcgccggacacgcgctgcggcttcagggcgtcataggcggccagcagggtgtcgggcttggccagcgggcggccccagtggacgatgtgcggcaggtcgctgccggcaaacaccagaccgatcgccacattggcggcgggctgggtcaggtagacggcggtgagtgcggtgccgtcagcggcggcgccggtgaaagtggaggtgttctcggccatattgtctccttcgacgtgtgtggatttgcattgcactactggtttcgatggtagaagaaatggaatatgttgccttggtgccgcgtgttggttgcgtgaggtaagtaatgcgtccgtgtctatcgccgctgggcgaagaaatcagtcaggatggactgacactcgccttccagcacgccgccgtgcacttcaggactatggccgatatgcggatcgcgcggaatatcccaaatcgaaccgcatgcaccgagcttgggatcccaggcaccgaacgcgatggtgccgatatgggtctggatgcaggcacccgcgcacatcgggcacggctcaagtgtgacggccagcgtgcaatcggcgagattccaagcgcccaaggcttgggccgcctgacgcatggcgatgatttcggcgtgggcaagcgggtcgccatcagcctcacgcgtgttgtatccgcgcccgacaatctggccggccgcatccagcaccaccgcaccaaccggtacgtcaccagcggctgcggcctgaccggccagttccagtgcacagcgcatcgcctcgtcatattccataccaacgagtgtatgcctttttctcatatcgtctcatgatgtgcataatcggccgcaatcttaacgttttcttcatggttcccatatacttttggtggagaaaaaatacgagaaggcggcaacatggcggtatttgagctcatcctatgcatcattgcggcggtggtggtgagctcgtttgccagtcgcttcgtaccgaaggtttccacaccgctggtccagattgtgctgggcgtgctggttacgtatctgccgtttttcccggatgcaaagctcgacccggaactgttcatggtgctgtttatcgcgccgctgctgtatctggaagcgcacgaaatcgataagtcggcgttgctgaaaacgctggatctgagcctatcgctggctatcggactggctatcgtcacgatggcggcggtcggattcactttgcatgccgtctggccgtccatcaccttagcctcagccttagcactcggcgcggcactcggcccgaccgatgcggtggccgtcagctccctaggtaaagaagcctcgctgacgcagcgtcagcgcagcgtgctgaaaggcgaatcactcttcaatgacgcttccggcatcgtcggcttccagttcgctctggccgccgccttcactggcgaattcgccgtggggcaggccgccggcgaattcgtgatctccttctttggcggcaccttatttggcctggtgatagcagcagcggccaactggctattcgagaccgtgcgatccctcggttgggaaaccaccaccacacgtattctgatggaactgttcctgcccttcttgctgtatttgggcgcggaggaattcaatgtgtccggcattctgtcggtggtggccgctggcctgttcatccgattcgaccgtaccggcgtggggccgaatgtggcacgtacgaatatcgtttccacttcagtatggggtgtgctgagtttctcgctcaacggtgcggtgttcattcttctgggcatgcagctgccgcgcgccatgagggccagctggtctgacccgtatatcagcaataccgtgctgatcggcattattctgctggtcactctggtggtaatcgcgcttcgattcttctggattgcggccatgctgcgcgttgcgcgagatacaatcaccggccagcgccgcaaaatgacacccgaacgctggcgctcggccgcagtgatgacctttggcggccccaagggaaccatcacgctgtcattgatgtttaccatcccgtattacattgccggcggtgcgccgttcccgatgcgtgacgagctgattttcattgcgtcaggcgtgattatcgtgaccttgctgctggccaacttcctgttaccgctattggccccgaaccgtggcaaggatcccagcgcggaaatgattccggtgaccatcgatgtgttacgcgccacggtggaggaattgaccggacgcatcacgccagagaatcgccgtgcgattctgatggtaatcgaccaatacaccaagcgcatcggacgattgcagcagcgcatcggcgataccgatcctcagggattcgagcaattgcagatcgaagcgctgcattgggaaaaggaattcgtgcgcgaccgacttgccgacaccaaggcgcatccggcggcggatacggccacgcaagagctgaacgtcgaagcctgcgagcgcatgcttgaccagattatgaatacgctgcgtcacacttccactgatccgacttcggggcatgcggtatcgcagattcgcggtcgcttacgcatgttccagcggcagatgagcaattacgccaaacgcacggtgtccaagattcgccataccacaccattggtgagcgaggatcagattttcgcgcgcacccgcgaactgcaggtcgaggcgattcatcatgttatcggccggcttattgacgagatgggccaggatacgtacaacaccgagcattgttcggcgctgttgctggattatcgtcgcgctgaggcttcattgcaggcacgtccgaatatgagcggcactacggaaaccatcacgcaggtcgaggacgtaaagcgcgagagctacggtatcgaactcggtgtgattcaggacatgtacgaagccggcgacatcaaccgagcccaagcccgctccctgaggcgcaacatctacgttatgcaggtcgatgccgattccggcatctagtttccttggctcccttctctgaggggagccaagttggggattgctatttccgtatgattctcttcagtatgtgcagtagtgcttgcagtgctcacttcgcccatgggagaacagtctatgaccgagtcagccacaagcgccctcgatgtccgattgctgcgacggccgcgccaattccagtgatggcggctgactacagcacgccagaggtaatgtcgttgtcgagcagccactggcgcaaatcggcgaactcctcaagactcacattgtgatccagaccgtggtagctctttgttttcagccacgtatgctcttccaaccaagcggcggtggcgaacagttcgtatttcgggattacgccatcgttcttgccgtacgtatagaacacggggatatcgtaatcggccaggcgagagtcggcgggggccgtgccgggcacctgaccgggtgtgttgaagccggacagggagacgacggcccggtaccgctcggggttgatgcgcaacaaatgcacggcgaccagtccaccttgcgaaaacccaagcggcaccacgtcacggtcggcgggaatgttgtcggccacccatcggtcgactgctgtggcggcggcatacgcgtcgtagtcacgatcatcgccgataggcagggcatcgtgaaaccacgcgtagttgccggggtcgggactgccttcacgggccggcgcaagtgtcagcggcccgcgcaatgccacgaagtcgttatatggagcgatgaggcgcatgatggccgccatgtcttcttcgctggatccccatccatgcaggcacaggaacagcggatgcgtggcatgctggtcgaagccgccgcgcgaggtgacgctgtgttccacggtgagtggctcgccaaaacgtccaggcacagtggtggattcgcggccgatcagaggctggctggcattcgcttctttgctcataccaatccaatatagaggtcttgcgcgctgtgcggaaaacgatggaccatgatttcagtcacattgggtaatccgcgccgaatcgccttgggactttccaggggataccggcaatctgtcaggcattaccgctgtttgcggctgcggtgtctgtggctgcggtgattgtctcaagttcaccgccccactgctgctgcagtgcggtcatcttgctgccctcgccgaacaccatccagcgtttgccgttcagcaatcgccaatcacctttcgtttgctcattatcagcgtattggctcagcagttcggaaatcttgctttcgataggtgcccggctgatggctgcggacgattccgattcaaaggacacgaaggccactctcggatcagtgcacatctgtacggtggtgatgcctggcaaaccgcccgcatcaagcccctgccatccttctttgcacgcgccggcagcttgttctatgccttgctccatctgtgcggtatcttcgacgggtgccttgtcgttcgactgctgaatcagtccttccgggaacaatacgcccatggccacgccgataaccaagcaaactatggcgcacaccagtgcgatgatgccgcccgcgcccactcccccgtgagtggcgtaccgaggcatggtgactcgcgcagcgatgaccagaatcagggtgatgctgataagcaccgccgccgtcaacgcaatgtatcgtcctggcactgccgtcataaaggaaatggcgtaaggcgcgatttcatgaaccgccgaggtggccgataccacgacggctagcagtccgctgacaacggcaagtctgcggcacaacatcgacgttgggctgctggcttttgtagcggcgaatcgccggccggcattccgcctggatgggcgtcgattctgtgcacgacgtgagctgcgcgaatcgtcatactgaccatcgccgaagaaatcgtagtcctcatcgttgcgggccatcggtgcccccttcctgccgattacacagccagtgtaccgctatggcttgggaatggcggtcattcgggggaatgattcagggcaaaaaagaaccccggcggttgcccgccggggagagaaaggagagagaagaagaaagggggttcaattgtcgggaactgctgcggctcctgatcagctttccgctgacatcatttatataaccactgctttctgggtctacctctaagtttctctgagaaaaacctgagaatacttgcgattgatggaccgcggaagcatgaggagcctctcacgtttccgcccaaggcgctagacttgaaggcagtatttatttgcccaaggagtttttcacatgctgctgtccgatcgcgatattctcgccgcacagtccgcaggtcatatctcacttgatccgtggacccccgaaatggtgcagcccgcttccatcgacgtgcgattggatcggtacttccgtttgttcaataaccacgcctacacctatgtcgatccggcggaaaaccagggcgcgctcaccgaacagttcgaggtggatcccgacgaaccgtggattttgcaccccggcgagttcgcactgggttccacgtgggaatacgtcaagttggacccgtccattgccgcccgtctggaaggcaagagctcactgggtcgattgggtattctgacccattcgactgcgggcttcattgaccccggtttcgaggggcatattacgcttgagttgtctaatgtgtcgacgctgccggtcaaactatggcctggcatgaaaatcggccagatgtgcttcttccagctgagctcgcccgctgagcacccttatggctccaagggcaccggctcgcattatcagggccaacggggcccgacgccgagccgttcctacgagaatttctaccgcgcgcacatcgacgactgagcgttgcgacgtaccattcggccggcggatgccggccatttgcttaatcccaaggagatgtcatgaccaacagcgatggtgggttccagttcgacttccagcagcacgaaaagccggtcaggccaacggttcctccgattcccgggcaagagacggcagcatatggcgcgcagccagcgacgcaagccacaccggctctgcagttcccgcaatctgtgcaggcagcacagccgacgcagtttgcacagcccacacagcccatcgatccggccatgacgcaaccgttctcgccgcaattcccggctgcggttgccgcacaagcaccacagccggcggcagccacgcagccagtagtatccgaaacaccaatcgccgctgcgcccggccagcagcaatacgtttgggatcagacgacgcaaagcttccgcccggtggaaccgacagcgccggtgacgccagccgcaccagcggcaccggcgacatcgcctgtttcggcagcttcaaacgccgcgacacaagcgttccagcccagtcaggccgagcagcctgcggtagatgccgaggcaacaca

SEQ ID NO: 1957 - DNA, 16134 bp, Unknown
  R17_18m  MAG No. k141_11523
ccaccgccgccgaagcccaagccgccgcggccctgaccccggaccagcagatcgccaaattgcccgaagccgaccaggccacggtcaaccagatggccggccagatcgacttcactcgcgacggcatcgaatccagctacggcaaggacgcccagcgcgccacctccaccttcgccgacgaaatcctctccgacacccgctccaaagacaccggcgaggcgggcgaactactgaacaccatgctggtcaccattgacgaggctgacctcggcggcttccgcaccattccgatcatcggccaggtggccgtcagcgtggataagctgcgccgccgctatcagaaagtcgacgcgcaaatcgacgaaatcatcgtgcgtctcgaatccgcgcaagccaaactcgtggccgacatctccatgtacgacacgatgtacacgcagaacgcccagcaataccgcgagctgaaaatgaccgtactggccggcaagaaggcgctcgccgacttcaacgccaaccagctgccagcgctggaggccgaggccgccgccagtggcgacgccatgcaggcgcaagtgctgaaggacttcaagtccaagctcgaccgttttgccaagcgactcgacgacctcgaccgcatcagcgtggtcaccttgcagaccgcgccgcagatcaaaatcatccagaacgcggaccagaccatcgtggacaagatcgacaccaccatctccaccacgattccggtgtggaagagccagatggtgatcgcgctgggcctgtccaaccagcgcaaggccctcgacctgcagaacaaggccgacgatgtgaccaacaagctgctggcgcgtaacgcggccgccctgcacaagggtgcggtggacgcggaaaaggccaaccagcgttccgtggtggaaatcgacacgctggagaagatcaacgccgaactcatcgccaccctgaaggagaccgtgcagatccagaaggaaggcaaggccaaccgcgaggccgcccaggtcaagatgcgccaaatcgagtccgacctcaaaaacgccttgctcgaaaacgcccggcagatgtgagccgttcgcgcgccagcatgctcccgttggcagaggtatatgagtacgcctactggtgtgcgtatatatgctcccgctggcgggagctggcagccgtaagactggctgagggtggtcacggcgctcggctcggccggctttaccggcaaccattccccgccgcaatttctctgtgggcataatcccggaatgattgccgcgctcgggaattgggtgaagtgaaggttaaaggttgagagcccgggagggttccggaaccggccacgataaccgctgctagccccgcgatacgggttggcggccggcatccaagccgattctctcctaatcaaggagtaccgattatggcaatgtttccggctttgatgaatgacacgatgttctcggatctgttcgatgatccgttctttgagggttggcgcaacacggacaacacgatgagtgccgcaatgcctgccaacatgatgaccaccgatgtgcgcgagaccgacaagggttacgacgtcgacatcgatatgcctggctttaagaaggaagatatcaaccttgagctcaacaacggctatctgaccgtgtccgcctcgcgttgcagcgagcatgaggacaaggctccggccgctgagggcgaggcttccgacagcaagtgcgcttgcgcgtccgattcgggcaagtggctgcgtcgcgaacgctacatgggctcctgctcgcgtagtttctacgttggcgaggacgtgaaggagtccgacatccacgccagctaccggaacggcacgctgtgcatccaggttccgaagatgcaggcccagccgcaagtcgagtccaagcaccaaatcgcgattgagggctgacgatacttgattcgtcccgaagtcccgcttcgagtagctttgccccctctgacgagggagctcccgcgaagcgggtgggggagagataaatcgtaaccaaaccatgcttcccacgccgcctgccctacgctttcaacgccgactaacctgacagacggcgggaaacatagccaatgcaaatgccgagtagggatttaccctacccggcattttgctgtttcaatcaccgaaccccaccctgttcgcgcgccggtcgtgtgccgttctgcagctgtacacatccgatgagtagaatgccttcgaaacgaggcaagagaggcggacatatggcgaacggcgcacagaacgcaagcggcacgccggccccggcggcgagccgttccggcggccacgtcgtatccgcgcgcgccacgaccatcggcctgatggcgatcctgctgtggagcttcatggccggcaccgtgcgcatcgtctccgaaaacttcggtgccacgcttggttcggccctgatctacacggtcggcggcatcctgctgctgatgttccggcgcccggtcccgattcgcgagttccccaagaaatacttgattatcggcggcctgttgttcgtattttacgaatcgtcgatatccctctcgctgggtctggcctctaccgacgcatcctcggtggaagtgagcctggtcaactatctgtggcccacgatgatggtgctgctgtcggcgggcgtatcccatcgcaagcacgcggtcgtcaaggtgctgccgggcgcgattgtggccactgccggcgtggtgctggcggtcggcggtaattccgggctcgactggcatgcggccgtgcagcatatcgccgccaaccctttgccctatgcgctggcgttcgcgggcgcgctcgcttggtcggtgtacgcggtgttcacgccagccatgagtcatggggtggacggcacttcattgttcttcccctgcgtggccgtggcgttgtggattatccacttcgcgtccgggcaggggtggccggccgagccgccgagtctggtcgcatggctgtttgtgttgattgccgcggcggcgattggcggcggttatgcctgctggggctatggcattctgcatgggtctatggagcggctggctattgcgtcctatgccacgccggtgctgtccaccggggccagtgcggtgctgctgggtttggcgctgtcgctgccgttttggtgtggcgcgctgctggtggccgccggatcggtgctcaattacttggtcagtgcgcgcaaatagcggggtggctttgctcatggggcggtaataatcccatggggcggtaataatcccatggggcggtaaaaccctcatggggcggtatcccaaaatggctttattctgccgtttcacaatttcttcaaaccgccccatgggccttttaccgccccatgggtaaattaccgcccgatgggcagcagcaacttactcgccgcggcgctcggacgggcggcgaatcgggtcaagcagcgtattcggatcggagatgccgaacatgctgcgcccgccggtggattcagggtgcttggcgagaacggccagcgaaatcgcccccggaatcataatgatcaccgaaagggccgccaatccccagttcacgaagaatccgagccccagtacgatggccaccacaaccaccaccgtgacgataatcgtcaacagtgctcgacgtgggttggtttccctggtccaagaggtgctggctgcgggttttgctgttgaactggccgcggcgtttgtgtctgttgtgccatcagccgtgccggtcgtgggccttgccgccgcgctcgtcgcggggtcagtaggggcgtcagacacgttatcggcgacattgccggtcgctgctggacgttgttcgtttgcgtgagtcatatccaccaacatattccctgcttccggctaaagctgggacaagcctgcgcaccgctaatccagcgccgacactggccttgagctgcggacgtccaggccggatgtgaacaggagctgaacggagtctggggaaaccatgagaactcgcgacaatttttgtgaaattgggtgacgctctatgaatcgcgcgctagtattgcgtgagcttacaagacgaggagcctggagcgcggggacgaaggatgaagaactccgtttggaagacgttcatggaattgtcgctggtccgcggaatcgtgccgtggaccgtgttcggactgaccgcgatcgcggcaatcatactgattgttgggctggcattgagcaagaagcgcggcccggcagcagacggcctggcgccggacggcgaatcgtcggcccaatcgcccgtcgacccagataaccagccggccaaccagcctacgaacgcggctgctacggcgtcatccgcagcttcgacggaagagacgtttatttcccatggcctgcgtacgccgcaacgtcgtcacttgcatccgctggccgccgcgctggccgccgccgtgctcgccggcgcgggcggactactggccacatggctgatgtccgacgtgttcatggtgttcggcgtatcgttgggctggccggtgatcctcaccgtcgcgggaggcttcgcgggcctcggcttcgtgctggccgccgccgtgacgttacggggggcccgtcgcgcgctggccgtcgtgctggtgccgctggtgctggcgtccaccgcgcttggcgtggactcgatctacggcgaataccagaccatcggcagtctcgtcggctatacgccataccccccgctcggttcggtcaccgtgcgcaaagcctcgatgagcgtcggcgagtggcgcgacaaggcgcgcaaggacgctctgccatccatgcccgactcgggcagggtgttcgtcgtcagcatcccgaacaccgaatccaagttcaaggcgcgcaaggcgatggtctacctgccgcccgccgcgctgtccgaccgcccgccggccctgccggtgatggagctgctcgccggtcagccgggcagtcccggtcgcctcatcgacgccggcaacatcgccgccacgatgaacgcttacgccgccgaacatgacgggctggcgccgatcgtgctcgcacccgaccagaacggttcggccatgcacaacagcctgtgcgccgacaccacccgaggcaacgccgaaacctacctcaccaaggacgtggtgaactgggccagggcgacgctgccggtagccaagtcggcccgtatgtgggcgatgggcgggttctcgcaaggcggcacctgcaccacgcagctggtgccgcgtcaccccgacatctacggtgcgatgctgccggtggatggtgagctcgagccgaccgacggcagcgtcgagacgatggttcggcgatatttcgccggcgaccgcaaggcctacgacaggcaggtgccggtcaacgccatcgccgccaccggcacggccgaccaggcgctgttcgccggcgccggcaaaggggatcggaagtcggtcgccaacatgcgcaccatcgccgcggccgcgcgcgcggccggcatgcagaccaccgaactggtcgtgcccggcgccgaccatgactggcatgcggtgcaggcggtctggaaccccggtctcgactggttcggcgcgcgaaccgggctgggcgaaatgacgaaatcgttggaggaatacccacaagtggaggtgttgcaatgagcgaagaacaacagcatgggaacgcgcggccggcggccatgccgcagacgcggcggcccctgcgggacgcggaaccctcgcggacgaagcccgccacgacctcccgcgccaccaaaccgcatacggcaaggtccagccatgcggcggaaagctggcgtgaactggccggtgacgtgcggcagtgggcggacgaccaccggctggccgtcaccgccacggcggcgctggtggcgctgaatctggtggcgtggctggtggccgcgatggccggattcgcgtttccgctgcggctcagcaccagcatggccgcattcaacgccggcaaactcatctgctcgctgttcctggcgcgcggcgtcatccaactcatggtcgacgccgtcctgtggctcgtcatgctgtcgatagccgaaccatggctcggccgtgtgcgcaccgtcgtcaccgcgctcgcctgcgcggccggcggcgtgctggcgggcctgaccctgtgcgcggcggccggatggatgttccaggactccctgttcgtctcccgcatgcggttcgcattgagcccgctggtgttgccggtcggcgcgctcatggcggccagcgcgttctgcagccacctatggcgcaggcgcatccgactcgtcggctatgtggcgatcctggtcacgttgctctacagcggcaaccccagcggctactgcatactcgccgccgcgctgatcggccatgccgccggccgtgtgatggccggtccgcccgcgcacgtcgaagccgaatggcactggctgcgcagcacctccttcgaggcgcggcgcatattcgcggccatcgccgtggtactggccctggggccggtcatcgccatcacctcccataaccatgcgggcccgctcagcacgatcggcctgctcatgagcccggtttccgtcgacgatggcatgctggccaaatgcctggccggtgacacgcacggcggctgcttcctgcagttcgatctgctgcgggcctcgatgcccggcgcggtgttgcgctcgttgctgcccaccgccgtgaccctggtgctggcgtggggcctgtatcgcggacgtcggttcgcggccatctgcaccgtggccatcaacctgttcacggtggccatcgccgtcgcctactatctggtcgtgccgctgagcttcgcgccggacggcatggcctccctgctgcagcacggcgcgatcgtggcctgcgtggcgaacgtcctgcccccgctgctgttcgccatcgccctgctggcggcgatgaaacacttcccgatccgcatcggctggtgcaggctggtcggcggcatcggcgccatcgtgctggcctggctggcgtgcgccgccatatacctgatatacggcatcgcccaacccgccaccttctcgccacgcgctacggcctcgtcgctgctggccgagctgccgggacgcttcctgcccatcggcttcctgagccatatgaagctgtcgttcgtgccgcgcactccgatggcctcgatcatgtaccaaggcgtcggcctggtgttctggatcgtggtgctggccgtggtgatccactggatgggcgacgtgagcgaatcgaacgagcgagcccgggcgcgcgccgaacgtctggtcgaaaccggcggcgaatcgatgagcttcatgaccacgtgggaaggcaacagctactggctgtcccccacgggcagatcggccgtggcgtatcgcgtgctcaacggcatcgccctgacctgcaccggaccgttcggcgatccggcggaatggatggacgatctgaacggtttctcccagcactgtgcggaacgttcgctgtcgccggtgttctacggcgtgcatcgggaacagcgcgacgcgttgctggaagccggctggaactccatcgaggtcggcagcgaaatggtggtcgacccgcgcggctggaagacgaccggcaagaaatggcaggacgtgcgcaccgccatcaacaaggccaagcgcgacggcgtgaccgacgtgcagtccacattcctggaagcgtcgctcgatgtgcgcgaacagatcgaggacatctccgaggagtgggcgcagctcaaggcgctgccggaaatgaagttcacgctcggcggcgtcgaggaactgcgcgacccgcgcgtgcggctgctttacgccatcgacgcggacgggcgcgtgctgggcgtcaccagctggttgcccacctggcgcgacgggcgcatcgtcggctggacgttggatttcatgcgccatcgcaccgacagccccaacggcatcatggagttcctgatcgcgcgcatggccgagcggctgcgtgacgagggcgaagccgatcccacgcacgccgtggagttcatgagcctgtccgcggcgcccctggccggcatgaatcccgatcgggacaacgccggggaggacggggcaccggccagcgaaggcacgcaggtgctccaacacgcgctgcagatcgtggccgactggatggaacccgcctacggcttccactcgctgttcaacttcaagcgcaagttccagcccaccgaagcgccggtctacgtgtgctacccggacccggcggcgttgccgcagatcgggctcgcggtggtgcgcgcctacgtgcccagcgtgacgcccgccgaagtggccggcatgctcagcacgctgcggtcgtgaaggtgtgcacacgggtacgcaggttagccgattcgagcctgagacggggtatctgctttcagagaggtacatttggccccttgcggacaactaactgccttcaaagaggtgcctgaactctgaaatctcgagtatgagcgttgcaatgacaacgtttgtactcggggtttcccgtattcggtgcctctttgaacgaagatagcattctgcagaagcccgaatgtacctctttgaacggagaaagcctgacaaggagggcgcggcaagcgctatctccgtttcgaggggctgatttggtctctcccggaggtctactcccgtttcgaggggctgatgccgaagtattcacgctccaaaatcggcggaatggcgttggcgcggatgggtttttacatgcggtctagcggccgaccagccccttgaaacgggagtagacctccggcgggggtcaaatcagcccctcgaaagcggttttgccggtgcagaggtgtcgttgactgcatcgcgagccgcctcgacgtagtaacgtggggcgtatgagcgaacgtaacgaacacaatgacggaaatacgcaaaccgcatacttcgccggcggctgcttctggggtctggagcgctacttccagaacgtcgacggcgtcacggacaccacggtcggctacgcgcaatccaccgtcgaatcgccgacctacgagcaggtatgcgcgggcggcaccgatgcggccgaaaccgtgaaagtcgagtttgacccggcacaggtcagcctgcggacgctgacattgctgttcctggaggtcatcgacccgttctccgtggaccagcagggcgaggaccgcggccggcagtaccgcaccggcatgttctacacggacgagacgcagcgcgccgtgtatgtggcggctctggagcagctggtcgaccgccagccgcagcgcccggccgtactggtcgaaccgctgcgcaacttctacccggccgaggcacaccatcaggactatctggtgaacaaccccggcggctactgccatgtaccgatcgccgcaatcgcgaacgtaaaacgccgtcagaagtacgtggaacgcatctgggatctgacgcttgagcagttcgcggtcacgcagaacgccgctaccgagcgcccgttcgtcaacgagtatgacgaggagtttgagcccggcatctacgtggacatcgtcagtggcgaaccgctgttctcgtcgcaagacaagttcgattccggctgcggctggcccgcgttctcccgcccgattgccggtgacttgctgaccgagcatgaggaccaccgcattccgggccgcgaccgcatcgaagtgcgcacgtcggacacacagattcacttgggccacgtgttcaccgacggcccggccgaccgcggcggcctgcgctactgcatgaattccgccgccctgcgcttcgtgccgcgctcgcgcatggccgaggaaggctacggcgactggattgcggttgtggatggggatgatcaggcatgagcatggagaatatcgcgggcgctcgcaagcccgccaagcgtgaggatgagcacacggtcgccggcgagcatcgcatgatgcgccgtgcggaccgcgaggtgaccgatcccgagcggatcgccgcgatcatcgccgcctgcgacatcgttgaagtggcctatgcggatgccgagggcctgactatcgtgccgctgaatttcggctttgattacgacgaggcgactggcaagctgacgctctggttccactccgcgccgcgcggccgcaagctcgacgcgattcgcgccgccgccggtggccgactgcccgtggctttcaccatgcagaccgactgcgaggtggtggcgggccgcaccacgtgcaattggggtgaggcgttcaagtcgatcgtcggcaatggcacggcgtcactggtcgaggatctggatgaatgccgccacggcttgcagacgctgatggcgcagcaggcgcatatgccgaatgtggaattcactgatgcgcaggtccgcagcgtcacggtgtggaagattgagtccgactacttcaccaccaaagtccgcaccaaacccgtgcccgcacacatgcatcagcgttagccggggatagcgcgccacctccccactggcgggaggcagcgcgcagcgccggtggatggcccacgtccggacccgatagacttgccgccatggcagcagtgacagtggtaattaccagctacaatcagggcccgttgattcacgaggcagtcgagtcgtcattggccccagacggttcgtccggaacggattatcatcgtgaacgatgggtccgatgaccacgcatccgtcgagatgctgaacgccactctcgacgattgccggcacggggcgatggatgcgaatggtgtggccatcgacctcatcggccaggcaaacgccggtccttccgccgcgcgcaaccgtggcatcgccgccgccgaaacgccgttcgtagtggtgttggatggcgatgaccgtttgcggccggccttcattgagcgcacgttgtcgatgttgtccgccgacaaaacgatggtcgccgcatccggctggctgcagactttcggtgtcctggaatcagtggcccagccgactggtggcaatgccgccgcgttcgtgtcgcataattgctgcccggccacgtgcatgattcgccgtgtcgcgtgggagcgctgcggcggctacgacgagtcgatgcgcggcggcttcgaggactgggacttcttcctgtcgttgttggagtgcggattggcggtggaaaacgatatctgcggtgctggggttactggcggtactgagcatgtcggaggttttgggagtgcctgggatacagagaatcccgcaaaagacgcggcccatatcggcatcgcccccgagccgctgatcgagtaccgcacggccccggcctcctcaaacgtgaccagcatgaccaagcgcctcgatctcatgcgcttcctgatcgccaagcaccgcgatctctacgccgcgcacatcgccgacgccatcctcggcgttgaagccatctccatgagccgcttaaccatgtgggaatcgttgatgtgcggtgacatcaccgccagccaagccttcatgacccaccccacctacggcgacggcggaatggccgccgccgtacgcttgcggagttgagaggcatcagctgaccaaatgccgatagagctccggatcgattggccgggccaaccgcaggatcgacagcgtgaccttcacgctgccttgtccgcttgcgtcaggtttggtggtgagctgagggttgtcaaacgcagcaacgtggccaacgtagtagtacttaccctcggcctcttccgccttgcgcataacgaataacgggacgaaatgcgtctggccccaattcgggccaatgccgttaagcgcccattggaattcgggagactgcggagttcgtccattcttgctgaagtatttcatttcctgtgtgctcaggaattcatcttcgtattgacttgccgcgtatttcacgaagatgggcatggtattggtttccttgtcgaggaggtaaccacccacgttttgcggagtattctccttcttccatccgcacagtcgcatgacgtctgccatggaatatttgcgttcgtacaagaacatgtgatcaaagacctgttgcctggcggcggcctcacggaatatatctcggcaattggccataccggtgcgcagagtgtccgcaaagaagatacggaacgttctgttcgtggcaagcatatcggcgaatctgctgttcaatcgatatgcggtaccgtttcctgtgccggtgctgttcacggcttcgactaatggctgattgccgaaacgattgcagtttgggccggtgaaatatgagtaatcgagcacgctgatcgcagagtcgaattgcgtgtctgaaccatcggactgcgggaattcagtacgaatcgcatcgagcaattcgctgcggccgattggcgagcccgcactccaatgctgcggtacgtcgtcgtcgagccgttcgctgacgaaatggcatagctgagcaagaatgaccaattcgtgcggtcgcaatccgggcagcagcagctccgctgccatcttgagtatcgcgtcttcaacgtcggtcaccggctccaactgatcctcaaatgtcgcttcatgatgtttgcctttgcccaggcttttttcacgggaacgcacgaaatcaagatagttgctgcgcttcgatgcgatggtatacggcagtgaggggtcgtagttatagatgtccgtaagcatggggatgcggcccagctcgtaacggacttggcgatactgttcggacagctttttcatgtcggaccagtcggcggtgtccaaagacttaaggatgcgctccttggcgatcgggtcgaaactgatggacgacaggccgattgactttctctgcaggttcttgcgagctctgtcgcggtcgccggtgttgccgtataacgccaccggaatcagatagttgttgttgtaattgccaatgaaatcgataaccacaacgctttctttgtgcgggaatttgcgcagtccgcgcccgagctgctgcgtgaagataatgctggattcggtgctgcgcaacatgacgatttggttgacggcgggaatatcaactccctcattgaacatatcgacagtgaagagatagtcgagttcgccttcaatgagcttgcggacgtattcgtctcgctgcgtttgggacacgggcctgccgtcatcgtccgtgctggtaacggcagcggtgcgataggggcgttcggcttgttgattccactgttggttaaacagctgggatagcttatgggcttcctcctgtcggctgcagaacacgagtccggtgaccggaatgttgaactgcccatattcctgcaacttgtcaatgatgtagcggactcgcttttcggtggcaagctgctcgatctcgtacttgagctgtttcgagtccttcgcatcaaggcccttggagacatcgagacgatgggcgattccattcggatcgtcgttggagccaaggtattccgcaacaccgtagtagtggaatggacagagcatgttctcgtccaacgccttttgcaagcgaatttcgtacgcgatgttatgcccgaatagctcgaagatgttgatgccgtcggtgcgctctggcgtggcggtcatgccgagcatgaagtcggcatctttgaaatgattgatgacgcgctgatatccttcggctccagcgtgatgaacttcgtcaaccagaacgtagtcgaattcatcggatttgaattgcgccaaaacctccggctgccgcatcgtctgtaccgtggcgaatacgtagcggcggtcctgttgcttgctggtgcctgaatacaatcccaattcggattcatcgcagccgagcaccttttggtaagacttcattgcagtttgaagaatcatctgctgctgggcgatgtacagcatgcgcttcggctggcattcgcgtacgtcgaatgcggaaaggtacgtctttccggtgccggtggccgacacgataattgcgcggtgctcgccttgttcacgaatcttcttgagattcgccaacgcctcctgttgcatggcgtttggctgaatgtcatgcccctcaagcgactgcagaatctcatgacgcggtggggcgtatttcttgaaatcttcctcatactgtttgatccactcttcggtcagcggaacggaatcagccacctgtgagtcgatttcatcctggaactgcccgaccagctctccatccgccagcgatgagactttgagattccattcgcgttgcgtggtcaatgcggctccagtgagattggaactgccaacgtacaggtcgtaatagggtgtaccgtctttcatgcggcgagaaaagatatatcccttgggatggaatggttgtccttgagccattgcggaaactgaggtattacgggaaccttcccacacgcgaacgtcaacaccagtggtgttctgaagatgcagcagctcccagaatgccctgggatcgttgaaatgatttttcgttgaggtaatcagtgtgcccgctcgggtcgctgtttcatggtgacttctgaagtcttcaaataagctgagcacggcctcagccgagacgaatgcgacagaaatgtcgaaggaatcgctagtagccaaggaattgccgatttcctcgtgcatggtcaatccaccggggcgatttgcgatgagggtcggcttatattcgccgggagcatctgagcgcggctcgatcagacctgagatgacatcttcgaggatcgagggggttggatcagaatcgtgatgttgcgtgttggctggagagtctgaggtgctgaccagatttatagacatgttgccctgttcccttgcgattcggatcgtttgatgactgcctgactgcgctgtggcgcgttcattggagcgtcagttgtttgttcgcgataatcgcgactgcttcgcgatctaccggagcccagttcaatgtcggcatatcagtaggattcagccatcggatatcggtgtgctcggtgagatgcggcgtaccggcgatgaggtgacagatgaatgtggtgagccgcacggttccaaagtcgtaggcgtattcgctggtacatacctcttccgcgacctcaacttcgcataacagctcttcttcgatttcgcggtgcaaggcttgccgcgctgtttcatgaggctcaattttgccgccggggaactcccagtatccggccaacgactttcccgggccacgctgggcgcatagtacggtgccgttggtgacgattgcagctcccacgacgttaatgattttgcgttcccgctccatgaacaaccaggatacaacgcttcaagatccacaagcgatccacgatcctcggtggttttgcatatcgatcctgatgcttttgattatgcgatcggacgggtcgaaaatgtcggtgtggacgctgccgactattgtggtagccaagagaagcgatccgtttccgaggtgagattcgggaacggtccgactctcggcagtgatttatctacgcagacaagccaaaggagcctcgccatgatcctcgtcaccaccaccccgtccgtcgacggatacaccatcaccaattaccagggcatcgtcttcggcgaagtggtatccggtgtgaacatgttcaaggatcttggcgcgggcctgcgtaacatgttcggcggccgcagccagggctatgaggaagagctgatgcgtgcccgcaacgaggccatcgccgagatgcagcagcgtgcggaggcgatgggggcgcacgccgtggtcggcgtggacatcgactacgaggtgctcggcgccgacaacggcatgctgatggtcaccgcgtccggcaccgccgtgcagatcgcgcgtacggcctgagcctgccgagcttgggcccgagctcgtccaccgagccgggctttgtcggttatcgtgacgcattacactgacgctcatgaccatacgaatcgaagcatacgaccggttgcccgacgcggcccgcgccatccgcgagcaggtgttcatccgcgaacgcgactggcggccggaattcgatgaatgggatgccgcgtccgtgcatctgctggcgttcgattcggataatgatgcgcccaatcgccccggctcgtccgcgcaattggcctcacgcagccagcccattcagcccagccagaatcaccccgtagcgacctgtcggttctacgcggaccccgatcatcccgaccagcccgggcgatacatcatcgcgcgcctggcggtactgcccgaggc

SEQ ID NO: 1958 - DNA, 8689 bp, Unknown
  R17_18m  MAG No. k141_12333
ctgagcagcccgagcagcctgagcggtccgccgaacagcctgagcagcccgagcaacgcaagcaaaccaagcagtctgatcaatctgcctccagcaatcctagggcagggtggcgctgatgactctgctttccgtactcgatattcttctgatgatcgtcggcggtgccggcatgatatatcagggactgtgcatcgtgatgtccctgttcgccaagcccgtgcgcttccccgacgccccgatgaccaaccggtatgccgtgctgatctccgcgcgcaacgaagaaaaagtgatcggcaaccttattgggtcgattcgcgatcagacctacccgtccaacctcatcgacatctggctggtggccgacaactgcaccgacaacaccgccgacgtggtgcggtctttgggctgccatgtggtggaacgccacaatcttgagctggttggcaagggatatgcgctgacgtatctgttggggcatatgctcgacatcggtgtggccgatgattatgaggcctacttcgtgttcgatgccgataacaagctggacaagcactacttcgaggaaatgaacaaggcgttctgctccggattcaagattctgaccagctaccgtaattcggtgaatctggcggataactgggtgtcttctggttctgcgctgtggttcatccgtgaatcgcgattcctgtctaactcgcgtatgattctcggttcctcttgccatgtgggcggtacgggattcatgttctcccgcgaggtgatgaagcggaacaagggatggaagttccatctgctcactgaagatcttgaattcactatggattcgattctgcatggcgaccgcatcggctattgcggtactgcgattctctacgacgagcagccggttaccttctcgcaaagttggcgtcagcgtttgcgttggagcaagggattcctgcaggtattccgttattatggctcggcattgctgaaacgcgcggttcgcgaacgtgatttctcctgcatcgacttcaccttgatgctgtgtccgtttaccgtgttgggcgtgattcgcgcggtaatgggcttgctgttcgccgcgtgtggcttcgtgagttggccgagccagctgcaatcgctggccagttggtccagtggcatcatcatatcggtgttgggcctgatggcattggctgcattgaccatcattgtcgagcgcgaccagatcggtgccacgaacaaggagctgctcgcctatgtgctcagcttcccgatttacattctcagctacgtgccgatctccttccaggccctcttctccaaagcccagtggaagcccatcgcgcataagggttgaccgagtccgctagttggagctgctcagcggggcaatccaacagcaacccgggggtttgcttcgctgagggttggctggtggggtagagtggatgtatgagcttagacaatactcaaaggaatgtcggatttcagccgccgatgatgccagctgccgcccccgcgcctgcacggccgtcgcaaccgcagccacaagcatggccgccgaatccgaatgcggcggtgtccattcgtggcctgttcaagcacttcgaccggaagatcgccgtcaacggactcgcgctcgatattccggtcggctcgttctatggacttgtaggccccaacggcgccggcaaaaccaccacgctcaatatggtgaccggtctattggtaccggacgccggcaccgccatgattttgggccatgacgtgtggagcgacgtgaacacggccaagcgcatgatcggcgtcatgccccagcccgaccagatcctcgaccgactgaccggtttgcaattgctcgtctactccggcatgctgcgcggcatgagccgcgatgagaccacgcgtcgcgcccaggacctgctcaatgctttcgacttggccggggccgccaacacgatggtcaccgattattcggccggcatgaccaagaagatctgcctggcctccgcgatgattcatagcccgcgcattctggtcctggacgagccgtttgaatccgtggacccggtgtccagcgccaacctcaaagacatcctcatcgaatacgcgaagaccggcggcacggtgattatctcttcgcacgtgatggcattggtcgaaaagatgtgcacgcatgtggccgtaatcaacaacggtctggtgtgcgcggccggcacggtggacgaggtcgccgccggcgaagaactcgaagaccgcttcctgcaactggtcggcggccgccacgaagccgcccatctcgcatggctcgacggcgggcaagcccaagcccaagcaccaacttcggtccagccggtccagcccattccgcttacaaccgccacgcccgccatacccaccgatgaggcccgccgatgatcagcagcgccatcaccctggtccgcctgcgctggacgctcacgctcgccaccctgcgaaaatcggcgtggcagaccgtcgcctatgtcttttccgccgtactcgcggccggcaccatcatcggcaccggcgtgctcgcatggttcatcggcatactgccgcccttcaccgtgaacgcggatggctttccgctgaacatccttggttccggaggcatcgtcaacatagtcgtcgtgctggtcggcgcgaccatgaccatcttcatcggcttcatccagctcatgatgcttggcgaaggctccaccatgaacccacgcaaattcgcgctctacggcatcgccgaccgcaacctgcaattcggcttgctgctttccggcctgtccggcatccccgcccttaccggcgtggcctcactgatgctctggacactggcctatcggcatatgggaccagccgtaatcatcagttccctcctcgccgcagtgctggccgtcatcaccatgatgagcatctccaaactgctcatcgccctatccaccacgctggtgaccagcaaacgcggcaaaggcgcgttctatatcttcatcgtgctgacgttcgttatcatctgtcagttgccgaacattctggtcaactccggcgtggccttcagcctcaacaccgaaacctggggcgcggcgaccaccatcgtcgcatggacgccgttcggcgcggccttccaactaccgttcgacgcgcttaccggagcctgggcggtgctgctcgcccgcatcgccatccttgccgtcacatggattgtctgcttcgccgtctgcacctggtgtctgagacatgaacggctcaccatcggcgcaaacagtccgtccgagaccgccaaaggcatcggcgcattcgcatggatgcccgattcggcatccggcgcggtttccgcacgcctgatcacctatctcaaacgagacccccgccaagccatgaccttcgccatgccggtcctgttcctgatcatcttcgccttccaggcacacggcatcagcgcggtcgtctggcagtcgctgatctggtgcggctggttcatgtccgtcgtggaaagcaacgggctcgcatatgacggccgcggcttcaccatggaagtcatcgccggcgtgcgtggccggaccgacagaatcggccgcgtacgcgtctacgtcggcatcatggtcgtctacatggtgctgctctatctcgccggcatcgtgctggtcggcgcactgaccggacgctgggcgcagcccgatgacctcgctaccggcctgatcttcctcgccacgggcatgggcatcgccttgagcggactgggcgtggccgaagtcacctcctgtgtactgatgtacccggtcgcctcaatggacaagccgttctccgcgcctcaaggccgcgccatggcccaaggcttcttcccgttcgtctacatgcttggcagcctgctgctcatgctgcccactggcatcgtggcgctggtcatgctgctgacaggagccgaaggcggcatgtggctggcgattattccggtcgcgctggccaatggcatcggcattctggcactcgggacatggctgggcggtaagctgatggatgcgcgaatgctctcgattgtggcaacactcgactcgttcgcctcattgcagaaatgattgccttggcataaggagcacgatggtatctacagcggtatcacgccgtcagcgacgtgaagcgcaacggcggacccaacgatcgcatcgccgaacactgaccgtcatcatttccgcactgaccaccatcgccctgttcgcggggtactgcgccgccgacatcaccgacgtggcccccggattgttgacgttaaaacctgtcaccgcacctgttttcgccaatccggccaccgccaaatcaggcggcaccatcgccggtgccctgaacgcgaacaaggccattgattccacggccgcttctgcactggtcaacgaattgctgtccgcgcaaggcgtgggaaacgatacgtcggtgatcattgaagacgcccaaggcaccgtcgccgccgaacacgagtcgaacactccacgcgagcctgcatccacactgaaaacgctgaccgcgctcgccgcctcatccaccctgaatatggcatccaccttggatacccaagtgttcctgacccaatccgatgacggcaccaatacgttgaccctcaaaggcaatggcgacatgctgctgtctgcaggcgattccgacgcaaaccataccaacggacgtgccggtctgaacaccttggccaaggccaccgtggccgcgctcgcccagcgaggcatcacttccgtcaatctcgagtacgacgacaccctattcggcgactcacgcattcccgcaggtctgtcggaaggcggcgcggtcttaagcgactacaccgtctacttcacgccggtctcatcaatggcgattgatggaggccgccaatacaccgccgatacgcctgcgccggccgaccctgatgattcggccggatacccggaactgtcccagcacaccgccagcgacgtggccacgaaattcgccgaactgctccaatcgaacggtgtggccgttaccggagacgtgacggcaaacaccgctccatccggcgaaacgcctttggcctcggtgagttcggcaacactgtccgaaatcatggcatacacgttgcggcattcggacaatacgctggccgaggagttcggtagactcaccgccttgacgaaatcagcgacaaacagtcctgaaggcggcacggaagcggtcaaatccactctgaacgatctcggtctcgacacatccggtctgaccatggccgattgctccggcctgtctcccggctcccggctcaccgtacgcacgctggcggccgtccaacaacgtaatctgaccaccgagagcggtgctgctggtgcggaaggtctatccatcgcggggttggtgggcacggcgcaggatcggtatacggatgatgccgtggccggtctgttgcgcgtcaaaaccggcagcctcggcacggtcacgtcgatggccggcaatgtgtcccgtaccaatgggggagcgttgtcgtttgccgtggtggtcaacaatcctgaggattatgccgccgcgcgtagcgccatcgactcgttcatcaccaagctcgcggggctgtaaaagaggcatcaagggccatcaagggctacaaaggccgtaaacgtccataaacgcacgagtgcctataaccagaaaagggtggtgagtacatggcatattccgcacgattgcgcaaggccgtaggcgcggtccgaacaacgctgagcgccgtggaactatgcgatgtgcaggctcccgaattcgcgcagcatggggaccatgccgttgcctccgatgcaccactcgtgctcgtggcctgttcaggcgggcgcgattcgatggcgctggccgcggtaagccatatcgtatgcacgtccatgggcgtgcgttgcggtgtcgtgattgtggatcacggcttgcaggagggttccgaacaggtcgccggcgaggccgcggatcgttgccgtgcgttgggactgggcccggtcatcgtgcgcaacacaaccgtgcaggcacgcggtgagggcctcgaagcggccgcacggcaggcccggtacaacgagctgtgcaccgcggcgcgtgaatcaggtgccattgccgtgctgttggcccacactatggacgatcaggcggaaaccgtattgatcggactgctgcgcagccgtggcgtggatgcgttggccggcatgccgcaggtcttcacacgcagtggcgtgacttttgcgcggccgctgctgacccttactcgagacgaaaccaccggcctctgtgaagacttgggtgtggaatattgggatgaccccaccaatggcgatgcggtagacggcgagttgccggacgactatccgttgcgctcgcgggtacgccacgacctgctgccggccatcgaacgattcgctggattcaatgtcacccgccatttcgccgaaagcgcacggttggccagaatggataaggagtatctggatcagcgatccgacgaggtgatgggggaggcggttacgacagttgattggctggcatcgtcggcagcggtatcgaccgatacgccacgagcctgtgctgcagacgataccaacgattcgggccatggcatcggcctgatgatcggcgtcaaacgtattgcacgtgagccagaggcgattcggttgcgggtcatcgctcacgcgctgagccaggccggtgtgaacgccagtgccgcccagattgccgccatcgaccggctggtcgtcgattggcatggccaaggcggcgtctcacttcccagaggttattcagccaatcgcaagaaacacgtcattcgcgtgtgccaagatggagcgcatgcgaatcgctgacgttgaggaagatattgaccacgagctggtcagcaaagaacagatcgatgccaagatccacgagatggccgctctcgcgagcgaggattaccgcgataagaatccgctgctcgttgcggtgctgaaaggggccgtgaatacgctggtcgcgttcacccaggccatgagcattcctgtgcagatcgacttcatgagcctttcgagctatggctcgggcacagtgtcgagcggtgaggtcacagtcaggcaggatttgtccgccgatgttcgcggacggcacattttgattgtggaggatattgttgattcaggacgcacgctcgcgtggctggtcgcagaactgaaacgtcgtggtgccgcttccgtggaggtcttcgctttgctgagcaagccttcccgccgagaagtggacgttgatgtgaagtacgccggctatgagattccggacgagttcgtcgtcggcttcggcctcgactttgacgaacgctaccgcaacctcgattcgatcgcggtcctcaagccgtccgtctaccaaggagtgcaagcatgagcttcccgcaagggccgggtaacggcaataatccgaacccgaacaacaaccgtaacaacggcaacccgttcaccaacccgttcaaccgtggcaataacgggaccaatggcaaaggcaacaacaacgagaaccgcccgatatggcagtccccttggctatggggtgccgtgctcgtggtcatggtcgtgctgatgttccagatgttcgccggcggtggcacgaagaccattgacaccaaagatggtttcgcgctgatcaatcagggcaaggccacctacgccgagatcacggacaacaagcaggtcgtccgccttaagctgaagaacgactacaccaagaaaaacgccgacaccggcaaggtgaccaactacggcaagaacgtgcagttctactacaccttcgcgcagggcgcacaggtggccaaggccgtggagaacggtgatctcgaaaagggttggacctcgaatatcgagcagaccagcatgctgagctacctcgtcacctcgatcctgccgttcatcatcttcttcgccctgttctggttcctgatgagccgcatgggtggtgccggcggcatgctcggcatgggcggcaggaagaacagcggcaaactgctcgacgggcagacccccaccaccaagttcgccgatgtggccggtgaagacgaggccgtggccgaagtcgaggagatcaaggacttcctcaaggatccgtccaagtacaaggcgctgggcgctcgtattccgcgtggcgtgctgctgtacggtcctcccggcaccggtaagacgttgctggcccgagccatcgcaggcgaggccggcgtgccgttctactcgatggccggctccgacttcgtcgaaatgttcgtgggtctcggtgcctcccgtgtgcgtgacctgttcgatgaggccaagaagaacgcccccgccatcatcttcatcgatgaaatcgatgctgtgggccgcaagcgtggctccggcatgggcggtggccacgacgagcgcgagcagacgctgaaccagctgctcgtcgagatggatggtttcgacaacgacaccaacctcatcatcatcgccgccaccaaccgccctgacgtgcttgaccccgctctgctgcgtccgggtcgattcgaccgtcaggtgggcgtggccgcccctgatctggaaggccgtgaggcaattctgagggtgcatgccaagggcaagccgttcgtaccggacgtcgacctgcacatggtcgccgtgcgcacgccgggcttcaccggtgccgatctggccaacgtgctcaacgaagccgc

SEQ ID NO: 1959 - DNA, 19946 bp, Unknown
  R17_18m  MAG No. k141_12945
aacttctcgcatgcggtaccgaggccgtaccaagcggccaggttgatgcgtgcctgagcccaggagaagatccacggaatcgtacgcagatcgtctagggacttggcgccaaggccgcgcttggccgggcgggagccaatcggcagcagaccgatttcggtcagcggcgtgacgatcgagaaccacggggcgaagccatcggtgttcagcaggtcgaggaagcggttgtgcgcggcctcgtcgagctgagcagccatgtcggcgtacttcttggtcatgtcggtgttgcgcttctctacgctcggcgcggactgcagcagggttgccgcagccacggactcgacgtggcggatggccagcaccgggttgccgtagcgggcgaagatgacctcgccctgctcggtgagcttgaagcggcacttgacggaaccgaccggctgggcaagcaccgcacggttggcagggccgccaccacgaccgacggcaccaccgcggccgtggaacaaggtcagatcgatgtcgtgcgattcggcccacttggcgatgcgctcctgagcggagtgcagggccagcgtggcggaggtcgggccggcgtccttcgaggagtcggagtagccgagcatgacctcgagcttgttgccggtggccttcagacgagcctgaacctcggggatcttgatcatttcctcgagcacgtccaccgagttctgcagatcctcaagctgctcgaacagcgggatcacgtcgatggtgggcacgtcctccgggtgggagaaggccaagcggttgagctcgtagacatccttgatgttctgggcgctcttggtgaaggagatgatgtagcggcgggcggccttgaggccgttgcgcttctggatggcaccgagagcgcggaaggtgtcgagcacctcgtgcgtcatcggctgcagttcgccgcgctcgccgtgcagaccgtgctcgcggatatccgcaagggcgcgggcatgcaccacggagtgctgacggaactccatctccaccatgtggaagccgaaggtctcggtctgccagatcagatcctgcagcgggccgtaagcggaacgcttggcgccggcggcggccagcgaacgctggaccaccttgaggtcggcgaggaagtcgtcgcaggagtggtacatgaggtcggcatcgcgctcgatggtgtagtgcagacgatcggccatcaccagcatgaccgcgcggtgcatctccttggtggagatcagggcggccttgtcggtcagacgctcgctcatttccttctggtggctccagaggctcttgagctcggcgctcggcggcgtggtctcggcttccatcgtgaggttgcggcccacggtgcgggtggcttcctcaagggcggcgatcacgtgatcggagaacttgcgggccacggcgcggctcaccttggcggtgacgttcgggttaccgtcgcggtcggagccgatccagctgcccgggtggaagaacgcggggcaagcgggctcgacgagaccggccttatcgcccaggacccagtcgtcgaagcgacggtagaccttggggatggtgttgaacagcgtgttgtcgaagatgtcgagaatcgtgtccgcttcctcaaccggggtcggcttcttcagcgcgatcggagaggtgcggaacagggcgtcgatctcgttgtagagacggcgcaggcattccttcttatccgagccgccgaggcgcttgtactcctcaagcaattcggaaacgcggcggatcttgccttccacggccttacgacgggcctcagtggggtgcgccgtgaagacggggtggaattcgagctggttgagcagttccttggccttggccgggccagtctcattgatgagctggtggtaggcgacggtgagctcgttgatcggatcgaccgcctggtcaacgggcacgttgttctcgcgctcgtggagcacggaaacgcggtagttctcctcggacaggtttgccagatggaaatacgtggcgaatgcgcgggccagcagctgggcgtcgtgcaacgtcatgttgtcgatgacgttcacggcctccttcaggccatcctggtcggggttcggatccttcagctcggcgaaatgctcggcgctggcctccaccgcgtaatgacgtacggtgtcgaacgtagacagcagttcggggttgtattcgcccagtacgttacgcaggatctcaagacacagatccatgtcgtacttcaggctttcgggaagatcatgctcctccgggccctttcggccggtcccggtagtgacgatggcggcgtcagcgggagtgatctgttcttcaggtgttgccatataacctcctttgccgaataacaggttgctcggtctaccggtcgtctgcggctcctccgcagttgttgaggccagtcgttgcgagcccacagcccatattcaacgtggttgttgtgtgggcaatagtgtatccccgcgaaatcgctatttgcgttacggagtccatatagtgcgccaagttgtccacctatagagaccgaatatcggacagcatatgagacactgtccgattcgcggaagatttgagcgccttacgattgccggcgggggaggcagggagtagtaatgagggatgtgagcgaacagaagaaaaaaagtgcgcccgaagcgaaaggcgcaacggctgtacgtaaattccacacccactccattccgctggacatggaagatattgcgcgcgattgggaaaaaccggtggtggacgccggtatcgccgccaaagccagcgtgattgtacgagtcggcatgttggacctgggagccggcaccggctccttccgcgtgcgtgaaatgatgcaccgcatcgcctacccgctgggcgtgcacgtacgcgccgacgtgaacctgacggatatcgaggccacctgcacggatggtcgtaaccgcatcaccgaagtcgtggatttgccgagtaccggcgtgaacaccgaacgtatctggctgctggaacatttcgccgactggttctccgtgaatctcggcaaggggtcgatgtatcacgtcgattcgcaactgtccgatggcgtggtcaagcatttggacgaacgtgacgcttcgcagtattcggccgatctggccaagcgcctgcgcgaacgtgccaaggccgaggctgaggcggccaacggcagcgtggacgaggcgctggatcttgcgtcgaaaaccaaggtactcgtgacctccgtggccaagtccttggacgatgacaatgaagaagcccaccgacttttggcggacagcgcggaagtcactccggtcgaagacaaagcggccgaagagaaggcctacgacgatgccgaagtgtttaccggtgactccaatgagtcggttgaatcggcgaacgcagcgaatgccgaggcgggcgctgagggcgcggcggcgaacggcgcaaccgccgaaagccctgctgcaagcagtacgaagcgcaagaatcgcgtgcccaaggaatacgccgaacacttcaacgagcgctccgacgaagagaaggccaagggcggtatcaccgtgcggcaggcgcacgagcgactcgatctgattgagcgtcgcaagccgctgtacaagccgtggttctccggtctggcctccgccctggcctgcgcggccttcgtgttcctgctcggcggcggcccatacgacatgatcggtgcgttcgtgggcgcgggccttggccagtggatgcgtcgccggctgtttgcataccatctgaaccagttcttcgtcacctttgtgtgcgtggccgcggcggcgctcgcctgcaccggcaccctgcgactcatcggcattttcgacccagtcgcgctctcgcacgatacggcctacattggcgccatgctgttcgtgatccccggtttcccgctcatcaccggcggactcgacatggcgaaaatcgacttcccctcgggcatccagcgcgtggcgtacgtgctgtgcatcatcctgatggctacgctggcaggctgggccgtggccgtgatggtgcacctgcacccggaaggctttgagccactggggcttgacccgtgggtcaacggattgctgcggttcgtggcggcgttcgtcggcgtgtggggcttctccgtgctgttcaattcgccgcagcgcatgtgcctggccgccgccctgatcggtgcgatcacggacacgctgcgcttggaattgcaggacttcaacgtggcacccgagatggctaccttcatcggcgcgttcctggcgggcattctggcatcggcgtggcgttcatccgtgcgacgtggctggctaccgccgcacctcggctacccgcgcatctgcctgaccgtgccgtcgatcgtgatcatggtgcccggtctgtatatgtaccgtgccatgtggtacctcggcagcttccagaccatgaatgcgctggactgggcgttccgtgcgttcatggtgattatctgtctgccgatcggcttggcgatggcccgcgtggtgaccgacaagtcctggcgctacgacatctgaccgtcatcttggctcccctcaggtggggagctcggataaaacagcgtctcagtatggaaacggtggaaggtgcttgagcccttgtatccactaccatcaggcgaagtgcgttgcggccgtattcacggctgtgacggtctgtatgacgccgctccggcgtcaatcgcatatcagcacgcatatcagcacatagttctgccatggcggtagccgcttggcgtcatgattggggaggtgtcgcagttggccaacgatttctggattctgctggccatggtcatctattttgcggccatgctgtccatcggattcatctactccgaacgctccaactcctcctccaaggaatactttgcgggcgggcgcggcgtggggccgtggctcacggccctgagcgccgaagcctccgacatgagcggctggctgctgatgggcctgccgggcctggcctacttcaccggcgcggccgacccgatgtggaccgccatcggcctggcgctcggcacctatctcaactggaagcttgtggcccggcgactgcgccgctactcggtagtggccggcgatgccatcaccattcctgacttcttcgccaagcgtttccatgacaagaagggcgtggtctccaccatcgcggccgtgatcatcctggtgttcttcagcgtgtacgtgggcagctgcttcgtgaccgtgggcaagctgttcgccacgttgttcggtttcgactaccacgtcatgatgatcatcggcgcggtggtcgtgttcgtctacaccgtggtgggcggctacttgtccgtggtgatgaccgacttcattcaaggcatgctcatgttcttcgcgctcgcggtggtgttcatcggcaccgtggccagcgcgggcggcatcgacaacaccgtggaattcctgcgtgccatccccggctacctgtccggcacgcaggtggccgcgcccaagctggacccggccaccggccagcagctcgtcgaggcgggcaaggccgtgttcggcgcgccctccgactacggcatcatcaccatcatctccatgctggcgtggggcctgggttacttcggtatgccgcaggtgctggtgcgcttcctgtccatccgcagcgtggaagaagtgcgcaagtcccgaatcatcgccacctcctggtgcgtgatttcgctgggttgcgcggtgtgcatcggcttggtgggacgtgcgatgatgcccaccgaactgctgacctccaccgatgcggagaccatcttcatcgtgctggcgcagaccctgctgccgagcttcatgtgcggcgtggtggtctccggcattttcgcggcctcgatgagctccagctcctcgtatctgatcatcggcgcttcggccatgggcgagaacatcttccgcgggctgctgcaccgcaaggccaccgacaagcaggtcatgatcgtggccagggtcacgctggtggtcatgttcctgttcggcattctggtggcatacgaccagaactcgtcgatcttccaggtggtgtcttacgcgtgggccgggcttggcgcctcattcggcccgttgatgctgtgctcgctatactggcgtcgcgccaacaaggccggcgccgtggccggcatgctgtccggcacggcggccgtgctgatctggcacaacctcgtcaagcccttgggtggcgtattcgccatctatgagctgctgccggcgttcatcatttcgctgctgttcatcgtggtggtttcgttgctgaccgccaagccgaacgagcgtatgctctacgaattcgaccactacatggacgatccgctgcccggcaccctgccgtccggcaccgtgctcgtcgacgagcccatggaagccatggagtccgaggttcgcagcggcaaatgacacgtgcctgctgtgcggtcgcctcgtatggcagaggagtggcttttttgtggttcggcaggaaccattgaggccaaaacggacttcgaggggctgatttgacgttctggagaggtctacttccgtttcaaggggctgatgcctgagtagacgcggctccaaaacggcggaatggcgttggcgtaagggcattgatacacgtgatctagcggatgatcagccccttgaaacggaagtagacctccggcggaggccaaatcagccccttgaaatgggttttgaataccgtagcgcggtgcggacggtgcggactgactctaccgggcttattattcctgcgtcgtcggaataattggcagcagaggctcgaatttcagccgtttgtacagcggaatacggcgtagctttcggacatcgctaatttgctgggtggtttgccgcatcgtgagctggaccgttttgcccgtaacctcctgtatcctctcggcaactcttcgggcaagggcctcttctcccgcttcgtcgccaatatctaatttggtgacttgaatgtacttccagccagcgtcttcgatcatctggcggcgtctcgcgtcattcagccattgcccggcatgatgagagccttcgtattcgatgcataccttgaattcagggtatgcaagatcgagatatatgggtctggtgttgtttcctacgaatattggataattcacctgcgggcaatccagaccgtatttcaagagaaccaaacgagttcgtgtttccatggaggaatctgtgcccgcgcgcgccaaaagcagggcgcgacggcatttgttatacccgcggaacaaatacgaattggtgccattctctttgtcggctcgcacctgggcctcggccgcatcgagatacagagaaagggcgtcgatggttgttctgcagagccttcgatctcgtcgcatcatggaatcagcgagaacgatgagttcttcaagttcgagatacgcggagaacatggcccatgtgcaagctggtgaagtgcatgtgaattgtccctcgattatgaccgtgtctagtgggaaaggccatacaaccactttgacccccacaatgtgccgtttgtcattggcatgtggaaccgcaacaatggttgtagttgcaaggcctctgtgtttgcttgatatgcggggtacttcaattgacaaaagctccaatgctgttgtcagggcatagggtgggcgccatgcgcttcgtcgttgaacatctgcgcacgtctgcattcgttgatacttctgcattgtcagctcggtcaatgccgttgagctacccatgatgatcaccccttcgtgatgttcgctttgtcctcgcagtgtagagtccggctaccggccttgtctaccgccccaatttttcggtggataaatgtggataagtcggtggataaactatgggtgttcatcgcagttgcaggccatcccgcaattacatggaacgtaggggtttgcaggcagccagcgggaatcgccgccgacggcgcgattcagcttgaacgaatctccatggcgttcatgcaaaggtggcatgatggcgggtatgagtagcttggtgcgtattgtcaatgccggtgttccggggtctcaggatcgcgtggatgtggtgcttcgcgatggggttgttgcgtctgtcggccctgctggaacggtctcggcttcggacggcacgatgcagactaaggcgcatacgacatcgttggcatacgcgacgaatgccattgcttctggcagcgtctcaatcccaacgtcggccgccgcacccaccgacgaaaccaccatcgacgccgacggcctgtgggttattcccggcctgtgggactgccatacgcacttcacgcaatgggctaagacgctgggccgactggacctcatcaatgcccgttccgccgccgaagcgatggacatgttgcgccgtcatctggatgagcgccgcgccgccggcacgcttgacccagatgccttcgtggtgggcatgcgattccgtcactcgctgtgggccgacgacgagcagcccacactggccgcaattgacgccgtgaccggcgaacagccggtggccctctccagcgcggacatgcactgcggatgggtgaactccgccgcggcccgcaggcttggcgtacatgtggacggatccggtctggtcggcgaactcgaatggttcaacgcctacaccgccttcgacaaggtgccgggcgctgctgaagagactgaccgtctgctgcgcgaggccgaacaggacgccgcaagcaagggcgtggtgggcatccgcgattatgaaatggccgaaaacatcgatacatggaccaatcgtttcgcggccggcattaacggtttgcgcgtggacgccggtgtataccccgagcggttgcaagccgccattgacgcgggttggcataccggcaacccactgccgggcagcgccgggctcggccatgtgggcgccatgaagctcatctcggacggatcgctcaacacccgctccgcctactgctccacgccgtattcgggcatcgagccgccgacgtatggcacgctgagctacacgccgcagcaaatcgaagactatatgcgcctagccaccgagcatggcttcgacatcgcctgccacgctattggcgacgaagcgaacaccattgcgctcaacgcagtcgccgccacgcacgcacatggatcgatcgagcacgcacagatgctcaaacccgtcgatatcccgcgtttcgccgagctggggctcacggccagcatccagccgcagcacgccatggatgaccgcgacgtcatcacccgtttctgggccaacccggccggtatcccttatccgttcagggccctccacgacgccggtaccacgctgcgcatgggctcggatgcgcccgtggccccgctggacccgtggctggccatttccgccgccgtgttcggctccgaaagctctgaccgcgagccgttccagcccgagcagtgcctcgatgtgcgcacctcgctggcagcctcgaccgccactggccgtgaccgccttgcatccggcgacccggccgatatggtgttgttggacgccgacccatacgccgccgatactccggaagccatgcgcgctatgccgcaacacgtcgtaatgacattgctgtgcggggagcgtacgtattgatgcaagccatcggcatgaagtgaccagaggtccgtcttgatagccgcgttgcacggaaaacatgttgtgttgtttgaattgagagttactaacgcttgattctccgtttcaaggggcggatttgagcctttccggaggtctatctccgtttcaaggggctggtcatgcgctcaatctcagataaaatcccattcacgccaacgtcattccgccgtttttgtgcctcgcctacttgagcaacagcccctcgaagcggagatagacctccggaaaacaagaaatccgcccctcgaagtgaagataggacacagcagacgccgcaatacaaaaaacgccgtgtcagttgcccagttggggctgacacggcgtcttgctacgagcggcgggaaaatcagtacttcatgcccatggcctcgcgcacctggtcgagggtctcctcggcgatggcgttggcgcgcttgttgccgtcgtgcaggatgtcacgaatggagtccatgtccttggccagctcggcgcggcgctcgcggtgcggggccaggaactcgttgactgattcgatgacgtatgccttgagtgcgccggcgccggaatcaccgatctcctcggcgatgtccttcgggtcgcggccggtcaccaggccggcggtggtcagcagggcggagacctgcgggcgggcaaccgggtcgaaggtgatgcggcgctcggaatcggtcgggctcttcttgatgagcttggcggtttcctcggcggtggcgcccagcatgatggagttgccgtacgacttgctcatcttgcggccgtcgagacctggaatctccggtgcctcagacagaatggcggccggctccgggaacaccgggttcttcttggcgtaacgctcgttgaaacggcgggcgatggtgcgcgtgatttccacgtgcggcaggttgtccttgccgatcggcacgacattggccttgcagaagaggatgtcgcacgcctgatgcaccgggtaggtgagcagcagaccggtcagcgcgtggccggacgcctccatctcggacttcacggtcgggttgcggtgcagctcagcctcggtgaccagggacaggaacggcagcagcagctggttctcggccggcacggcggagtgggtgaacatcatggtcttgttcggatcgatgccggcggccatgtagtcgagcaccaggttcagcacgttgtcttggatgtgctcggtggtgtcgcggtcggtgatcacctggtagtcggcgatgatgatgttcgtgttgacgccgcgctcctgcatggcgacacgctcacggatcgagccgaagtagtggccgaggtgcagccggccggtcgggcggtcgccggtcaacatggtgaaggacgacggcttggcctccagcttggcgagcgtttcgtccgaacgctttttggccgcgaggaagctcgcgcttatctcattgcctgccgctgtcagttgctgctcgtcggtcatgcgaaaatcctttaaatagggctcagataaacgctttttatggtaaaagtgtgagccgacaacgaacaagccactattagtggtactctctattgttgatgaatcgaacagcacagtaatcgcagggggtcagatgggccgcggacgtcaaaaagcaaaacagcagaaaattgcccgaaagctcaagtacctgaccaccgataccgattacgatgagctggcaaaagagctgagcgagcaggagccgggaacgggctctcctgacccgttcgccgatattgatgatcagtatgcggacaaggatgtggattctgctgctgacgccgacgccgccaaggtctcgcccgccgcgcaggaggacgacctcgacgagtacgccaagtgggcagccgaagccgccgcaaaggcgaccagcggcgagttcccggcctccgcgccggccgcgcccaagccgaagccggccccacgcaagccgattccgatgcccatgccctcagcgctgaagccgaagaagagctaagcgcacgtaggcatatgccggatatcagcgggcaggatgggccaaggcccaccatgctcatcatggacaacgaccgcatggccctgatggcattacagtcgattttgtcgaaggccctgccagacttcgaattgtttccgccggtgagcgaaggcagcaaagccattcagctgtgcacggccaccaaacacccgcctgctgtgctattggccgatatcgcgatgaacgacatcaatggtccggatgtggtgcgtgcaatccgcagggaaaacgcgaccacggcgatactggccattaccgcctcgattgtgggccgacatgcccaggagatggcccgggccggcgcacagggcatcatgagcaagaacgatgatgtgcgattgcaggccgtggctatccgccaggtgcagaccgtcaaaatatggggcgatggtggcgacgtgcggttcgagaccgcggccgttgcgtccgcgcgcatcaaggccgagaaggacaaccgtctgagcgcgcgtgagatggaggttgcggaactgtggtcccgcggccggactatgccgcagatcgccgccgaactgtccatcaccgaaaccaccgtgcgcacgcatctgatgcgtgcggccgacaagctcggcgccggcaatctcaaggaacttatcggcgcatggattcgcatgaacctgcactgatgaaggcgccgatgggtgtgtggggacacggtagaagaagcgcaaggcgcataaggggagcgggccggtgaaacgtccgattatcatttcgcggcattcgtcgtattcgtatggtcacgccgacggcaagaagcatcatcagattgatatcgatatagaactcaatcatccgctggcgatgttcggcccgatcggtgtgcttgcggtggcggccatcgtctatgcggtgaccgggtcgtggctggtcacggcgtcggcggcgctgacggcaagcgtgctgctggtattactgggcattgcgttgcgctggcgcaagcgcgtggtgaatcaggagaacgaaaacgagcagatggaatcggcgctggccgatctgcgccacggcaaccagctcgcgatcgaactgcacgacacgctgtccaacgatctgacgtatatctcgaccatcgcccggaataatctggccgcgccagccggcatcgatggtggcgactggcagcgcgtgctggatcgcagccaacgtgcctttgcggaagtgcatggcatcatcgattttctgaccgagcagagcggaatggacgccggcttccgggacgagtccttgccggtcggtggcaccgggacatctgaggtggcgactgcagaatcagggcaggttgattcgccgacgaaagaatccgccctggctcgtgacccggtaggtgccgggagctgtccagcgattgcgaatgaggtggttgacaatgccgtgcccgagaacgccggtggcgatgaccgtacgcaatccacagcgggcatgccgcaatccttcgtcacgcgtgtgaaggcgcagatcaccgataccgaggagtttctggaggcgcagggctatcgggggacggccgcggtcaacggcatcgccatggtcgtggaccccgaggcggcggccgaggcgctgtcgctgatgacggagatcggcatgaatatccgtcgccatgcaccggcgggagatgattcctatctgctgttcgtcactctgtctcccgaatggattgagattcgcgagaccaacgatatccgtgacgatgccgacgcgcagagtggcctgtccgcgcaggagcggtcggggcgtgggctggccatgcatcgcacccgtgtgcaggagttgggcggtgaattgaccacccgttcggatgatggcacgtggatgatttacgtgcgtatcccgtgcgtgcggggctgatggggcagaagctgcgatgtccggcgtccggcgctgattgtgccctgtcctcacaaatgaggacgacgaccgcagccatgtccccataaccgaggattgcgggtgttcggctcggcggcggctccctatggtggcgtccataaggaccaatcccagggagggcaacgatggcaagtgatacggatttatggcggggaactgattacggatggtggctggctgcggacacgtccggcgcggtcggtgccagcctgatcgcgttcgcggtgccgctgatcatgctcgccacgacaggatcctctgccgccgccaccacgacggaaagcatctgcgtggtggtgcagacggtgctgggccttgccggcggcgtgattcaggaccggtatgatcgccgtacgctcatgctgatctggggtgcgtccggtgtggtgctctcggcggtggcggcggcagcggtgatgctgttcggcaatgcgccgaagacgagcggccatggggttaacggggcaaacgctccggcattcggcggaccgtatgcccacgtgcttccgatcgcgctgctgtgtatcgtcgtgctgttttcggtgcgcgatggcctgttggagaatacatcgaatgccatgctgcgtggcgtggtgccggatgagcagctgcctcacgcgatggcgttgaacgacgccagggattcgacggtcacgctggcaggcgggccgttgggcggtctgctgatgaccgtgggacatgcggtgccgttcctgaccagcgcggtgctgagcgtgctgggcatggtgtccgcatggcgtatccgccgctattggaaacgtgcgactgtgagcgatagcggccgtccgggcaatgttgataccggttcggaggtcggggccgtctcggacgccgatgatgccgatgactccgccccacgctggcgcgacgcactggacggcatgatctggctgctgcgcgaccggttccaacgccatctcatcatcgcagcggccatggtgaccggtgccagcaatgccttcctactgctgaccgcgctggacatctcccaaggtggcagccagctgatatccgccggattcatcaacgccgcctccgccgttggcatgttgctgggcgcactgatggcctcgcaactggtcaaccgcgtgcccggcggcgtactggtgggcgtgatgttcgtcttgctggctgtaggattcacctgtgccgcgttggtgccctccatggttggcaaggccatatttgtggcctgctcggtactggcattgcccgcgggcaacgcggtgcttggaggcctcagcaataccttggtgggcaaggacaagctcggccgcgttggagcgggcagcatggtgttgcagtacggtgcctatggcgtggccgtggcactcgccggctggggtatgcagaccatcggctacggtccgacctgcctgattctggccaccgtactggtagctgccgccgcttacgcgctgacgatgcgcagcctcatcaccctacccacgccggaccgctgggccgagcacatccagcgttggagcatcgcacagttctgataaagggcatccgataccgggcatccgacgatttacagcggcagcaggtcgctcagatcgtcgcgctctccgaccgcgctgatgtggccggcgtccttttcctctgcccacgtggtgatgccgcaggccagccgtagccagacctcgggctccagttcgatgacgtccggtggagtgaggttgtgcgggtccgattccgggccgtccaggatcttgaccgcaccccacggcgcaacgcgcacctccacgccggggccgggcgcacgccgttccagcaggaacagcgagtagcgcacagccatcgcccataccgggcgcggcagaatgggggaggcggtcaggcgatgtggtgtgttgtcggccagttccagggctgcggcacgccattgcaccagtgcgtcgtgccctcgtttcaagtctttttcgagaattactgccatatgctccatcatggcaccggcacgcgaaaccgcaaggtatgcaaacgatggcatactgtaggatgcggaaccgtgagatatgtgatacgctctcaatgagaacgtatgcaagaacgctccgccatcgtcgttacggagagttcatgcttacgtctatgcgacgatacctatcgcgcggcataataaacacgggcacttatcccggaaggaaagtcagaatgaccgaaatcaccgcaccgaagtctcctgtcacggcggaacaattcgccgacgagattcgtgaacaactgaaatacactcaaaacgtcaccgccgagcaggccacccctgctgacgtgtatgtcgccgcatccaaggccgtgcgcaaccaccttgccgactcctggttcaagacccaggccgacaccgtcaacggcaacaccaaggccgtcggctacctgtccgccgagttcttgatgggtaagcagctggagaacgcactgctgaacgctggcctgaccgaccagttcgacaaggctgtggaagcccttggcttcaagccgaaggacatcgtggacgccgaatacgagccgggcctcggcaacggtggcctcggccgtctggccgcctgcttcatcgactccctcgcctccctcggcgtgccggccttcggctacggcatccagtacaagtacggcatcttcaagcagaagttcgacgagaacggcaagcaggttgagaccccggactactggctggccaacgaagagccgtggggccacaccgactacaaccgtgatcagaaggtctccttcggtggcaaggtcgtcgaaaacgccgacggcaccaagacctgggaaccggcctggtccgtgcgcgccgtgccggtggactacatggttcccggctacaagtcccagcgtgtgaacactctgcgcctgtggaccgccaagagctacgacgagttcgatctgctcgccttcaaccgttccgagtacatggacgccgtggccccgcaggtcaaggccgagaacatctccaagattctctacccggaagactccaccaaggtcggtaaggaactgcgcctcgagcagcagtacttcttcgtctccgcatccctgcacgacgccatccgcgtcttctacccgggccaggacaaaccggacctgacgaccttcccgaacaagatcgtcttccagctcaacgacacccatccggtgatcggcatccccgagctcatgcgcatcctcatcgatgagtacggctacgactgggataccgcgtggtccatcaccaccaagaccttcaactacacctgccacaccctgctgccggaggcccttgaggtctggccggccagcctgatcggcgagctgctgccccgtcacctcgagatcatcgagaagatcaacgagcagttcgaggccgagctcaaggccaagggcgttgccgccgacaccatcaaggacatggccatctacaccggcgacgccgtgcgcatggcctacctggccacctacggcggctcccacgtcaacggcgttgccgagctgcactcccagctgctcaaggacgtcaccctcaagaacttctccgacgtctacccggacaagttcaccaacgtgaccaacggcgtgaccccgcgtcgcttcgtcaagctcgccaacccgcgcctgtccgacctcatcaccgagggcctgggcaccgacaagtgggtcgccgatctggaactgctcaagggcctcgagccgctggccaaggacgatgagttcgtcaagaagttcgccgccgtcaagaaggccaacaagcacgcattcgtgggcttcgccaaggaccactacggcatcgatatcgacgagaacaccctgttcaacaccatggtcaagcgtctgcacgagtacaagcgccagtctctgaagattctcgccgtaatctccacctacgccgacatcaagtccggtaaggtcaaggccgaggacatcactccgcgcaccgtgttcttcggtgccaaggccgctccgggctactacctggccaagatgaccatcgagctgatcaacaacgtttcccgcgtgatcagcagcgatccggccgtcaagggcaagctcgccgtccacatgctgccgaactacaacgtcgagatggctcagaacctcatcccggccaccgagcttgacgagcagatctcccaggccggcaaggaagcttccggtaccggcaacatgaagttcgctctgaacggcgccctgaccgtgggtacgctggacggcgcgaacgtcgagattcgtgagcgcgtcggcgccgagaacttcttcctgttcggcatgaccgtcgacgaggtcgagaagaagtacgccgagggctacaatcccgcctcctactacgaggccgatccgcgcctgaagcaggccatcgatctggtggccgacggcaccttctccaacggcgaccgcaacgcctactccccgctcgtggccgactggctgaccaaggactggttcatgaccctggccgacttctccgcctacatggacatccagtccgagatcgaagccctctacgccgacgagctcgaatggaaccgcaaggccctgctcaacgtggccaactccggctacttcagctccgaccgctccatggaagactatttggaacgtatctggcacactgctcctctggcctgacggccgccggagcagcgcgccggctacgtgctggtttctacctcgcggctgtcgccgctcggcgtcgcctacgggaagccctccgggcttcccgcttaacggctccgcacatctggcacactgctcctctggctgactgagtcggtggggcggctcccctcggagaggggaaccagaacataagaagccccgcaaccgacatccatcggttgcggggcttcttgcgttgaaagaccgccctatcaggcttcggccggggcggcttccgcctcgccatcggcctcatcctcggccttgttcagacccaggtcgaccggcgaggagctgttctcccacggctcctcccacggatcgtaatctgggttctgctgcttgtagatgtacaagccaacaagcgcggcgagcaatccgccgaacagcagcgcgaagaacttccaaccgttagaagacttgttctccatgacggctcctttccctagggatcgtctggtcggtatgcccattcagaccgactctgctccctattctaggccgctgtttgtgacgattgggtggaatgacattcgtgggcgattcatccacgcccgcatgccctcggtcggctcagcatcttcgcggcgcgtggaacgcatccgagaccttcgatacagtggactgcatgcatattcctacacagcgggagattcgataccagtgggagcgcggtggtccggtgatgacctgggcgctgattggtgcgtgcgtggcagtgtggctactggaggtattgctgggatttattgccccgggcctgagggcttggttgatgtacctcggcatggcggctccggtcagactggtggctgagccgtggacgctcatcacctcgatgttcctgcatgcgccgaactcgctattgcatatcctgttcaacatgatcgccctgtattccgtgggcccagtgctggaacgaatgatcggccactggcggttcttgggactgtatgtgatttccggccttggcggctctctgggacttatggtgtgggctgcggtggctccgggaggcatcggctggcagatggcagcctatggggcttctggagccttatttggcctgtttgcatcattgctggtggtatatcgccgtatcggcgccgatatccgctccatgttgatctggatggcggtgaacttcgccttgccgttcgtggtcgggggcgtggcgtggcaggcgcatgtcggcggctttgtagtgggtggaatactcacatggctgctggtgggtggtgtgccggcgtggcgaggtaaaagcctgaaatggcgtatgcaggtttacggctgggccatggtggtgctggtcgttgtgttgattctgttgtgcaatatggccaatccttacgggtggatgagtttcggctccctgcactgatatggcttgatatggctgtaaaaaacgattgatgccgggtattgcggaacatgcagtgcccggcatcagtgtatgtacggaaagcggcgatgtggatattagcgatgtggatatcgtcattcggtgagtgggcatgcgctgtatgaaggtatccacagtaatgaaggtatccacagtaatgaaggtatccacagtaatgagatgcgcgcaatgacgagttatccacgataatgagttatccacaatggtgacttgtgcacaagtgtgtagaaaagtgcataagactgtggataacttatgtggataagttaggaatgccgcggtattactgggtttgttgcagtggataac

SEQ ID NO: 1960 - DNA, 6068 bp, Unknown
  R17_18m  MAG No. k141_12988
acggctgaagctcttcggaaaaccgggtgcatcgagaggaattgtcgagacacgccgatttgaaggacaagcaaagcaggtgtactctctactcctgttgcaagaagccctacggctgcaagccagaaccgtatatcggacggtcactggttcaagcccagtcgcaggagctcacctgaacgggtaactccggacgggatgaaaattgaatattcctgcgtagctcagttggcagagcatccgactgttaatcggacggtcactggttcaagcccagtcgcaggagccatcgaaagcctcggttctccgaggcttttttattttcattgcattggtgaccagacacgacaccccatcatcaaccgggaaatccatggcgaagacctcaccactactcacatcaggcagacaggtcactgtcaattcaccgatgagaggcacagtactcccagtatcagtttgggaataccgtgcaaatcttacatcgagaccttggtcaggggcatggcggagtcgatcgggaagtcgggggcgctgggggccacgccggcttcgaccaggttcacgccgagcatggcgaccatggcaccgttgtcggtgcagagcttgatttgcgggatacggacgtcgacgccgtagttctcgccgaattcgagcagtttggcgcgcagctgcgagttggcggagaagccgccgcccacgatcagcgtgttggaatcgtactgccggcagccgcgcatggccttacgggctagcacggtggccacggagtcggccagggatgcgcacacgtcgtccaccggaatctcatggccggcggcctgctcgctttccacccaacgggccacggcggtcttgacaccggagaaactgaaatcatacgggtgcgcggcaccggccttgccttgggtcagacccatcggcaccttgatggcgtgcgggtcgccgttctgtccgtggcggtcgatgtgcgggccgcccggatacgggaagccgagcagacgggcgactttgtcgaagcactcccccgccgcgtcatccagcgtggtgcccaccacatcgatcttgcgcggcatgtcctccacatgcagcagcgaggtgtggccaccggagacaatcagagccagcgtgtccttggggaacgggccgaactgcagctgagtgacggcgatgtgcccgatcacatggttgatgccgtaaatcggcttgttcgcagcccaggccagcgccttggcgccggacacgcccacggccaggcaaccggccagtccaggaccggcggacacggcgatggcgtccacatccgccaacgtcatgttcgcgtcggcgagcgccttggacacgcatggcacgaaggcctcagcgtgcgcacgggaggcgatttcggggatcacgccgccgtatcgcgcgtgttcctccatggatgaggccacgacgttggagagcagttcgcggccgcgtacgatggcagccgcggtttcgtcgcaggtggattcaatgcccagtacaaccggttcgctcatcgtgcttctccgttcttctccgtttgcttgccagtgatgtcttcagtgtccgccgatgccgtctgcggggcggcaaagcccacgaccctaggtttcaggtccaagctcatggtgtatgcgtcgatgccttcaggctggtagtagcgtttgcgcaatcccatgcgttcgaatccgaaccggtgatacagggccagcgcagggtcgttatccacacgcacttcgagcagcatgcgcgaggcgccctgacgcttcgcctcgtcgaccagtgcctgaagcaacgcagcggcgatgccttgccgctggtatgccttgcccacgccgatggtcatgagctcggcgtcctcgccgtcataccagaagccggcgtagccgcggacaaccgcctgttccacctctcccagcacatccagcagatacgtgcgggccggtgcgtccagttcctctcgcaccatgttcgcattccatgcgccgaggccgaacagttcgccttccaactgtgcgatggagcaaaccgcaagatcacgacttacggcagtgatgtcaacaatcatcgaatcaacccgtctcacgccttatcggcaccggcatggccgagcacgtgcttcagcgggttcggcacttcggcgtccggccggcgcaggtacaacggttcgaccggcgtatcgtgattacggttggcaaccagttccgcatcagtggcaaagatagcgagaccttgctccccttggtccaatacggattcatcggtgatgtcgccaagctgctcgattgcacccagcgcatccgcatatttgcgggccccatgacccacaacatccacgaccacatccacattgctgtcttctggcctaagtccgtcgcggtacgtatgaacggcatcattcacgcgctgcgcgatggatgcagggtaatcgatatccatgtcaatcagagccgtcgccacggtttcgccatcgggatcgccaacgagcgggtccgagtacaacgcaaaatagagttgtttgcggcgtgcgtcgtttacggcaagagtgagcacatggcatttatgagtatcgccgagagtgccggctttgccacggcgaatgagattccattgcacctgagactcaagaacattatggccgataagcgtcgctcccgttgcgaaagccagtgccttggccgtaacgataccggcacgcagaccagtaaagggggctggaccggtacccacaatgactgttgcaatgtcagatgctgggaacccggcctcctcgaccgcgcgcgcgatattgacctgcagtttctccacatgggtgcgcgaatcggtctctacaatgggatcgcgccccacaatgccgaccgtcgagccgaatgaggtgtcaatcaccaacgtgcaacccatgaatcctcctagtcgtaaagcctctagagagtgtacatcgaggagtctataggcgcatggcttactgcagatcgaacgcggcccatcgcttgccgactgggacgaatgcgacggtacgagtgccgttgctggtgagttcgccgtctgatccagcggatgcggcatcggaggaatcgagaggtcgatcgatatggatttcaagtcgttctggcgccaaggcggtggccatttgttcgccccactccataagcaccaccgtgttctcgccggggtcttcaagttcttcgtccaatcccagcgattccagctcgtccaacaaacgcccgatggcgtcctgccccggcgcataggctgagccgcccagacggtaggcatccacatgcaccagatgagacggagtgccgtcggcgaaatgcccgtcgagttcgcgggcaatggtgaatgtaggagacacgatgggttcggtaatgcccagccccgccccgaagccctgggcgaatgtggttttgccggcaccaagagggcctgagagcagcaatacatcgccgccgtgtaccattccggccacacgacggccgagctcctgcatggcctcgctggtgggagccgcaatagtgtgttcgctcataaatacccctttatcgacttttaccgacctttatgactgatgtcttcaatgcagcgttccagcgcatataccgggtcgccaccgtttgttttgctttgctcatccgcccaggcgagcatacggatgcaatgcgcgagtcctgccgaagtccagccgccaagttggcgcatcgcattcttcagcacccacggattggttttcgcttcggcctgggaaatcgtgccggcccgtaccgccgaggctttggcaatggtacggagcttcatggccaacgcgccgatcagcgcgatgggatcggtcccttgttccacagctgcacgcatcatgacgatggcttctgcggttttgccttccacggccttgtctgccacggcaaaaccggtgacctgcggattggcggtcaaatactggttgacacggtcgaggcccatcggattatcgtcaaagtcgaaacacagttgctcgcacatggcggcgagttcgccggttttgccgccgagtacggataccagctgctgtgcggccatcggttcgactctacgaccacgtttctcgaattctccgagcacgaaattgagctgtgcatccggtttcttcaaatccggcacgtcctctttgcgagcgccggctttcaccagttggtcgatgattttgcgccctttgacgccgccctcgtgctggcagatcaccacgctggagccgttcggatccttggcggcctgcttggtgtacgccaccagagcttcggcgagcttgtcgtcggcattctgcaggttgacgagtttgaccacggcaacgtcggaaagcaacgatgggctgacggcttcatcgaaggcatactggtcggccgatgcggcgtcgagttcgatgaggtcggcgtcgggccgcgccttcaacgcctgcgcgcacagtgccttggtgcgtgcgtcgttcaaatacgagtcgcctccgggcaccacggttaccggtgcattcgctgctgttttcgtcatgcccccatctcgccacacaggttggacaatgacctgccggcatcacgattttgccggtgccgtcaagatagtggtattcggctgggattgcgatggttgctgcaccgaataccgcattggctattcggcttgccgccgcgtaaagaggcgtctcgtctcctcaccccagagactgaggcggacgcgccaagcggaaccgaagcgcacgccagacattccggcctcataacgacggacatgctggaggcaacggctgacgaacaccagtagcatgccgataccgatttccgccgccacaatcagcacggcgcccgtaacgccgtctttccatgggatgacggccatcgtgctgccgcccagccacaacgccacccgttccatcaccagcgtgccccatgacgatatccacgcgaatacgccggccagccatggcgtgcaccatgcgcacgtcagtgccatcaatcccgccatcgtggccaatcccacgaacggtgacaccagcaggttcgccggcacggacagcaacggcaattccggttccatcaacacctgaatcggcagggtgaacaattgcgcggccacggtcatcgccatcatctcggcgatgctgtgcggcatcgctcgctcaaagacaccggccagccgccccgcaaacagcacgatacccagtacggcggccgaagacaaggcgaatccgtagctggccgacatatccgggttcaccaccaatacaccgattatcgtccagcacagggcgctcaacgcttgcgtacgccgtcccatcgcatacgccaacgcacctatcaatcccatgatgaacgcgcgggtgaccgaatcactggggaacatcgccaatgccagcagcgcatatactccagagaccagcaacgccgtcagccgccgatcaagcagcatccacatgcataaccgacgcatcagtcctgccaccagtacgaagtggccgccggatacggccatgaggtgcatgatgccggaccggcggaactgattttccaacgtttgcgcatacgtgctgttgaccggcatcggaccggcatcgccgccgatataatcctggccaagcacacccatcgtcaatcccggcaccaacacacgcccctgatcggacaattgtccggtcacggtgaaaaacgcctcctgcatatgtgcgatcgcggcgagatgccacggcggagcccgcacctgcgctaccggctgttttccttccaagagcagccatagcggtatgcgtccatatcgcgcttgctgcaatacgcccgtcaacagatagaccgcgcctcgacgcaactgcccacaatacgattcatcggcgtatacgcgcacggcgaccgtggaacgtacgtccgcgccatccacagtgatgccgctcagccgtatgtccgtctgacaatcgtatgtgcgttggtccgaagcgatcacgggcgtcgtcaccgtggccatgacttcgtggtatgaactggattggcgagcttgtgcggaggcaggatcatgccaggcaatggtgtccgacgcgattgccg

SEQ ID NO: 1961 - DNA, 4239 bp, Unknown
  R17_18m  MAG No. k141_14072
ccatggcccaggagagacgcccggtcccattccgaacccggaagctaaggcctggcacggcgatggtactgcacccgacagggtgtgggagagtagcacgccgccgcaccacacgtacaggaagcccctcggagcacacgctccaaggggctttccctatatccgaaaccaacaagacataggctctcgcacctagggtgtggccgaatcgaaagcatatagaagagggaaccctccaatgacggagagttccctctttgcgtatctggaccgataaaggtctagaaattgaaattgtcaggatcagcaccgttgcgcttgccggtgttgatggcggagatggcggtcatatcatcgactgataggttgaagtcgaagacctcgaagttctgcttgatacgctcggcatgagtggatttcggcagcacgacgataccgcgctggatgtgccagcgaatcaccacttgggcaggtgacttgccgtacttggcactgatctcggccaatactgggttgctcagcaggttgccgccggtaccgccgagcggactccaagcctcggttgcgatgcccttggcacgcagctggccaatgagctcttgattggtgaattgtggggaagactcaatctggtctacggcaggtaccatatcgctgtgggtcagcagctcatcaatatgatgcttttggaagttactgacgccaatggccttggcacggccagaggcataaatctcctgcaagtcatcccaggcctgctgccagccgtctgccggccagtgaatcagatacagatccacataatccacgcccaagcggtcgaggctttcttggaatgcatccttgccgtggcgtgcgcgaacatcgtcattccacagcttggtggtcaagaagaaatcgctgcgcggcacaccagcacggcgaataccttcacctactgaggcttcgttgcggtaaatcattgcggtatcgatatggcggtagccattctccagagccgtctgcaccgcgttcactgtagtatcaccatccggtgtctggaatacgcccaagcccacctgcgggatgacagtgccgttgttcagcataattgtcgattgaattgccataatgcctcactattcgtagtgttcattcaatttcctattttagaaacaagacgatgcaatgagccgcgtttcgcgggcaaagaattgcgtaatgatggcgtgattctcgttcattaggtcattattgcattcattaggtcaatgggcccagggtcttcggcatcagaacccagtcattacgccattcctgaagagccgtcttacggcataccgacctaatgaacgtgaaatcgacctaatgaatgcaacgagtaagcggctacgataataaccagtagaatcacaacccagattgaaggggagagcacgtggcagaggaatatgtggctgcattcgatgcagggaccacggcgttgaagggtgccttggttgataggcaaggccgtatcgtagccagtgcgagtagtgagcttaaccttattatcaacggcgactatcgggaacagagccccgatcaatggtggcaagctttctgcgcggcctccaggcacatgattgagcagacgcggcaatccgagtcagaattcaatgtgactcgcattcgtggcatcattttcagcggtcagatgcaggatgttattgctttgaacggcgagctcaatcccgtccgcaatgccattctgtattcggatggccgagccgaggaacaggccaagcaactcgccaagacatatcagggtggagtagaacgtttcctgaacaccgttggcaaccggctcgaaggctgcttgccgttgcccaagttgatgtggctgcgtgaacacgagccggaaacgtacgcgcgcattcgtcatgtattgatcagttccaaggactacttgatcgcccaattgaccggcgaatgcgtgggcgatgtggcggcttgttccacagccggtgccatgaatatccgtaatggccaatgggatgccgaattgtgcgaggccgcaggaatcgacatggccatgttgccacacctgcacaatccgcaagacaacattggcacagtgacggaatccgctgcacaacgcaccggtttctccgccggaactgcggtatacgcgggcattggcgatgcgggtgccaccacgctggccagcggtgtcagccgccctggtcaatacaacatcaatatcggcacctcaggttggatcgccaccgtttcgcccgaaccgttcaccgacaagccaggtgctgcgaatctggcatctggtgtggaagaagtcttcgtgaatgccgtgccattcctcaacgccggtgacgtgcataaatgggttaccggcgtattcgctgatggcgattacgcggaagcacatcagcttatcgaaacatccaaacccggctccaacggtgtgatgtgcctgccatatctggtgggggagcggttccccgtaatgaacccgaatattcgcggggcctatgtaggcctcgatccagacaccaccaaggcagacatgatgcgtgccgcgcttgagggcgtggccttctccattcgtcaaggtatggaaagttttgacgccaaacccagcgagatttccctgattggcggcggagccagagaaaatgcgtggtgccagattctggccgatgtgttggagcatcccatcgaagtgttcgccaatgccgatattctgccagcagtggcaatggcctcgttggtattcaatgtaccagacctgctgcaatcagtatgcgaatgcactgtataccagccgaatcctgacaccgcacgcacatatgccgacgcataccggcgattcctgagcctctacccgatgctgcgaacgatggattaggaactgagcatcatgaggcaatcagcgaatttggtccgcaaacatatagcggtcaccggactggtgcaaggcgtgggattccgttattttacggtgactcaggcacgtcgacttggtgtacagggctgggtgcgcaattgccgcgatggctcggttgagctggaagcacaaggcagtagcgacgcagtgcaagccttggttgagcaattagccattggtccgcgatggtccgaagtgagtcacgtcgccgtacatgacatgccgattatcgatgagaccgctcgggcatttggcgtgcgtcaataacctgcatcacgaatccacatcacgcacgataatctcacgatacgggtgaacatgggcgttcctcgccgcttaggccccgcacgttggtacgatggggcgttatgagtgagaacatcatgcgaatcattgacctgcgtggtcagaacctgtcccgtgccgaactgctcgccgcgatgccgcgtgctgcaatgggcacttccgaagccaccgatctggtgcgtccgattctggacgatgtcaaggaacgcggtgccgcggccctgcgcgacttcgaggagaagttcgaccacgttcgtccgaagaacctgcgcgtgccggccgaagcgatccagaatgccctgaccacgctcgaccccgaagtgcgcgccgccatcgaggaatccgtgcgccgcgcccgcgccgtggcggccaaccaggtgccgaaggacttctacaccgatctggccgaaggcgctcgcgtcgccgaacgttggattccgatccagcgcgtcggcctgtatgtgcccggaggcaaggccgtctacccatcttccgtgattatgaacgccgtgccggctcaggccgcgggcgtcgaatccctggccatcgccaccccgcctgcgcgcgatgatgcggagggtctgccgaacaagaccattctcgccacctgcgccatcctcggcgtcgacgaggtgtacgcggtcggcggcgctcaggccatcgccatgttcgcctacggcgccaagggcagcgagccgcaggacggcgacatcctgtgcgatccggttgacaagatcaccggcccgggcaacatcttcgtggccaccgccaagtcactggtctccgcattcgtgggcatcgacgcggtcgccggccccactgaaatcggcatcatcgccgatgaaaccgccaacccgagcctgttggccgccgacctcatcggccaggccgagcatgatgagctcgccggttccgtgctgttcaccgactccaccggcatcgcggacaaggtacaggagaacctcaactatcgcgtgccgaagaccgagcacgccgaacgcgtccacaca

SEQ ID NO: 1962 - DNA, 5334 bp, Unknown
  R17_18m  MAG No. k141_14713
ccctcaaaaaacctcacccctcatcaaaccctcccgggtacccgaccaccacgacaggcaatcaggcgaggaatgaactggcaatcattgactataaagaagtagtacaaacacgctcttgagttctcaaaccaccaccacaccagcaagacaggaaaccaaccagaagaaggaacccgccgcgctgagcggcaacaggtgaataacctacacgcaaccacgccgcaacgcaaatcaaagcgcacaagaacccaaggaatcggcataacagcgcggttccttcggcgtgtcgcacagagcccaatttgctctgatagggctagcgtaacccctcgaatgtttccggaaaacatcgaatccattattcggctggcgtgtcgcacgagttttcggactgtcagctccatgttcatcgttcggcaaccacaccaccggcgcacaatcaatgcatggcaacaacgctccatcatcggatttcgttcatgaatcacgggtatacctgtagttatgaccaagaagattgctgtattaaccggggcgggcatttccacgtccgctggcatccctgatttccgcggtccggacggtgtgtggaccaagcatcctgaccaaatgagcgtttacgacatcgatctgtttctgcgtaacaaagaagaccgtgagtactcctggcgctggcagaaggaatcaccagtatggaacgcacagcccggcaccgcgcataaggcgctggtcaagctggaacaagccggcatgttgacgctgctggccacgcagaacttcgatgcgctgcatgagaaggccggcaacagcgacagcgtcatcgtgaacctgcacggcaccatcggcacctcgcattgcatgaagtgccatcaggaatatgccacggcggacatcatggcccgtttggatgaagaacccgatccacattgccatcgcaaactgaagtatcgtggcgatatgccatgcaatggcattatcaaaaccgatgtggtgtatttcggtgaggcactgccggacggagcgatggagaagtcgtacagcttggccaccaaagccgacgaactatgggtaatcggatcgacccttgaggtgtacccggcagcgagcattgtgccggtggccgcgcaggcgggcgtgcccatcaccatcatgaatatgggtcacacgcaatatgaccatcttgcgagccgcttgattcatgaggatatcgccgtcgcgctgccgaagttggtggacgagacgattgcggagaacaagtagtcctcagcataacgaaagcgccggtgggtggttaagcaactgatgattgttggttaaccacccaccggcgctttcgcgccacctcccgctagcgggaggtattggagcacacttctgcgcggcctcccgccagcggtattggaatcagtagatgcgcttgggctggaatccagcttccctgagtgccacgaggatgcggtcgatgtgctcggggccgttggtctcgaccgtgacgccgagagacaccgcgttggtgtagtggccggatgccttgaactggtcgtggtcaagctgaatgacgttggcgcgctgctcggcaagcagggtggccaccttgacgagctggcccggagtatccggcagctcgacctcgaagttcatgatgcgaccgcgggcgatcatacctttctgaatcaccgcacccatggtcacggtgtcgatattgccgccggacataatcggcaccaccacgtgcgggccggtggcggcggcgaacttgcgcgaacgcaggttcaggtgttccagcgcggccagcgaaacggcgccggccgcctcgaccaccagcttgtgcttctcgagcatgagcagaatcatttcgttgatgtcgcgctcggtgacggtgaccagatcatccaggaactcgttgatcagcgcaaacggcagatcgccgggatgcttgaccgcgacgccctcggcggaggtgaccacatggtcagccggagacacacgacccgcggccagcgagtccttccatgccggggagccctccggaatcgcaccgattacgcgcacttcaggcttgaacgtcttgatggcgagcgccacgccggcacccaagccaccaccaccgagcggcacgaccacgtcagtgacgttcggcacgtcttcgaggatctccagaccgatggtgccttggccgcagatgacttcgtaatcgtcgaacggcggcacgtaaatcatgccttccttgtcggcgagctcagcagcgtgggcggcggattcgtcgaacacatcgccgtacagcaccacatcggcgccgtaggccttggtggcatcgaccttcagcggcggggtgatctgcggcatgcagatggtggccttcgcaccacgctcacgggccgcataggccacgccctgggcatggttgcctgcggatgcggtgacgatgccacgggcgatctgctcttcggtgagcgatgcgatcttgttgtacgcgccgcgaatcttgaaggaaccggtgacctgcaggttttccggcttcaggagaatctcatgaccagtcatctcgctcagcaccggcgaagggataatttccgtatgacgggcagtccctttgagacgtttggcggccagcttcagttcggctgcatgatcacgctgcagcgccttcaaaacatccttttgttccatagcttttaattgtatggcgcggggacaccgaaaacagtggcttatctcgctaacgagcgctcatttacggtaattcccgttcgtaatcagccccttgaaatggagataccgcctagcaacacttataggctgacgacgacgccctcccatggtgcaagctcacggccggcaagagcggccacagcgtgcgcggcgtcatacgtgctgatcaccacgttcgactcggcaaggccatcggccactgccaacagttcggcggattcgcgaggcaaatcaacggttcggccggacatgttgaccacgaccagcagcttctcatcgccgagggtgcgggtgaaggcgtagacatgcgcgtcatccgcatcgagcagatgccagtcgccggccgccacgacaggcatgtcgtggcgcagcgcgatgagctgcttgtagaaggcatacaccgaatccggatcgtcgaattcgccggccgcgttgatcgccgcatggttgggattgacggagatccatggctccttagcggcatccggcgcagtgaaaccggcatagacagagccgtcccattgcatcggggtacgcgaattatcacgaccgcgcgcggcgatacccgccaacatcgattcgggcgactgcactttggcttcctcaaccctttgacggtaagcgttcagggactcgaggtcacggtactggtctaggcgcgtgaagtgggcgtcggtcatgcctagctcttcgccctgatatatgtacggggtgccgcgatgcatgtgcagcatcaggccaagtgccttggccgaacgcacacgagattcctccgaggagtcatcaccccaacgagaaacgacgcgaggctggtcgtggttaccagtaaacaggcttgcccagcctgcattcttcacggccgcttgataaccggccataatgctcttgagcttcggcaggtcaagtggcagtggcttccatttgacgccttcgcagtcaaaatcaacgtgctcgaataggaagagcatgtccagctcgccgttggcggggtcggtgatgtattcgttgcgctgtgcggtaacgccgggagcctcgcccacggtgaggaagccctcacggccttcgaacacttcacggcgcatttcggccaggaattcgtcttggcgagggccgtccgcgcagaacggattcgggttggaatagccttcctcacccacgggcagatcgtccagctcggaaccgtactcgccgggcagcttgccagacaggtccgtgcgcttggaaatcagcgtaatcacatccatgcggaagccgtcaacgccgcggtcaagccaccagttcatcatgtcgtataccgcgcggcgcacagccggattttcccagttgaggtccggctgcttcttcgagaactgatgcaggtagtattcgccacgctcagggcaatactcccatgcagaaccgccaaagtaggagccccactggttgggctcggcaccgggctcgccggcagtggtgccgggacgggcgggacgccaccaataccagtcggcgtgctcatcatccttgtttttggacgcttcaaaccaggcgtgttcatcggaagtgtgattgacaacaagatccatcacgatcttgagcccgcgcttgtgggcctcggccagcagctcatccatgtcgtcgagtgtgccgaacagaggatcaatgtcctgatagtcggaaatatcgtagccattgtcgtcttgcggagacttgtataccggggatagccacagcacatccacgccgaggtcggccagatagtcgagccgtgacgtaatgcccttgagatcgccgaggccgtcgccgttggtgtcttggaaggaacgcgggtaaatctggtaaacgaccgcattggaccaccacggatttggggtggcaccgttggtgcggatggaatctggaattactgtgcgttgtgaagtggtcatcgttggctcctccattatttatggtctacattgcctgttgctcatagtctaaaaagcgctgaattacatttccattggggaactgcgttggtgtgccggaaacaaaaaccgcaaagagccggaaggcactgctacggctcaattctcataagctgcacatgctatttagcaacatatgggccctttcgctgtttgtggtgggtgactgtgccgtggggtgatgttggtcgggtaggttggaggcatggatgcctctcacctgttcaccgccgcgcttcggctgcggtcgccttggagggtcgggtccgcggacttccgtgacgccgacggcgacgggcgggagccgcacatcacgatcggcttcgagcccggcagagggttcatgctcctgttcgaggcgtgggtgtggctatatcgcctgtgctcgtggatgatgcactcgaggctcgaacctatgaaggagctcgcccgcttgttccgccgccataatctacctgacctgcggcagctcacatattaacggttcttctgattgcgacgcgcaagagcaacttcgggcgcgcttggattgcctgcttgaacccactggtgcggggatagatgatttagttgacacgcctgcgggaatctggtggggatttcgctggcacaccggatttcaagcaaaccccgcctcgggaaccgctccggacttcggcgttggcccggttcg

SEQ ID NO: 1963 - DNA, 49452 bp, Unknown
  R17_18m  MAG No. k141_14820
acggcggcggccgtggcgaccggtacgatcatgccgacgaccagcgcgacagccgtcgccaaccgcgttaaacgtgtgaccataccagaactccgcacatactgacggttcatcgcttcgcgcgaaccatcgtgagatagtgaccgcaagggatgcgcttgtttgaatgcgtgccgaagcacacgtccctaaacgcgaaaacgtaaccctttattcaacaaatgttatcacttgtatcatatgtcggcatatctttgtgccgggatatggaaccggtatacggccgcgcctccggccgcgcgcgtatacgaatacttcgcgccgctttccgcctctatcaggaacagttacctgaataaaccgggttacctgaataaaccggacagttggctccatagcgacggcttgcgcagcaaatcatcaccctcgccctcgccaggcgcggtttggttcaccgcataggtgtaggcgcgtttggaactgggcttgcccaccagttcgtcaaactccagcaattgcgtacgcggctcgtaagggtgacggatatcaaattcgatcaatcgcgtggcgcgtttagccggagccggtccgtacgtattgaatccgcaggttggcgtagcgataagcaacagaccctcatgttcgccgacgaaaccgttgcgatgatcatgaccagctacgacgccgaaatacccctcgcgcagcgcctcaaactcgtccgactcatccgggcaggaaatgccttcccccagatacccgccggcttgagtgcgatcctcgtccagcacataataggtatccgcatgcttgcggtagccctgcatggcgaaagccgcattggcggccaccggtttgagtacccggtaatactccggcagcggcatgtgctggaacaccattgatttggctccgatatgttcgggcaaagccttgaggaaggccaatgtctcgggcgaaggcgtgccgaaaccgcctccatgcgcatagtcaccggaattcaccagtaccagtcccagtacgttgcgcgtgcaatccacatccatcaccggcaatgcaaaagtgccgggaatggtggacgcggaaatcggcgcatcggtttcttcaccattggttgccgcaggcgagccgtccttatgacacatatatacggtctgcttggccagcgcatcgctcggcggattgatgcaaccgggaaactcgcggtagattccgtcgagttcggcattgctcaaaccgcactggaaatcgtggttgccgtaggtcaccgcccacggtatgccccgtgacgccaaaggagaggtaaattgaccgatggccttgcgcaccaattcacgcgtatggttcaacgcagattcaggaatcgcctcttcgcaccaacggcgtttgcggaagctcttggcaaaggccggatcgtagccggcgatctggttgccggagaaaatcaccagatcaggccgtgtggcatcaaggctggcctcaatcagggcgatggtgtctttggagactttcggcccatcctgaatgtcggcaatctgcagcacgcggaacttgccggaatagtggaattgcagtcgtccgagacgcgcagagatagagaccgggcggccgtcttcggcatcggccggcttgatacggggtttcgacgacatcccctctggcgtacgctgtgtttccgtcatgccctccactgtacacacaaacgaaaaggcccgccggagcgggccttttctacaagttcaactactggagcagaatctctgcacaacatcatcgtcgtaacggtaagtctttccaatgcccgtccaacgtaacagtcctcgtgaccatacactatttgtgggctctgctctgttcagttgttcttgtacctcataatctattcatcactcccgtttctcgcaacctgcagagagtcgttgtgcgttttttatcacaactgttcaatcgcactttctggctatcggaaaacgagctgaaccgttcacatcgaacccgtctgatgttcggtttcgttcgtttcaccgccgctcacggcgtgtcgcgagcacgctagcacactcagaaccaaccaacaccgaactaacatgaacacccgttgaattctggcgcgttcagccgttttccggccacgccagagcttacgatataaactatggcacagatatttgacgcaccctcgaaggcaattctgcgcagccaaatcgcagagcatattgccgaaaacgacaacaacgaccgccgcgtcgatcaggaaggcgaggcaccgctgcccaaggaccgtttcttcgaccgcgagctcagctggctcaagttcaaccagcgcgtgctcgaatgcgcggagaacgaagacatgcccctgctcgagcgcgccaacttcgccgcgatcttcgcctcgaaccttgacgagttcttcatggtccgcgtcgccggcctgaagcgccgtatcgactcgggcatcgccgtgccgtctgccgccggcctgagcccgcgtcagcagctgcgcgcgatcagcgagaccgcacaccgtctgcaagacgagcacgcacattacgcgatcgacaccattctgccggaattggagaaggagcgcatcgtcctgctgacgtgggacaagctcacctcctccgagcaggagcgtctctcgcgctactaccgccagcaggtgttcccggtcctgacgccgctcgccgtggatccggcccacccgttcccctacatttccggcggttccatcaacctggccgtgattgtggagaacccggcctccggcaagtcgcacttcgcccgtgtcaagatcccgggcaacctgccgcgcctggtgccggtggacgacatgaccgacgaggagtccaaggacgagcgttacggcttcatcgccatggaaaagctcatcgccgcgcatctggaatccctgttcccgggcatgatcatcaaggaagcccgctccttccgcgtgactcgtaacgaggacatcgacgtggaagaggatgacgccgagaacctgctcaacgccatggagaaggagctgctgcgccgccgcttcggaccgccgatccgtctggagatcacggacaccacgagcccgttcctctcccagctgctcgccgaccagctcggcgtaagccaggacgaggtataccgtctgcccagcccgctggacctgaccgtgctctttgagctcggcagcgtggaccgcccggacctgaagaaccgtccgttcgtgccgaccacgaaccgtcagatcgccgaggtcgagtcctcccgcgcacaggacattttcgccgccatccgcgagcgcgacatcctgctgcatcacccctatgactccttctccacttccgtgcaggccttccttgcgcaggccgccgcggacccgaaggtgctggccatcaagcagaccctgtaccgcaccagctccaactcgccgatcatcgacgccctgatcgacgccgctcatgccggcaagcaggtgctggctttggtggaaatcaaggctcgtttcgacgaggacgccaacatcgcgtgggcccgcaagctcgaacgcgccggcgtgcacgtggtgtacggcatcgtgggcttgaagacccactgcaagctcatcgaggtcgtgcgtcaggaagcggacggtctacgccgctactgccacgtaggcaccggtaactacaacccgaagaccgcgcgactgtacaccgatctgggtctgctgacctgcgacccggtggtcggccaggatctgactcgtctgttcaaccagctctccggttacgcgccgaagtccagcttccaccgtctgctggtggcccctcgcaccgtgcgcaccggtctaatccagcgcatccgccgcgaggaggacgccgcccgcgccggcaaggaggcctggatcaagatcaaggtcaactccatcgtggacgagaagaccatcgacgccttgtaccgtgcctctcaggccggcgtgaagatcgacatcgtcgaacgcggcatctgcgctctgaagcccggcgttcccggtctgtccgagaacatccgcgtgcgttcgattctcggccgcttcctggagcactcccgcatctacgccttctgcaacgcggacggcccgcagatcggcgagggtccggcttccggcccggaggtctacatcggttcggctgacctcatgcaccgtaaccttgaccgccgtgtggaggctctggtgcgtgtcaccgccccggagcagattgacgggctcatcaagtacgtggacctgcagatggccgactccaccatgagctggcacatgcagcccgacggcacatatgtgctgcacaccaaggacgacgagggccgcccgctggtcgatagtcaggaatacctgattcgcaagcaccagcgccgccccaattcgcacaactgatttcactcgatgctccctgtcagcacgagctgactgagggtggttacgatgcccggctcctctttcgagaggatgccgggcatcgtcgttcagcgcgcaaaactacgtagcagcggtccaacgtgacctacaatacaagagatgggtacgaacagtatgagacgaatcgtggaagccgccggcggtattctgtaccggtggaaggatgatgccgagccgacgcaggcatcgtctccatcagcgaaatccaatattgccaccgatggcaccatcatcgcgaataccacggattctgacggcaaggccacggcagcacacggcgcatcggacgcggctcccaccccggacccggcgcaggccgacagcccggccgcggcggacaacgtactcaaccgcatcgaactgtgcgtcgtgcatcgcccgaaatacgacgactggagctggccgaaaggcaaggtcgacccgaacgaatcgcaccggcatgccgccgtacgcgagatcggcgaggaatcgggcctgtccgtggaacttggcccttatctgggcgacatcgagtacccgctgtccgaagaaggcagcaaacagcgccataccaaggatcggtcggcggataccaagcatatccagttctggatggccacgccgatcagcgccatcgacaacctgcggcgtacccatgcgtttggcccggtgcatcgggcggacatcggcgaaatcgacgaagttttgtggctgacgccggccgaggcccgcaagaagctcagccattccaccgataaggacatcctcgcgctattcgttgatcgggtcgaagaaggtgcactggacgcggtgccggtgattatcgtgcgccacggcaaagcggaagcgcgcaagctgtggaagggttcggacgcgaaccgtccgatcacgccgcgcggcgcggctgcggcatacgcgctgaaccgcgagctggcgtgtttcaatccgacccgactggccacgtcgccttgggtgcgctgccaggagacgttggagatgttcgcgtggcagaccggacgagacatggttcatctcgatccgctcaccgaagatgcatacgccgctgcgccggacaccgcatgggagtgtctactcagcgaaatcgagttcgcacttgagcgccgtcagcccatagcgatatgcatgcaccggccggtgattggtggtatgttcggacacctgcgcagcatgtgcgttgcgccgtctctgagcaaacgcctgatcgccaagacaccgttcatgccgaccggcacggcggtggcgctgttcgtcactccgacgcctcatggtcccaaaatcatcgatattcagaaggttcaaccgcttgtctactagacccgcatttcctgattcatccaactcctcggccgctgccgctgcagctcatgccgcgcacaatggtgccgccggcagtctgggcccgggcttcggctcgttgcgtgcggccggagcggcattcggacctgctcgcatgggttcttcacgcccctcgcgcccggctcagctcgacccggctgtggccgatggattggccggtggcatggacccgcaggcgttgagcgagatgagtcatctgtctgctgccgcattgctggatcgtgtgcgccatagcgaagacccggcggttgttgagcgggtgctcacgttggtggagacggtcggcgtggatgaaatcgccgaactatggagcgatgccgagccggattcgctgcctggtgtgctgtggcgactgtatatgttgcgtacgtggatgcgatcgaatcgcgactcgatcgcgcatctgtggcgcttgggtgagccggtggccactaccgcctccgccatcgccggcgtggatcaggctcccagtgaagatgacatcgtgcgattggccgattcgattctctccggtgcttttgtgggcgattttgccgtggcgcttgagcgtgcggcggcgtttaccgatgtggtggcgttgggcttgcgcgtggaggcgcggcgcatggtgacccgggccgaggccaacggcgccttctcctcggatgccgatgagaaggccgtgcgcaccaaagccgcccgccttatgcacaccgccggcagcctcatggccaccgccaaggatttccagcacggtgccaacctctggcgtcgcggacggttggagtagccctgctccaggctccctctgatgagggagctgtcacgggcgatgcccgtgactgagggagagacccaccaaccgcaccccaacaatcagctaccagccaacaccacacctcccccggcgcggcgagccccatcgcaagctatactaagtatccgcgtcggaccgtgcttaagccccgggctccattttttgccgccgcgagcggcccttgcgccgacaggcgctttcgcggttcggcgcttcttttcttttacccgattcacgccccgaatgttgcgatgggcacgaccagtatgccgtcattgcggcgataggccttcccacctcggccggtaaggaacatcatgaactctggttcgcgaacttgggccatggggttgccacagattttgtcgcggaaggatttgagcttatccgcattgtcatcgttcaccttaaggtcactgagttttatttcgatagcaccccacctgccgtcagacaactcgataatgacatcaacttcaagccccttgtcatcgcggtagtaggcgatgcgattgttcgcgcccggcatggccgacagatatacattcaaatcacgaatgcacagcgtttcaaacagatcgccgagcgtctgtgtatcgcgcatcagagtattcggcgcggcacctaaaaccgcagcaggcaacgaaggatccacgaaatatcgcttgggcttggttcgcacacgactctttgcgcggagtggcggctcccaaccctccaaatccgtcagaaggtacaagtccttgagcattcccaaatagctctttactgtctgcgtatccggttcacggcgctcatcgccataggccatatccgcagccagcgtcgcatattttggtgcctgcgatacgttcacggcgagcgcacgcatgagtgcacgcgcggtttcagggttcttgttcatcttgggcacgctgatatcaagcacactcttgatatattcactcggaatttccagagcaaactcgtcatccaaatcaagatttgcgggccacccacctcgacagcaccatctggcaatatcttcaatgttggttgcacattcggcaggctcgaattgtccatcaaacaaaccagacaagctcactacaccggtagattgccctgactcgcacagactcataggccacatacgcaagcgagaaattcgacctgtgccactgtggtgaattgtttctcggtccttcggaatggccgagcccgtaagaatcagctgccccttgcgattcgcattgtcatccacatgacgacgagcggcatcccaaatttgcggcacatcttgccactcatccaccaaatgcggttcattacccatgagtaccaatgccggatcagtctgtgcggccgcaaaggtagcggcatcatccagacgatccatacttcgcgagcgggaaagcgccgtccatgtctttccacaccattttggcccgacgatttccaccgcgccgaatgctttaagtaacttacctaacctgccatcgaccacgcgagcacgataatcaggttgagtcaaggtatcactacgattgttcaaatcgttcattttccggcctttctcagctacccaatcacctcaatatagattttacacctttctcattcccggttttacactatttccattcccggttttacaccattccgattcccggttttacaccgcaaggtgtctagtttcttcctatgacttaatccaccgagaatcaatccaacgaatcttcgcgcacgactgcgagcgctaggccaaacttgacccattccgatgagacatatttcacaataccgtagctttttcagctggtttccagaaaccgttgacttactgtccggttcggcctagatacgctctttttcgaatctcatgaaatcaacgtcaacaccttggggaaactctcatgaaggcaaccatcaccaaagcgactatcgcagttctcgccggactcgcgatcctcgccgacgcctttctgcttttttcgatgaagatatccaatagacgccacgtgaatgtcattgccatagtgacggatgcacgcgcacgatgcgagcgtcgagccgctccacgatgtcgtggtgatgcgtggagaacagtacagtcttgccggcatcagtgaaggcgcgcaatacctcaaccactacgtcggtattgcgctcgtccaagccgtcggtcggttcgtccagaacaagcaggtccggattcatcgacatgcagcaggcaatcgccacacgctttttttcaccgccagacagacggtatggcgcccgctcccgcatccgatccaagccgaacaacgtcaccatgtcatcgactctgcgctgtacttcggcatccggcaaccccatccgcaacggaccgaacgcaatctcctcttccaccgacgggcagaacagctgggtgtcggagctttggaacacgaatccgatgcgctgatgcagcgctttggcgaacaggctgttcttcgcctcgacttcctcgcgaaccaccggagtaccgccaaaccgatactcgcctgagtccggaaattccagcgcattgatgatgcgcatcagcgtggtcttgccgctgccgttcggcccgagcagcgccacgcgctcaccgcgttcgacggtcagcgaaaaatcacgtagcacggcgtgcgacgaggtttcatcgtcggcgtcgccgtaatctttataggaaaagccgatgtgattcagttcgaccagcgggtcgccgcggaaccatgagttatctggctgcatggttgcagtttgtttatgattacgctttaatccgaacattattgggctccattcattcgaaccaccctcatcccgaatacaccgccagcgcaatcattgcagcaatgcacacggcatacaccccgttgcgccacgtcagcagacgctcgtggtggatatgatacgtaccgtcaaacccccggcacaccatcgattcagccatttgccgcgcctgcgtattcgcacgcagaaacagcgcgcccatcaactggccggcggacgtcagcttggtccggtcgcggcccacgctgcgcaaccgcagcgcatccagcaactccaccatcgaacgaccgagaatatcgatgaactgaatcgtcacgtcgcagatataaatcaccgaatcagggtagccaactgcgcgcagtccggcaatcaggcgattccacggcaccgtacgcgccagtgcgatcaccagcgacaccgccacgaacgcacgcaccaccagccggaccggcgcactgtactgcccaatcagcaggctcggcaccgccacgaccaggctcaggatgcatacggccagcaccgggccgagcaacgccttcatcaggcgcggcggccgggtcgccatcatcagcagcaccaccgccagcatgatgtacgagaacagcatgttgcatgtgatgttgacgcagacaatcgcggccagtatgcccagcagccgcacgcccggattgaccgagcccagcaccttgtcgaccgggctcgactcaatcggcaacgcatgaccaacctgctcgagtacgctgccgaaatgccccaggttgtgttcgatgaaggatgacttgtcagccggaggatcgtaatcctccgactcacgcatccatgcaggtatcgtcaacgcgcggatgtcttgccgttgccgctcaccgcgagcgccagcagacggaacacgatagtgagcacggcgatgccaatcactgcggagagaatgtagccggcgatgtccggcagaccctgcagcgagtagtcaggcaacagcgcatcccacgagaagccatgggcgatgtactgcggcacgtagttgagccccgtggcactcatgaagtcctcggcgccccactcgccccaggcgtcgccggtggcgagcaggccgatcggggaaagcaccgccaccacggccagcgcaatccacgcagacttgcgcagtccggcgtgcgcgacctgtttgccgtcagcaccggcggtctcggcgaagttcacacgggcattgtcttcgataatctccggtgcggtacggcgcacgaattcgacaaccaccacggtcaccagaccctcgaccacgctggctacggccaggtgcgggatcagcatggcgggaatcgtcacgttaaaggtgaacgggaagtagagcgcctggccgtcagcggctttgaacagcagcggctgcacgccgagttccagcgccacgcagaatgcggcgagcgtgatgccgatatagccggacacgaattcggccacgcgttccttccagccgccgggcagcaccttacgtagcaacacgtacagtccgtaagccacaaacggcagcacgaacgccatgttgaagcagttggcgccgagcgtgatcaggccgccgtcgccgaagagcagcgcctgcagcagcagggccaccgacacggcgaccgtcgcgtactggggaccgagcagcagagcgatcagcgcgccgccgacaccgtgcgcggtggtgccgccgggcgtgggcacgttgaacatcatgatgaggaacgagaacgccgcgccggcgcccaggtagaccatcttctccggcgtgctgttgcggatcacgtagcgtaggcacagcacccacaccggaatcatgatgacgtagaacaacgccccggtggacggcgaaatgaaattatccggaatgtgcatcgccaatgtgacggtgtcaggtacttcgattatatccaacttccctctttttgttgatttcggagctcgaccacaacctcccgctccaggaacgtgatatgtaataccacaactgtgattcgtctaatgcacaaccatgcaaaatagcttgcaattactagcgacacaccgtgtaccatatatccggtttccgtgttttcggatatttttccgctatattttttgcatatttcgatcattcgttacaaagtgacgcaacaggctctctacactgtggcatgaaggacgtggggattctcacgccacaagcaattttctccaaggagaacggatgatcgccaaagaaatcaccggcaacatcatcagtcagcagtacagcgacggcaaacttaatgtgtcgattgccttcgactggttcgaaaccgataagaagcgcatgcgcaaggtggccgaggacggcaccgagttcggcatcatggttggcaagaccatcaaggatggcgatgtgctcgccgaaaccgaagacaagcgctatttcgcacgcattaaaaccgcacagctgattgagattccggttaactcgatgaaggaaatgggacgcctgtgcttcgaactgggcaaccgccacctgagtctcaaggtcgagaacgaccgcgtgctggtgccgtacgaccatccgaccatggaatacacgaagaagatcggttatgaaccgcatatcatcgagggtgggtttgacggcttcctgatcgtcaaggcccacgccggcaccggcacactgattccgggcaccaacaagaccacgggcgacgtggccgaggaggagcaggaagccgaggccgacaaggaattcccggccgaggaggccgccggccatctggatgtgcatacacacgacgcaggtgagggtgagcccggcgaatatgagatgaacggcgtgctgcaccgcccggacggctcccacagccacgacggcggccgcacctggcacacccactgatagccccatgaacatcaacgaaaccgaatcgcggcgtctggccatgctgcaggtgtgcgacagcgtcttccccgtgggcgcgttcgcgctgtccaacggcatggagaccttcgtacagcgcgacttcttgcgccgtggcgccgatttcgaggagtatatgaagaactacctcgaagtcgcaccgtacaaggaaatcgggcagatggtgctggccggcaagtacgccaccgattcgcgagtctcccgcaaagggctggccgagcgactcatcgaacttgacgagctggcctcggccctgcaatccgcacgtgaaatccgtgaaggcagcgagcgcatgtgtacccgcctggtcaagctggccgagcagatggatgccggccaggcgcagacctcggatgggcatcgtgggttcgccaagccaagtcctgccgacaatgccaccgcatccgctgcggattcgcgcgaaaacagcatcatcgccgtgcacgagcatcacaccgaacgccaccagctgcacgatgccgccgacggcctgtacggctcgccgtcgctcgacctgtatgccgggctgattcgcgagcgccgctgccgtggcctgcattcgatcgcgatgggcctgtacgcggctgaccatgcgaacgacgtgcgcgacgcggccatcatgtatggatattcgctgttgagcgcgcttaccatgtgcgccgcgaaggcgattccgctcagccagtacgctggccaagtcgccctgcatgattcgttcccgcgcctcgtgcgcgcggtgaatatcgcgatgacgttgaagcccgaggatctcggcatctccggagcttacctcgacatcgccgccatgcagcatgaaatcttgtactcgaggctctacatgagctaattatcctggctcccctcaaggaggggagccaggataacctcacccgcaaaccacatacctaaccaattcccacataaaggagaaaccccatgtcatacgtacgcatcggcgtcgccggaccggtcggttccggcaaaaccgcgcttatcgaacgcctgacccgcaagatggctgacgaatacagcatctgcgtggtcaccaacgatatctacaccaaggaagacgccgagttccttatcgagcactcacgcctcgcgccggaccgtatcgtcggcgtggagaccggtggctgcccccacaccgccatccgcgaggactgctcgatgaacctcgaggcctgtgaggaaatggcccgcacccacccggacgtgcagatcatgttcgtggagtccggcggcgacaatctgtccgccacgttcagcccggacctggccgacgccacaatctacgtcatcgccaccgatgagggcgacaagatcccacgcaagggcggccccggcgtcacccgctccgacctgctggtgatcaacaaggccgacctggccccgttggttcacgccgatctagacgtgatggcccgcgactccaagaagatgcgcggcgaccgcccgttcatcttcaccgacctgatgggcggtgccggagtggacgacgtcatcgcatggatcaagaagagcgtgctgttcgaggacatgtgatgttttggcccgcccgtatccaaaaacggacgggccgaaacataccgttgcaccaagtgcggcataattgcccatgtcatcgtcaggcaccaatcataagaaggcagcgattcgtccatgggcagtagcacttttcgtctatccactgcattccgccacggacgtaccaaaatcgacgatatttatttcgaggcgccgttcaaactgatgaccccgttcaccaacggacgtcattcggatttcgtcgtgatgctcgcctcccctggcttcctgaggggcgatgaagcccatatcgatatcgacttcggcccaggcaccgattcgaccatcaaaacgcaaagctacgagaaggtgttcgacaccgcggacggctcggccgaacgcaccatcgaactcagggcgcgtggcaatgccaaagccgtgttcctgccgttcccagtgattccgttcaagaacagctcattcatgaacctgaccaccgcgcatatttccgccgagtcagcattcgtgtatgcggatgtggcgacatgtggccgcgttgggatggatgagcgttgggccatgaaacgttttacgaatcgtatgcgcgtatatgtggccgaacccgaagccgtgaccaaggccgccgcagccgaattggcgcaacagcacgcacatcgccgaggccggccttccaaggcggaagccgccgctgcccaaccgcgcgaacatctggcctttgctgaccgcatgctgttggaacctgatgcttttgactacaccgaactcggcatgtggcgcgaattcacccactgcggcgttctctacgctcacctgcccgaactcgaccctagcgacactgtacaagatgccgcaactaaagaagcatcctccgccgccatccgcgagcgcatcgagactgcccgcatcgccgccgaagacgcgctcatcactcgcatccatgaacacgcagacgccatcggcttcaccggcgagctcggcgtgagccgcgtaatcaatggcatctgcttgcgtgtactgaccacccgaggcgacgacgccttcgacctcattcgagatgtggccgatttcgtgaccgatttcgtggccgaaggctaaaaccaagtggctctcccctttgaggagagccaccagttctctcagaacaggaagtaccgctgggtaagcggcaactcgtacgccgggtcagagtggaccggttcgccgtccaccgtcacttggaaggtttcgggattgacctgaatgtcggcgagcacgtcgttgaacttcagatccttcttgcctaccgtgcggcagccatgcactggtaacacctggcgctgcagctccagcttgcccttgatatcgtcatccacggcggcctgcgaaacaaacgtggcgcaggacttgccaagcgcacggccgagcgcgccgaacatatcgcggtagtagacaggttccggggtcgggatagaagcattcgcgtcacccatacgagagtaggcgatggagccacccttgatgaccatttccggcttcgcgccgaacatggacggctgccaaagcacgagatccgccatcttaccgacttcgatggagcccacgtattcggaaatgccgtgggtgatggccgggttgatggtgaacttggagacgtagcgcttgacacggaagttgtcgttgcggttgttgtcgtgttcgtcttcggggagcggaccgcgctgcttcttcattttgtcggcggtctggatggtgcgggtgatgacctcgcccacgcggcccatggcctgcgagtcggagctcatcatggagatgatgcccatgtcgtgtagcacgtcttcggcaccgatggtctcggggcggatgcgcgagtcggcgaaagagatgtcttcgggcacattgcggtcgaggtggtggcagaccatcatcatgtcgagatgctcgtcgatggtgttgcgcgtgaacggcatggtcgggttcgtggaactcggcagcacgtttgggaagccagcggcacgaatgatgtccggagcgtggccgcctccagcgccttcggtgtggtaggtgtggatggtgcggcccttgaacgcggcgatggtgtcttccacacaaccgccttcgttcagagtatcggtgtggatagccacctgcgtgtcggtttcgtcggccacgccgagtgcagtgtcgatgacggccggggtggcaccccagtcctcgtggatcttcaggcctgcggcaccggcgcgaatctgctcacgcaacggttcggggctggagtcgttgcccttgccaaggtaggcgatgttgatgggcagcgcttcggcggcctcgatcatgcgggtcaggtggaaggctcccgggttgcaggtggtggcgttggtgccgtcggccggaccggtgccgccgccgaccatcgtggtcacgccaccggcgagggcagtgcgaatctgctgcggggagatgaagtggatgtgggtgtcgagtccgcctgcggtgacgatgaggccttcgccggcgagagcttcagtgccggagcccgcttcgagaccgggggtgataccgctcatggtctgcgggctgccggccttgccgatggcgctgattttgccgtctttgatgccgatgtccgccttgtagatgccggtgtagtccacgatgagggcgttggtgatgatggtatccggcgattcaacgtcgagctgcacggagctttggcccatgccgtcgcggaatgatttgcctccaccgaacttcagttcatcaccgtagtgcgtgtagtccttttccacctcgatgatgaggttcgtgtcaccgagtcgcacgcggtctcccgtggtcggcccgaacattcccgcataatccttgcgcgtaataatcttcatgtcaaaagtccttgctgtttttcagctccccttgtcaggggagctggctcgcgaagcgagactgagaggtagtccgctccccgctggcgggagctgtcagcgaagctgactgagggtggcccttagctcagattcccgagaatccaagctcatgcgccttcttaaacgcggcctcccgcacctcagggtcatccaacttcccctcaaccagtgcgctgaagccgtgaatctcacgcgtgccaccaatatcaatcaaccgcactcgatgcgtttcacccggctcgaacctcacagccgtaccagccgcgatatccaaccgcttgccatacgccgccttacggtcgaacttcaggtacttattaacttcaaagaagtggaagtgcgaaccaatctgaatcggtcgatccgcagtgttcaccacgtccagctcgatgtcttcggaaccttcattgagttccaaatcatcgtcagccagcagatattcccccggcaccaacttctcggtggattcgatggggttatgaatagagacgagcttggtgccgtccgggaacgtggcctcgacctccaccacttccagcatctcggccacgccatccatcacatcttcaggcttgagcagcgtgcgaccgtatgccatgagctccgccacagtgcttccctcacgcgcccgctcaacgcattcggcggaaatcaacgcaatcgcctccacatagttgagcttcacgcctctggctttgcggtctttggcaagctgccccgccaagtacagcatcaacttgtcagtctctcgtggtgtaagtctcataacatcctctgttgttgactggagtttttcaggcacaccaatgtgagccctaacatcgcccaataataagagcgttataagaacgggacgtttctcataacgctctatggccataaacgggggtcgaatcaatcacactctcatggattccttggcggcttctacttggtcggggccgccttcgccggtggcgatgaaacggccggaggccaggacgtagtagcggtcggcgcgctcgacggcgaattggaccttctgctcaaccaagaccacaccgatacccttgtcttcggccatcatgcgaatggccttctggatttcggcgacgatattgggctggatgccttcggtcggctcatcgagaatcatgagcttggggcgggtgatcagcgcgcgggcaatcgaaagctgctgacgctggccaccggacagcagaccggcacgtcggccagcaaattccttcaagaccgggaacatttccacggcttcgtcgtaacgggccttggcctctgaaccgtagcggtcggcgaccacgtgcaggttttcgtccacggtcatggtgccaaaggactgctggccctgcggcacgaacgccatgcccttgcggatgcgttggttcggtgcagccttggtaatgtccttgccctcgaaactaatcgaaccggacgaaacgggcagcaagcccagaatcgccttcaacagcgtggtcttaccggcaccgttgttgccgacgatgctcacccattcgccggcggccacgtcgaaactgatgtcgttgacgacggtcactttgccgtaaccggtgttcaaatcctttacttcaagcattgccatgattattcactttctacggcgtcgtgcatattgatgttgaggcgcgttgtatcaccctcaatatgcactgaaaaagcgcattccgggatgcgatggttgttgtcagtgcggtccatattgcgcttcttcctcttacctactcccctcagtcaccttcggtgacagctcgtccgcaattaaggacgggccttgcctgcaacctgctggttcgactatcgtctcgccttcggctacaaacagcccactgggctgtttgcttaacgcctcggcctcagggaggggagacagggagttagttttctccgccgcccaggtagatgcggactacttcttcgttgttttggatgtcttcgaccgaaccctcggcaaggatttcgccctggttgagcaccgtgaccgaatcggcgaactgacgcatgaaatccatgtcgtgttccacgatgatgaccgtgcggttcttgctgcatcgcttgagcagctcaccggtctgcacacgctcggccggagtcatgccggccaccggctcgtcgagcagcagcaggtgcgcgtcctgcacgagcagcataccgatttccagccactgtttcttgccgtgcggcaggatgcctgcgggcttgtttgcatccacagtcagattgcacacgtccatcatgtattcgatgttctgcgaaacgccgcccatcggctggaacagctcacgacccttcttgcggaagccctcggccagctgcagattctccaacacggacagctcttcaaccaccgatgcggtctggaaggtacgcccgacgcccagcttgacgatgtcgttcggcttgcggcccaacagctgctcgccacggaattccgcggaaccagtggccggcaccagtccggtaatcgcgtcgatgatggtcgttttaccagcaccgttcgggccgatcaggaatcgcaaatcgccgtgctgcacagtcaaatcaagattcttgacggccacgaatccatcgaactcaacgtgcagtccacgaacttccagataatcgctccactggccgccgcgatcatccagcaccgcaagctgatcgtgcagcttcgtacgctcttcaacgatttcggccttcatctgggccgcttcgtcgcgcatacgcttggcttcgtcgcgcatctcaatcatttcggcgcgcaactgctccaaatcggcctgcgatgcaggtgcgggagccgatggattcgagctcatgttcttctcctcactcatgcgttcaccgcctttgcagtagcagtaccggtaccggcaacggcaccagcaccagcaccagccgaagctccaaccgaactctttccgagcccgatcttctccttaatccaaggccatacgcccttgaactgccccaagcccttcggcacaaaggcaatcaccagaatgaagatcaggccttcgatgtacgtccacgcggacggatacgcctcagacagctgcgtttccgcaaagcgcaccagcagcgtgccgaccaccgggccgagcaaagtggcacgtccgccgatcaccacgccggcgagcatcaggatggacggcgtcacgccgatatcggacggcgaaatgatgccgaccactggcacgaacattgcgccaccaatgccggcgaacattgcagccaccgagaaggcgaacaccttgatggaggcggggttatagcccaagaacttcatgcggttctcttggtcgcgcacgccgataatcaggtcgcccataaacgatttgcgaatccagtagacgataagcaccatggccagcgtcaggaacgcgcagatgtagaagatcatctgcttgttggcgttatcagtcaagtcgtaaccaaagaatcccttgaaatcgttgagaccgttggtgccaccggtggttttcgactggccgataagcagcacggcgaacgcggcaaccagcgcctgcgaaagaattgcgaagtaggcaccacgcacgccacggccgaacacagccagaccgaggattgcggcgataatgcccggtaccgcagccacgccaatcacggcgatgaccggattgcggaagagttcccagaatccaggaaccttggtgatgccgtactgggacatgaagtccggcacttggcccacgccaatgtcctcaagcttcatgtggatagccatcacgtacgcgccgagaccaaagaacaggccttggcccagcgtcagcataccgccttggccccaagccaggccgatgccgaccgcgaccatcgcgtagcacaggtatttggacagcaggccgaggttgtacacgctcagcacagtcggagaaaggaagatcagcgccacggcaatgaccacaccgatcaaagccttatatttcgtggcgtattcgctcaaagtcatcttcattgtcgtttccttacccttctgaagcactcacgcgaggttcctggagcggatggagaccaagccctgcggcctgaactgcaggaacaccaccacaatcaggaacacggcaacctgaccaatcgaggcagaggtcggcagttcgatggacgactggcacaagcccagcacgaacgaggcgataaccgcgcccttgagctggccaacgccgccggccacaacaaccaggaaggcctgcacgatgaaggtcgtaccgaagttgaagctaatcgagttcagcaggctcagcgccacgccagcgataccggcgatgccggagcccaggaagaacgtcacatggtcgaccatcttggtggagatgccggaaacctcagcgaggtcgcggttctcggaagtggcgcgaatctggcgacccagcggcgtgagcttcaggatcgcgtacagcgcagccacgcagataatcgacagaataaagatgaacagtcggcctgcagagaagctgtagccaaagatggtcaccggattggtcagcgcttcaggagccgaagcgtagaccggagtggcaccgaaaatatcgcgtgcgagctgctgcaataccagcgatacaccgaaggtaaccagcagcgtatcaagcggacgattgcgcatacgctccagcagcaacacgtccagcagtaaaccaagcaaaccggctactacgaaaccgaccaccagcgccacggccagggacactgttttattgccgatgaccatgctcatgacgtatgcggtgtatgcgccggccatcatgaattcgccgtgggcgttgttgataacgcccatctggccgaaggtcaacgacaacccgagggctgcgagcagcagaatcgatccgttggacagacctgccacaatttgtggaaataacatacccatgttgttgtgtcctcttctctcagttgctctcgacgctggcgctcaggctcttggcccagctgtaggtcttcaggtacgggtccggcttgatgggaccgtccgacttccagacggtgtggatgagcttgtctgagccgatcttgccgatgtatgaggtcttgtagatgtggtggttttcgccgtccaccttgaccttgccttccggtgcattgaaggtgacaccgtctgctgcagccttgaccttgtccacatcgaacgacttggccttctcgaccatgcccttccacaggtacacagatgtgtacgccgattccatcgggtcggaggtggggcgattggctccgtagcgcgccttgaagttcttcacgaacgtcttgttttgcgcattgttcagcgtctggtagtagttccaagcagtgagctggtccttgacgttgtcaacgccgatagcggaaacctcttcctcggcgatagacatggaaatcaccggcgtggtggcggctttcaggccggaagccttgtattccttgaagaatgcgacgttggaatcaccgttcagcgtgttcaccaccgcatccgcgccggagaacttgagcttgttgacgatggtggtgaagtcggtggagcccattggggtatattcctcgccgaccacttccatgccattgccctcggcgtacgccttgaccacgcgatttgcggtctgcgggaacacataatcggagccaaccaagaacagcttcttgtagccttgctccttaaggtaatcaagcgcaggcacaatctgctggttcggtgcagcacccgagtagaagatgttcgggctggcttccatgccctcgtattgcagcgggtagaacagcagcgcgttatccgcctcgaacacaggcagcatggccttacgcgaagaggacgtccagccgccgaacaccgcggccacgcattccttttcgatgagggtcttggctttttcggcgaacacagccggctcggacttgccgtcctgctgcactaccttgagctgcttgcccagcacgccgccctttgcgttaatctcatcaacggccatgtgcagcgaatcactcaccgtctgttcggaaatggccatcgtgccagacagcgaattcacgaaaccgattttgatggtgttgcctgaggtgtccacacatgatgaggtgtcgcttgccgcagtcgcgttgttctcttgggcctctttctcggccacggtgcgaccccagccacaaccgctggtggcaagcactgcggcaacaatgcacaccgcagcacccatcttcagtctttgcaatcgagtcatatggctcttcctccccacatacgactacattccgcgaacgttgcccgcccgcggaatgtctacgctgattgccgtaccgtgccctgatgcctgatatcgtgctgaaccacttgccggatatcgacggctggcttccggccgactgcactatacgatggcagtgcctgcgtgaatttccgttgcctgaatatttcatatgcgtctcatacataacgctcacgttacaaaatcaacggtgttacgcggcccgccgtcgaacgctgtttacattggtgtgcgatacgcgcgcgactgccgcccaagtgacttccccgcgaactacgggtaggctggagagtatggaacttcacgttttgaatcatccgctggtcgagcacaagctcaccgtgctgcgcgacaagaacactccttcctccactttccgcgagctcgtctcggagcttgtgatgctcgaggcctatgaggccacccgcaacctgtccgtagttgccgcaccaatcgaaacaccggtcgctccgatgaccggtaagaagctggccaaaccgcgtccgatcattgtgccggtgctgcgtgcaggtctgggtatgctcgatggcatgacccgtcttatgccgaccgccgaagtcggcttccttggtatgaagcgcgacgaggaacaccccactcagcaggtcacctatgcgaaccgtctaccggaggacctgtccggtcgtcagtgcttcctgatcgacccgatgctcgccaccggtggcacgctggttgctgccacgcactatctggccgagcgcggtgccaaggacgtgaccgcgatcaacatcatcgcggcgcctgaaggcatcaagttcgtggaagagcacatcgatccgtccatcgacttcaaggtcgtagtgtgcgcggtcgacgagaagctcaacgacaagtgctacatcgtgccggggttgggcgatgccggcgaccgtctctatggcgtaattgactgattttcctggctcccctcagagaggggagccaatgtgatgggctttttatgcaaatcgacattattgcgccgggacgcgtgaaggaacaatatcttcgcgacgccatcgacgagtattccaagcgactttcgcgctactgcaggctcaacatcattgaagtggcagatgagaaaacgcctgaccacgcctccgaaggcgttgaccgacagatcaaggccaaagaaggcgaacgcatcgccaagcatctgaaggacggcgcgtttgttattgcccttgccatcaatggcaagcagctgtctagcgaagaattggccgccaaaatcaacgaccttggattgcgtggcaccagccatattcagctggtcatcggcggctcaatcggccttgacgacgcgattctgcgtcgtgctgattttctgctgagtttctcgaagatgacgttcccgcatcagctcatgcgcgtgattctgctggagcagatttatcgcgcttataagatcaacgctggcgagccatatcacaagtaaaacgccatacctcatggggcgggaaatcccccatggggcggtaattgcctcatggggcggtaaaaccctcatggggcggtatgccaaaatggcttaattccgcggtttcacatattcttcaaaccgccccatgggcaagttaccgcccgatgagcctgtaaccgccccatgggcacatcaataacgccctcaacctcacactgcgtcagggacgaacgcttcgaagatgtggcggtcgaagtagggcgcgcactgggcgagttcatcgctgctgcgcacggtccatgaaaccggcatcgcacccatcgaacgagcgagtttgacctgcggcgaagcgccaccggtccagtcataggccacgaaatcaggacgagacagccagtcgaacgccagtaagccggcggcccattcagccgcaccattcttgctcagcttcgccggccagctcagctgaccgcggcacacctcagggtgatgctccttgtaccaattcaccgcgcccggatggaaggattcgatcacgtacgggccgtcatacgcctcaagcaaggcgtggcccttttccatgagctcttcgctacgctcatcccaagccttgttgtcgctgaacttgtattccacaatcagcggagcctggccggccaccacgtccagcacatcggagaacagcggcacatgctggtagtaccccttcggcgcggcggacggcgtgaccaccagcggcggattcgcgtcggcaccgggcagcggcttggccttcagatcgccgggcttgctgccggggaacagcgggatgcgggtgagctcgtcatatgtcaggtcttcgacgcggcgcgggtcgccggccacgcgcagcaaatcggcgtcatggaccacgaccacttgaccgtcgagcgtaagctgcacgtcgagttcgatgccatagccagcctcgcaggcggcggcgaatgcggccagcgagttttcaggagcgatcggaccggtcatatccacactgccgtagccggccttgacagccatgcgacgggcaagcgacacataatcatcgttttcggcgatggatcgctcagtggtatcggcttgggcgctgaccgaattatccccaccataatcagcgatatcggtatagccgaccaaaccagaacccgcatcgtgcaagccacgatgggcataccataccttcggaatggagggcacgaaattacgacgcttgtcattgaacgtgcgcggggccacggcccacacggcagcaccggcggcggccacgcctgccagcgccacgtttctccagagcttcgacgacattggaatccttcctgttgggctgcctctagcctaacgcttctgccagccattgtggagtggttggatcgtccagcttcagcgcgcggtccaggtggttggcacgcagcggctcccagctgaaatctgccagcagatcggcgggtttgcaagggattggagtgggttgcagacgcagcaaccaggcgcagtatccgatgatttgctcgggggttacgttgcgggcgcgcaaggctcccatatccagcgaacgttcgcgcttggctaaacgccgaccggccgcattgtcgatgagcggcaggtgcgcatactcggggtgctcggcgagaggcttttccgtgttgccgcattccggctcaaagccgccagccaacagacactggcgaatccacatttgcagcgcggtggagcgcagcagatcacggccgcgcacgatatcatcaacatccatatcgaggtcatccacgaccacgaccagttgatagccgaacagtccatcggctcggcgaatcacggaatcgcctacctcgcgggccaaatcgtagtgctgtggactatagacacggtcgttaaagcatgcgacaccatcaacgattccggcatcgccctgctgttccggcggcacggctcccgacagcgcagcggaatcgtcaggcactgtacgttgcttttctcccgctgccggtttcggcatggcgatacggatggaatgctggtcgccgcgagacagacgggcacggacctcgtcgggatggtcgtgcagcaggcggcggcacgtgccggggtacaccatgaagccgtcgccctcgttgggggccgaggcggcgcgaatgtcggcacgcgagcagaaacaggggtacagcacaccttgcgagcgcaggcattcgagagcgtattcgtagcgctcagtgcgctgggattggaacatcggttcgccatcccagtcgaggccgagccaatgcaggtcgtccatcatgagctggtccgcaccggcaaccacgcgcggcttgtccacgtcttcgatacgcatcagcatgcggtcgccacgcgaacgggccgaaagccatgcacccaacatggcgtacacgttgccgatatgcatgcgccccgacggcgtcggcgccaatcgtccggtcactggctctcccttcgtccgttaacactcactttcctaccatatgcgacagtgaacaccttgatgccacggttcttccactcttggggaacacaattgagacggatcggacagatacttccgtttcaaggggctgatttcgatgttgcaggaggtctacttccatttcaaggggctggtagccaagtagacacggcgcaacaatggcggaatggcgttgccataaagccgctgatactcgcggttcggcagaagagcagcccctcgaaacggaagtagacctccgaaagggggcaaatcagcccctcgaaatcgagatagacccacaaagacgaaaaagtgggtatgactgctaccatacccacctgtttaagagattttgcagagaaaaatcactgttgcgaaaccgcccgacctcccctcagtcagcttcgctgacagctcccctcagagaggggagccagtgattgtcacttatcttcggtgacgttgtccacgctcacatccggatcgtcggagacgatttggtcgctcgcccaggcggagagctccagatgttcgccgccggtctggtcgacgagcacggtgtcgccgtcgtggaccttgccggccagcagcatgcgggccagctggtcgcccacttcggtctgcaccagcctgcgcagcggacgagcgccataagccgggtcgtaaccggtgttggccagccattcgcgagccgagtcggtgacgtccagcgtgatgcggcgatcggtcagacgctgggccacgccagccacctggatatccacgatgccgccaagctcctcacgcgtgagcgggtggaacatgacgatgtcatccagacggttcaggaactccggcttgaagttcatgtggacggcgtccatcacggccttcttcttggcgtcggcgtccatgtcctcgttcacgaggaactgcgagccgaggttggaggtcatgatcaggatcgtgttcttgaagtccacggtcctgccctggccatcggtcaggcggccatcgtcgagcacctgcagcagcacgtcgaagatctccggattggccttctcgacctcgtcgaacagcaccacggaatacgggcggcggcgcacggcctcggtcagctggccgccctgctcgtagcccacgtagcccggagccgcaccgatcaggcgcgagactgaagccttctccatgtattcggacatgtcgatgcggaccatggccttctcgtcgtcgaacaggaagtcggcgagcgccttggccagttcggtcttgcccacaccggtgggaccgaggaacaggaacgatccggtcggacggttcgggtcggagatgccggcacgcgaacggcgcaccgcgtcggacacggcggcgatggcttccttctggccgatcacacgcttgcccaggtagtcctccatatgcagcagcttctcgttctcgccctgcatcaggcggccaacgggaatgccggtccagtcggagacgatctcggccaccgagtcggcgtccacacggtccgggaccatcggctcatcggccgggttggccgcgccggcatcggcagattcggcatccgcgctttccgcggcggcgagttccttctgaatagccggaatctctccgtacagaatcttcgaggcctcagccagatttccctcacgggtgaacttgtccgcctgcacacgcaggtcatcgagcttggcacgcaggtcaccgaccttgttgtggccggcctgctccgcatcccaacgcgccttgaggccgctgagcttctcacgggtgtccgcgagttcggcttgcagcttgcccagacgctccttggatgcaggatcctcagccttcttgagctgcatttcctccatttcaagacgggtcaccttgcgctgcagttcatcgatctcctcaggcgaggagtcgagctccatacgcaggtgggcagccgcctcatcgaccaggtcgatggccttgtccggcagctgacggcccggaatataacggttcgagagggtcgcggcggcaaccagcgcgtcatcgccgattgtcaccttgtggtgcgcctcgtaacgctgcttcaggccacgcaggatggcgatggtgtcttccacgctcggctcgcccacgaacacctgttggaaacggcgttccaatgccggatccttttcgatgttctcgcggtactcgtccagcgtggtcgcgccgatcaggcgcagctcgccacgggccagcataggcttcagcatattgccggcgtccatcgagccttcggccgcgcccgcgccgacgatggtgtggatctcgtcgatgaaggtgatgatctggccgtccgcgttcttgatttcgttgaggacgctcttcaggcgctcctcgaactcgccacggtacttcgagccggccaccatggagcctaggtcaagggagatgagcttcttgccttgcagggtggtgggcacgtcgcccgccacgatacgctgggccaggccttccacgacggcggtcttgccgacgccgggctcgccgatcagcaccgggttgttcttggtacgacgggagaggatctgaatcacgcggcggatttcctgatcacggccgatcaccggatcgagcttgccttccttggcggcggccgtcaggtcggtggagtacttctccagggccttgtacgagccttccgcgtccgggctggtgaccttcgcgccgccacgcacgccgggtacggccttgcgcagggaggctgcggtgacgccgttcttctccaggatttcggccgactggttcggcttgctggccgcgatgccgataagcaggtgctcggtggagacgtattcgtcgcccatctgctgcatttccttctcagcctgggcgatggcggcggtcagctggcggctggcttgcggctgcgaagtgctggagccggatgcgctcggcagtgcgaccaaagcgttacgcacggcggcgccgatggcctgtgggtctccgcccgcggcctcgatgagggagcgcaccacgccgttttcctgacgcagcaacgcatccatgacgtgcagggtctcgacctgcgcgtttcctgcggcggacgcactctgaatcgcgtcgccgacggcttcttgggccatagtggtgaacttctgttccatatcgtattcctccatgtcatgcgttccgcgcggagcggctcgcgggcttcgaaagccccgcaagcgccaccgcagaccgcaacttgtcgttgtctgatatggtcaaccgacctggaacccattctattcccaaaacttgagtgcaggtgactcaagttttggattttggtggggagggtgaacagtagccccctctgatgagggagctcacatctatttcaggaggccgacggcagcttcggcggcggataggatttcgccggagaggatggcgttggctacgccttcgatttgcggggtggtccaggtatcgcgtacgtcggggccgatttcgttggcgtactggcgcaccacgcggtatacggcggcgcccgccgcacccggacggtacggcttgcggaagtcgaaggagcggcaggagcacagcagttccacggccagcacgcgcgcaaaggccggaatcgaccggcgtagcttgcgggcggcggcccagcccatcgacacgtgatcttcctgcatggcggagctcggaatcgaatcgaccgaggcgggcacggcgttgcgcttcatttcggagacgatgccggcggcggtgtactgggcgatcatgaaaccggagtccacgcccgggtcaccagccaggaacgccggcaggccgcggttgcgcgccacgtcaaggaagcggtcggtacgacgctcggagatagaggctacgtcggcagtcggaatcgccaggaaatcgagcacataggccagcggcgcgccatggaagttgccgttggactccacacggccgtccagcgtgacgcacgggttgtcgatggcggaggcgagttccacgcccgccacggaggccgcgtattccacggtgtcgcgggcggcgccgtgcacctgcggggtgcagcgcagcgagtaggcgtcctgcacacgcacggtggagcccgggcggccggcctcgatcagaccggagcccttgagcatgcggacgatgttcgcggcggaatcgccttggccgcgatgcggacgcagcgcctgcaagtcggcggcgaacacgcggtcgttgccgagcatgccttccacgctcatcgcggcggcgatgtccgccgtcttgagtagcaggcgcagatcggtgatggccatacacaacatgccgagcatgccgtcggtgccgttgaccagcgccaagccttccttctctttcaaatcgacgggcgtgatgccggccgcacgcagcgcttcgccgccgccgatcttgcggccgtcagcgttgcgggcctcgccttcgcccatcgccaccaaagcgcaggcggcgagcggcgccaaatcaccggagcatccgagcgaaccgtattcgtagaccaccggggtgatgccggcgttcagcatatcggcgtagacctgcgcggtttctgggcgcacaccggtgcgtccggtgcacagggtgctcaggcgcagcaccagcaggccgcgcaccacctcacgctccacttccggtccggcaccggcggcatgcgagcggatcagacttttctgcagctgcgcgcgctgttccttggggatggaagtggaggcgagcgcgccgaatccggtggagataccgtaatgcggcacggtgtcgtcggccaaatgatcgataaccgcgcgacttagcgccatctcatgcttcgattcgtccgaaatcgccactttggcaccgccgcgcgctacggcgataacgtcctcgatgctcaatgccccaacgcctacggtgaccgtctgctctgccatgttttcctacctctctatcgtgccgagctccacttggtattggatatattcatctcgccagcatggcatatcaacgttacgggactgtccacaatatgcaccgccccgcgccagcgccgcgcgaacgctcctatactcacggctggtttgttatgcgcctgaccgccgccggtgctgcggcgggtgcttgtgggataagagaagaacatgatttttcaggccggttcgctgctgctcgttatcatcggtgtctacatactcaaacatgtccacattttcggcgagcgtgattacaaaatcgtgcagggtctggtattcaatctgacgcttccttgtgcgattatcctgtcgttcgccacgaacaagcacgacatgcgcatgctgtggatcgtgttgttcggcttcttcgcctgcgcgattccgctgttcatcgtgtatttcggttctcgcggcgacgagaagaactaccgcgccttccagatgctcaacgcctcgggcctgaacctgggcgcgttctgcctgcctgtggttcagacgttcatgggcccgtccgccggtctgccgatcatcatgctcgatatcggcaacgccaccgtggccacggccgggtcactgaccatcacacgcacgctgctgcatatggatgacaatttcaagtcgctaccgctcatcctgcgtctgcgcaatattgccagggacttcctaagctcgatttccttcgacatctacatgctgatgctggtgttcatgttcctgcacatcacgatcccacagcccatcgttacgctcatcaccccgttcgccaatgcgaacgccttctgcgcgatggccatgatcggactgatgatggagattccgaacaatcgcaaggacaaggtggagttgggcaaggtgattgtctggcgcatggtattcggcgcgattatcgccgtggccgcctggttcctactgccattcgacatgaggattcgcgagatcatcgtgttgggctcgttcgcccctatcacgatcttctcaaccaagttcaccgattcgctaaccggcaacgccaagctcgccggcttctcgctgacagtgacggccatcatcagcttggtggtgatgaccgccctgcacgcacttctgccgggagcgtaaggcgcgttcttggttcccctcagtcagcttctccgcctggacggctcccctcagagaggggatccagaacgagtcacgcccgaacgattacgttgcgcagatcgccgatgccctcgacgtgcacgatggtctcgtcgcctgggtcgaggtggccggaggcgttcggggtgccggtcatgatgacgtcaccaggcagcagcgtggagaacgacgaaatcgcggcaatctgctcggggatgccgtgaatcaggttcgcggtggtgccagacgccatcggcacatcctcgccgttcagcgtgaaggaaatcttggcgtccttccagtcgaggtcgtcacgcatcacaatccacgggccaagcgggcaggaagtatcgaagcccttggcgcgcgtccacgtggggtcgatgccctgcaggtcgcgcaacgtcacgtcgttcacgcaggtgaagccgagcacgtaatccatcgcgttttcaacggacacgttcttggcgatacggcccatcaccacggccacttccggctcgaagttcatgtccttggagcaggccgggtacacgatcggatcgtcggggccaatcaccgaggtggacggcttggtgaagatcaccatgtcttccggcgcgtgggcgatttcggagtggccggcctcgtgcatgaactgggcgtgggcctcgtagttcttggccagaccgtaaaccttggaggggatgaccggggagagcaggcggatgccgtcgccgtcgaccgggtaacgagtgccggtgggcttgacctggtcgccggccagcggatgaccgtcaagttcgatgaggtagtccttgccgtccgtttcgtccttctgcacgaaggcgtagcgcggcgaatcattcaaagaaaaacgtgcgagtctcatgcctgtaagcctactccttggcagttccttccgcagaagcatccgtccaaggagcaagcagaccggccttcaatcgaccaaaacgcacgttcgctgggattgctacttttcggtccaggttttgtcgtacagcgactggccgctttgcgtgtgcatgatgacgcgcaacgatgccttgccgctggaggtcttgcacatcgagcccagcagattcgcggtggattgataggtgctgttcatagcatccagtgaggaagcgacggtatcgcctagcgaggcatagcggtcgtcgagcacgtactcgtacaccaaggtgtcaccgtcgacacggtagttgaaggtgatgccggtatctgcaaacgtatccgcttcggattcaatggagtccttgaattccgaatagtcgacgaaatcctgaatcgaatcgtacagcccataatcgccgtcggttagatcgtcatgggtttcgcccaacgtgtcgtccagcgcatcgtcaagattatcttgagctttgctcttatcgctgctatcaccgttgcccgaagaggactgactatagaaggaatcggttttcgcctcatctatagccttgctggtgtacgagacaccgccgacgatcagcgcgatgaccagtattacctgtatcaccatgcccgccgcactgatgatgatgccggcgatggccaagcccttgcccttgccgccctgtttcttaatctggttgaggcccacgatgctcaggatcagaccggggagtgagacaaggaacgagcagataaaaccggcaatagccaggccgttgtacttctggttcgcttcaggcggcacactgccgtaagaaccagaccatcccggctggccgttcggttggccgccttgcatatacgggttatagggcgtttgcggaggcacggccccgccgcccggataccgagcactgacgctgccgtagaccggaggaaccgatccgcctgccggagccgtccccggatagggcgaattgggtgctgctggtgcgggcgcaggcgcgggcgctgtcggtgcgggcgcgggcgcagcggcaggagtcactggtggcaaagcctgcgtaggcggtaccggctgattgaccggcgcaagaggctgggtggactgctcggcaggtgtaaacgcctgcgtaggctgctcaacaggagtgaacgcctgagtgggctgttcgcccgctgcgagtgcttgggttggagcattgttggcggcggttcctgcttcccccgtcatcgcatttaacggctcagtcggattggcgtcagctcgctgccccggcacctggccgttcggattggcattcggatcagtcatgacatgcactccttcaactgcatcgcaccccacttgcgagatacgcccctcgtcttacgcgccacattgtgcgttacagacaactgtactcctcgtggcgagccttaagtaccccaggaaatttggcttcccaaaaaacacagaagcctgaaaccggctattgcctcagcaatattcagtcggtttcaagctaaatcgttaatcctctggtgaaacgacggtctacttcttcagcagcggcgcgacctgttcctcgtaggcggtcagggcggtgtcgatcacctggtgcatgtcatagtacttgtaggtgcccaagcggccgccgaacacggtgtttggctcggccgcggccttggcctcgtaccgcgcgtacagggccttgtccgcgtccgtgttcaccgggtagtacggttcgtcgccgcgctcggcgaaacggctgtactcctcccacaccacggtcttgtccgggttctgggcatcgcggcgctccgggttgaagttcttgaactcgatcgcgcgcgtgtacggcacgtccgcgtccgagaagttcatcaccgggcaaccgaaatggtcgccctcatcgtaacggacctccttgaagtccaccgtgcgccacttcaggtcgccaagctcgtaaccgaagtaacggtcgaccggacccgtgtagaccaccggcacgcccgcggcccgcagggccttcttgttgtacggctgggattcgtcgaagaagtccacgcccagcgaaaccgtgatgcgcggatcgtcgatcatgcgttccatccacttggtgtagccgtccgcgggcagaccctcccacgtgtccttgaaatagcggttgtcgtagttgaagcgcaccggcagacgcttgacgatcgacgcgggcagctcggcaggatcggtctgccactgcttgcccgtgtagttcttgatgaacgcctcgtacaggggacggccgatgagctggatgcccttgtcgttgaggttctgcggatcggtgccggccagctcgcccgcctgctcggcgataagcttctgtgcctcggccggcgtgtaacgcgcgtggaagaactgattgatggtgcccaggttgatcggcagcggatagacctcgccgtcatgcgtggcatacacgcgatgcacgtagtcggtgaacgaggtgaaacgattcacgtaatcccacacccgcctgttggacgtgtggaacaggtgcgcgccatacttgtggatctccgcgccggtctcctcatccatatacgagtaggcgttgccgccgatgtggtcgcggatgtcgatgatatgcacacgggcacccgcatgctccaccgcctgctgcgccaccgtcaggccaaacaggcccgcgccgacaatgacgagatcggggtactgcgcgccctccgacgggccgtgctgcgtattctccgccgcatttgccatgactcaaaacctttcatgattccatgtgcaattccacacgcgtttcattgtccaccagtatagcgagaagcacctatgtacatatgcgattccgaattcagcggctcctataggcttccggcttgtgcaggctgggttttcggctttacttggtgcacgcgcgacgtgcgcctaccctgtggcatactgttcatgtccgcataaacagggcggcctgccggctacgaccgcagggcgcagacacgtgaagaaggattcgccatgacgcaggtttcgccgcttgtctcgatcgtcgtgccggtgtacaacgccgagaaatacctacgttactgcgtggactcgattcttcagcagtcgtatgagcatctggagatcatcctcgtggacgacggcgccaccgattccagcccgatgattctggacgaataccagcggcgagacaatcgcgtgcgcgtcatccaccagacgaacggcggcatcgcgaaggctcagaacgccggattggatgcggcgcatggcgagtacatcgcattcgccgacaacgacgatatcctcgaccgtcgcaacatcgagttgctgctgcacgcgctgatttctaccggcgcggatatgagcaaggcccgctggaggcagttcggcgtctcccagatcgaggaagtcgcgatggaagccagtgaaggcgccgccgaacccgaacatgtgagcgtgtccacgaatccgctgcgtgcctaccagaccgtgttctgcaagagcctgcgcctgatcggagacaagctcgggcgcaacacggaggcccgctatttcaacgaggcgaactggtgccgcctgtacaagcgcgaactgtgggacggcgtgcgattcccggagggcatgtacgcgcaggacgtgatggtcgccggcgaactgtacgcccgcatgaacaaagtcgccgacctcaacgtgaacctgtacaactggctgcagtccgccggatcagtcacacatcaggaacgcagcttcggtttctaccatgacaatttcgccgctggcgcgcacaacttccgcttctgcctgaatcacggcgtgctgccgatgcgcagctactacacgatggtgggagcctgcacggaagaggccacgtcccccgacttcaacctgcccgagaatcaggcccagcacaaggccgataaggcggaactcgatcagctgctcgccaacctttcccgccagcagcgtttccgctgcactattacccgccgcatccgcctgctggagaaatacgtctacgaccgcaaggtcaagaacatgaagtaagcaagtagggattcactccatcattcgatccatctcagcatgagctgggcacgctacctccgttgttgtgattgacactgttcctatctgatattggaaacggaaccaatcgtatgtaccgcaatgccccacatacgttcaaaaacaccttcccgattgaagataatcgcaaacaacgatttgcgaattacctcgagcatgagcgcgacgacgaaaacgaaggcagaaatcgccagcatccatacaatcggcaatctcgtctggtagtacttatcgaaggcaaaccactgagtccaaagcaattcgcggacgaacggatgatccgtaataagatacacccccagagtccaagatgccacggaattgaccagtctcgagcggaaccgcatacgggagaaggcgatgaacataccaaaactgacacctaacaccggcaatgaccattctctatccaatggggccggctccggtatgaagctcagcccatcgaaagccggcacgaactacacatcaccgaactatttcatggaaatggccagtgagcacatgaacgcgaaagtgtctccttatctcgcgttcctgtccaccgtacgcaccaagctgcctgccgtggaacgactcgtgctcggcgagggcggtttcacgaacgatacatccaccacatatctggacaagaacggcgatgttgtgaaacgcaaggacctctccaaacagcagaaaaccctgctcaaagagtatcggctcatccaatacgacatgactgccggcaaaggttatctcgccaataccgatttcttcaatgtaccgaacacacagcataggtaagaaggcatcgtcacgtagttcagttcacgatagaatcacgtagcatctttactgttgcgctccgaccacggctagaattacgtgtagcgcatcgtagaaggagtgtcccgtgaagattgcggttgccggtactggttacgtcggattgtcggtggcgttgctgctgtcgcaacataatgaggtgcacgcgttggacatcgtgcctgagaaggtcgagctgctcaacaacggcaagagccccatcgtggatagcaagatcaccgcattcctcgatgcggaccggtccggcgagcggccgttggacttccaggcgacgctcgacccggaacaggcgtatacgggagcggattacgcagtgatagccacgccgacgaattacgacgcccagaagaattacttcgacacgtccagcgtggaggcggcgatcgaggcaatccgcaagtacgaccaaaccgcatggatcgtcatcaagtcgacgattccggttggttacacccagcagattcgcgaacggttccacgatgaccgtatcctgttctctccggaattcctgcgtgagggccacgccctgtacgacaatctgcatccgagccgcatcgtggtcggcgcgccgcaggatgatgcggaggccgtgcaggcggcgcacacgttcgtggacctgctcgcccacggtgccgccccggaggagaaggaccgcgtcaacccggatgggtcgaggggcatcccccagctggtggtcggtaccactgaggcggaggcgatcaagctgttcgccaatacctatctcgcgttgcgcgtcgcctatttcaacgagttggacacgtatgcggaaagccgcggtctcaacacgcacgaaatcatcaagggcgtgtgcatggatccgcgtatccgcgacgattacaacaacccaagcttcggctatggcggctactgcctcccgaaggacacgaagcagctgctcgccaattacgataaggtgccgcagaacctcatcgaggcgattgtggagtcgaaccgcacacgtaaggacttcatcgcctacgaaatcgaggagctcgtcgaccgggccaaggcgaacggcatcgccaaacctgtggtgggagtatatcgtctgacgatgaagagcggttccgataatttccgtcagtccgccatccaaggcgtgatgaagcgcatcaagtcgcgcggcatcgaggtcgtcgtctatgagccgacgctcgacgcccccgatttcttcggcagcaaggtcacgcacgacttggactcgttcaaacgcgaagcggacgtgatcatctccaaccgttggaacgacgacctcaaggacgtggcaggcaaggtctacacaagggacctgttccgcagggactgatcgaatcgttctgagtagtccggaagtggagatacctagaatcgcgtgattcgcgtcagacgaataagcgttgtcccgtctcttcctccgaagaggcgggacaacgcttattcctgcgtttatttccgcacatacgaaattgaggaaagcccaatccccgacatgaacaacataatcggaaggaactgtatcagatacctggaatgcccggattcaaaaatcagtaaaaaaatgattgcaccgaccatggcaatggcgagccatacatcgtaagaaacatgttctccgaacttctctatcgaaagtacctcttcctccttaaagaaagtcctagacattctcaaacaattcatcaggattccactcaccaacaaaatatagaaaatctgctctatctgaatcagcgttctgttggagttggaaccgccagtgtaaagatgggatactttttggataaaaagattttcatggacggcgttcagtggctcattcgcaaatggtctaggcaggaagacattgccggcatatcgctgaacgccgaacgagccatccgaggtgaagtttctgaacttcgtcagcagaaaagtggagtatcctacaacgccatattggcgcagcctctgcttgatgacggcattgttcgcatccaccttctcctgatacgtgagatgcgacatggtgaattggtactcggattccaaatatccgccggtgccggtcattcccatcatgacataatgctgtggggacagcgacagctcatggttgtaggggacgagctgctgagtgcggacagcatggttgtagggaacattcgcacacaggaagccaccggccatgagaatgagtgacgccagcaatgcgacgcagtgtcggcgattcattttcagaagcaatgcaaccaacaatgcgattacaggaatcacagctgatggcttcaagttataggtgaccgccagattcaggccaaacaggaagataagaaccggattcttccaactggacagaaaagccttatcaatggttttctgcgacagcagccagaagcagaaagcgcagttgatcaccgtgaacggcatgcaaaaggtatcgctgtacggatgcaggcaccatcccgacaggccgaggaggatacaccaaagcaggagaacgatattggctaccgaatcattaagataccgcttggccactgcatacattccgatagcacaaacgtcaactaccagaacggaaatcactcgcattacaagcaacagcgcttcaagcgcttgtcacaaagggaagagccttgtaaatcccgagttcaacgaagaacaggaggtagttgttaggggaattggaaagataggaagctccgtccaaccctttgtccgtaatgacttgcggattgacgacatagtcaataacccattcggcatcaaagcccgttgccggccctaatgcgaagaacatcacgatttgccagcaaatcacgatgacgaaaagaatccacttatacctcaccatcatatgccagatgccacgaacggcctgtctcacttttgcaaacaccgataccgccacaatgaatacaagcagaacaaccagcaaaatcgttgaataacgattattcccactcacatcaatgtcaatcatttgtggcgacgtcgccctgatcgcgcagtaccaccaccacagcatcataacgctgaggcaaaagaagccggaaccaatcagtatccgtcgccatccggtggtcatatcatcgacggtttcactcatatgtttatgtttaattgtcatcattggctccaatccacaaaacgaaagcacatacgaattgaggccggcaatagtcacttagctatattgccgacctcaatcgagctgcagacaccatccgattcgaacgaaaagacgcctcgtcactgaatcatcttgaattgcagagcgcggtcgctcaacaacgcgtaggtcttgttcctgttgtttcggacagcgaagaagcaggaattgtcgtcattggtgaaggcgatcatatccgtcctgttggggtcttcgggattgtccagacgcaacgagacaagcagtttgaaatcactgttgttgaagtcgctgaccggaatctcaaaaccaacacgttgccgtccacgctgcttcatcggcaccgaacccgaatcgcagacgacgccacctcgtttcgtgtcaatcaaagaaatggccagatagaaggaaacatcctccgcgaactcgtattcgacatcgaagcggaacggttcaacaccatccgacagctggttggaaaccggccagatcttcaggaacggaacacgtgcattcagaccggtcggatacgcattatccgcatcgtcttccttttcggttttcttcgttgcgaaattctccaacgtgtaacggtccgccaccacgtccttatcaccacgctcgatgatttcgccgttcttaatcagaatggccttattgcagtacttcttcaccgagtccatgctgtgcgtcaccagaatgaccgtcttggtcggatccttcttgacctcagagaagaagttgtcgcacttgcgttggaacgcctcatcaccgacggcaagcacctcgtcgagcacaagaatgtcgccctgggctttgatggccacggagaacgccagtcgcacctgcataccgctggagtaattcttcagcttctggtccatgaactcgcccagttcggcgaactcgacgatatcgtcatacatggcggcgatttcgtcacgggtgaagccgagcagcgcaccgttgagatacacgttctcacgtccggtcagttcggggttgaaccccacgccaagctcgatgaacggcaccagcttgcctcggacatccaccgtgccctgttccggcacataaatttgggagatgattttcagcagggtggattttccggaaccattacgtccgacgatgccgaagaagtcgccctgatgcacttcgaagctgatatcgcggagcaccttctgttcggtatagcccttaatgcccttggtccagttcaggaaggccatcttcaggccgctggcctgttccgtcggcagacggaaggatttggcgacatggtcgaccttcagcacgaccggacgttcatccgccacatctgcagccgtggcggcgttgccagtattgacgttattctcaacgacagtcatcagagcacctccgcgaacttggcactatgcttgcggaacacgtggataccgaaccacagaatcactacagacagcatgtacggcaacaagcacagcaaacggttgtccaccagcgtccaaatcgtcggcacgtcctccggtgagatgagattatgtcggatatccatgatcgtctgcgtggttggaaccaacatgagcagcttggtcacccaagccagttcaggcgcacgctgggtgatcatcgtaatcgggtagatgataggcgtggcgtagaacatcgcctgcaaaacgacttcccaaatatgcgcgacatcacggaaatacacgtacagcgtggccaacaccagagccacgccgagtgcgatcgcatatagctgcaggatattcaatgggaccagaagcacatgccacgtgtaatgcgcattggcgaagaagccgaacacgatgacgaccagcaggttgatggccagggaaatcatggcgcccatcgtggtggaggcgacgatgatgtagttggggaaatgaatcttgcgaagcagatcaccgcggttcacaatcgcggacatgcccatggatgtggattcattgaagaagctccacaggcaggtaccgcataacagcgagatggcgaagctcggtgtaccgtcggagaacttcaggaatcggacgaacaccatgtacatcaccgcgaacaacatcagcggcttcagcaccgaccacagtactccaaggaaggaaccttggtagcgcaactggaaatcggttttcacaagctccttgaacaccaccagtgagtaatggtaacggtcgcggagtctgtcccatgctttcttcataaacaccttattctactcagacaggggatttcccgactttctccgccgaatccacctgccactcgtctctatcgatgcaaaccggagcgtactttcttcagcaccgcatatgccgtgcgaatcggcacccaagcggctttcctcaaccggctctgcataggtttgggtagcgggtaagtcaccgcacggaacactttaccgagcgcaagatgcgtcgtacggcgcagccggccaacgaacgtcaacgacgacctcaggctgccgaggctctccatcacgctttcgccgcgtcgcacgccactggtggtgtccatgaagccctgcgcggtgtagtacagggagtccacttcgatgcgtgcgtacttgtcggacatcacccatgcagggtaatacccctgcgattgggcgatatagccattggcccgttcgatggcgtgcgagatggtgccatcgacacccatcttgccttccggcaggaagtcctcgtaccgccacccatattcgtagaggggcttcaacgcttccacacggaaccaatagcacgatccgatggcggatacgctgggcttgcgttcatccagaggaacgtggatgtgaagcttgttttccagcagatccttggtgatgtcgaagttgatgccccaatcgtgcggcaccgtatgcgcgaaataaagggcgtggataggcggcggcggagtcgccatacccaagcgcggattattcgcgaacaacgtcaatatattccgcacataatccttggagccgagcgtgttctccagcagcttgtaggcgaatccttcggtctcggtcccctgatgcccgttctgctggttctgcccggacttcttgtcgtgcgcgaaaccgacgacatcatattttccaccgagaacgacgtctttcgctccgacgagcagcgccgacacgtcacgaccgcggttttgcaccgggatgaaatcgaccgtatgagtgaagccacgcttatccattgccttgcggatgtcgtcgattttcgactcattcgtcgtgatgtacaggtcggtgtcctcaggcagattggcaagatatcccagcgtctggtccagcaagtcgaggaaatagacgtggtagatgaacgccgaacgcaccggagcatccccgtcctcacgaggattgacggtacgggtcggcaacacgtagttgagatgcacggcttttgcgatatccgcaatattgtatgccggcagtaccgcgtcccatatcagatcggtgtcgtaatcggtatgccggcgcagatactccaacagttccataccgggctgaccggcggtctggttgaaatagtactggtattcaacgaagaaggaacgcttcttgaacaccgggcatcggtcgtcgcgaatcagggaaaccgggtcgtacagcatcggatacgtcgaacgcgaccggtacttgtcatagtcgatatatgaggcccaggtaaatccaagatcggcgaaccgtttggtgaacgtcatctcatgcttacgtgtcgcctccgcgtagtcttcatacacgggcatggtttcccaataacgctggaacgctttggaagtgatcagggatttccgatacgcatgccaatatgattgcagatgcgtcggaatctcctcgccgaaggcgacgtcgtgcggatatgcggtgatgccccagaaatcaacgttcttgccgtccattgtttcgaacatctccgagaacggaaaaaccggtcccagaatcgtatcgttcaggcagatgacctcatcgtaggcggcaagcttgctccacccgattgaaagcagcgcttggcggtatgcggcgatatcaaggcccttgttctcacgaacgatgatcctatcagcgaatcgttcaagcctcttacgagagtccgcgtccagttcgccgttggcgacgatgaccagctggtccagtgatttcacgagcttgctcaggaaataatccacgtagcgcgctacatgaccgtatttggcgtagatgcagtaaataccgcatcgtttccattgacgtcctttggatggcacagtcatatctccgttccttttaacggtgaagaatccgatgcgcggcacggcgcagtaggttacgtcgttcgctaccttccgggaacaccgcatcaaccacacggcgaatgggcgttcctgttttcaacacgcggcgttgctcttccagctggagttgctgccgatatcgctcttgttgctcggctattttcgcctgtttgatttcgaactcgtgcttgtccagtttccctttcaacgcgaggaaaccgttcacgcgttgctgaataaccgtatcggaaatgccgttcaaatccagactgttcagcaacgtcaaccagcgacgatacggatccgcatccgacgggaccgcatcatggtcgacgaaccactgcgcacgtgccgtaagagaatccaacaacatgtaagcggtattctcatcaccccaaacacggcgcagcgaacgcataccggcaatctgatcggtctccgtcaacctcatcacccattcacgtcccacgattccaagcaccacatgcctgtaccattgcgcgcaacgagtcatgttgtcgtcaccggagtcggccgcataccgcagcacagcattcatggaggaatggattcccgtatggccatgctcgaatttctgcaacgtctcaagaccggaaccggacaccccggcacccagattgtagcgaagaccacggtattccatgaagaaccgcattgttttcgcccgtgaagccaatacgaagaactcgtatgaatcctgcatgcgtccaagcggttcatcatacgttgcggcgaatccactacgaacgaattcgccgtcgaacatgcagtcgataagactccacgtgttgcgggttccgaaatcttcggagaacaccgacctcagcacatcctcaccatgcatgtcttcggtatgtagattgaacgaccgctcctcctggagcgccgtatcctgattggccgaaccgtgggggaccacggtacgaccgaatcgcagaatatcgaaattccgaccggacgcatatgaggaaagcacttcgcatgcggtatcctgcagacggtcgtcaccatccacgaacaccacgtacttaccggtggcatgggagacgcccgtacgccgggcaagatgcgcaccctcatttttgtctttagcgatcaacgagaagcgtgaatcattctgtatcgcggattcgatgaccgatttcgtggaatcggtgctcgcatcgtccacaacaacgacctcgaaatccggattggtctggttttgcagactctgcaggcaatcggcaatatatcgctcgacgttatacgcaatgacgacaaatgaaacggtgggcatacttcttcctccgtgcgaaaacttcaaacggcttcaggcagctttcggcttaacgatgatcttgtcgtcggccacatctttgaggtgcttgccgtacgggctcttgccgtacttctcggcggcctcaaacaactgttcgcgggtgatccagccgttctcgtaggcgatttcctcggccacggcgatgggcaggccctgcgcgcgctgcacggtgcgcacgaactcgcccgcctcgtacagggagtccattgtgccagtgtccagccacgcgtatccgcggcccagcgtacgcacgttcagcgcgcccgcctccaggtacatcttgttcagatcggtaatctccaactcgcctcgcgcggacggtttcacctgcttggcaaactccaccacgcgctcgtcgtagaagtacaggcccgtcaccgcgtagttcgacttcggatgcttgggtttctcctcgatggacacggccttcttgtccgcgtcgaactcgaccacgccgtaacgttccggatcgtccacgtagtagccgaacacggacgcgccctcgccgttctccgccttcgccttcgccttgcgcagcgtggcgcccagtccattgccgtagaagatgttgtcgccgagcacgagcgcgcacggctcgcccgcgatgaactcctcgcccagcaggaacgcctgcgccagaccgtccggtgacggctgcaccacgtaggagaatttcacaccgtactggctgccgtcgccaagcaggcgttcgaagttcggcaggtccttcggcgtggagatgatgagaatgtcacggataccggccatcatgagcacgctcagcggatagtagatcatcggcttgtcgtacaccgggagcagctgcttcgatgtcaccgtcgtcaacggatacagcctcgtacccgagccaccggcgagaatgatgcctttcataaggacctgctttcttcacagtcgtaatcagctcacaccagcttagccaagacagtggcgaaacagaaaaccgcgcaggtcattctgcgcggttttcacactgacatcaggccgtcggaatgggctgacagacctttccggtttgccctatctgtcctacttgccgagttccttgctcacgtatgcttccaaggtttcctcccagtcggcgggcgtgtagccggcggcctcgatcttggacaggtcgagcgcggaatgctcgggacgcgggctgaccggcgacttcgcgttcgcgaagtactcggccgtgctgatcggcttgaccttctccccgttgccgttcgtcagttcgaacacgcgggacgcgatctgcgcccagttcctcaccgcgccggaaccggtcaggttgtacgtgccgtactgggcatgcgagtccagcaggtggaagatcgcctcggccatgtccttcgtgaacgtgagacgcccgtactggtcgtccaccaccgtcacctgctccagctggtcgtccgggttcgcgacacggtccgacagcatcatcatcgtcttcacgaagttgcggccctcaccgatcacccagctggaacgcaggatgtagtgctccggagcgttcgccaccgcgatgtcgcccgcagccttcgtctgcccgtacacgcccaacggcgcgaacgcctcatcctccgaatgcaggtccgcggtgccgtcgaacacgtagtcggagctcacatgcaccagcgtgatgtgatggtccttcgcgaccctggcgagcaaagccgggccctgcgcgttcgccttccacgcggttggacggccctccggggtttcggccctgtcgacggccgtgtaggcgcccgcgttgatgatcgtcccgtacaggctccaatcgtacttgtcgtacgcggccgggtcggagaagtcgaactcgtcgatgtccgtgtactcgaaaccacgcagaccatgcgcctccgcgtacgcgcggaccgcacggcccaactggccgttgcagcccgtcaccagcgtgcgcttcggctccatcggcttggcgtcc

SEQ ID NO: 1964 - DNA, 16040 bp, Unknown
  R17_18m  MAG No. k141_15200
agtcagcttcgctgccagcctccgccagctccgccagcgggggcatatctgccgcaacagtccgcgggaccgttagcgtaacggctcagcatgccggtgcgcgtcacatgctggattggcgggtcaatcagacgggctcgcaagtcgcgatcatcggactgggcaatgcgtatccgttggcggagcagacggccgccgcattgtctgacgattatggcatcacggcaacggttatcgacccgcgccagtgcacgtcgctggattcagacgtactggagtcgttgcgtgatggccaccagcaggtcatcacccttgaagacgggcagcttgaaggcggctggggcgagaaagtgaccgcatactatgcgaatcatcatgtctcggacggcagccgtaatcctcgtgtgctgaacttcggcgcagccaaggaatttaccgaccgcgtgtcgctgggcgaactgaacgaacgttatggactaacggtggagcaggtgacagaggcgatcactcgttgtttttgatggcgtctagggccgggattttaacggctttattggccgggccgaagccgaatagcaagccgatcagcgtggaaaacagcacggcgaacaggaacagccaccacggaatcaccgaataacgggtcacattctcgccaccaactatcgcctgccagagtatggtccagatagatgttccgccaccggtatggtcgccggagcccccgccggcaccgctgaccataccgccagacataccgccagacatgccgccgctcatgccgcccgcatacaacgcgccgacaacgttgatgcccagcgatatcagtccgctcagcacgcagccgatcaatccgccgaagaatccgatcgcgccggcctccgcaagaaacatgacgcgaatgtcacgaacgtagcagccaagcgccttcataatgccgatctcgcgcgtgcgctcggttacggacataaccattgtgttggcgatgccgatggccgcaaccaacagcgaaaccgcaccgataccgcccagaatcagctgaatcgcgcgcgactgttcttccaacgacttacgcatgtcttcataggaggaggtctcgtagcccaacgctttgatctgtgattcgacttcgggcacggacttgaggtcggcggccttgaccagcacttgatcataggcggtggcttttttggcggcggctggatcgactttggcggccagttccttcaacgcctgcaaatccatgaccagaccgtcggaggtggcatagcccttgttgtagtcgcccgccacaatgccggaagcccgcacatcgagggtgacgttttccgactgacccgcggcgctgccgcttgcgccgcccgcgccgcctgtgccgccgccaccgccgccgtacatgttcatgctgtactggtcgccctgataattggtgccggtggtcagactgatttgcgtggtgagcgggtcgaagaacggatcttcgtcctgatcttcctcgcactggccggtggcctggttaaacgtgcatgaggaatactgaccgccacgtgtgctggtgcgttgttcgccgttcttcagggtgtccatgaaaccataggcgaaccattcgccggcaagcacctggtcttttttgaccggtttctcgccaccgacgagcttgtagcccatctggtcgagctgggtcatgtcgatgcccatgatctgcacgtaatcatagatgtaacggccgcccgcgccggctctggccgtcacgttataagggaagttcatcatcggcgtcacgccggatacgccgctcatcgcgcggaaggattccacggccttgtcgtcgagcttggtatcgcccatcttggacgagccgccatcgtccatcggaccggcataaccgttggtgtacacggtgacgatggacagatcgcccatcgatttgaacatcttctcgttctgctcgttaatgccttggcccaaagagaccatgagcacaatcgagcagcagccgacgataacgcccagcacggtcagaatcgtacgggatttacgccgccataggttttgtctgcagagccgcagtatgtcgccgaatcgcatggtcgggcctttcaggccttgtgggatgagccggctggtgcgactgatgaggctggggtgactggtgtgataggagcggtgtctgccgcagcaccatccgtcacgccggtatcggtcttatcatccttgccttcggaccaatcatcccagtcctcatcaatatcgttcttcttggccttctgcttgcgccggcgacgcaccagcagcacaatcaccacgataatgaccacggcgatcacgacgatgaccacatacaccagcaccggcaatccctgattggcgttctggtccatgttcggatcggccatgccggaatcatccatcggctgcatatcggttacgggtatggtgagcgggaattccttggtcttggtctgtccgtcggaatcctcgtacgtgactttgagcgtggtcttcagctcgcctgacgcgtgcggtgtgaaggcgtaaccaatcgtgccggtggcgccggaagccacattgcccacgtactgggttttcatcgtggcatcgaaaccttcgccctccatcgtggcctcgacgttggcgatatcgcctttgcccttgttcacatattccatcgtgaccgtgttttcctggccggcgatcacctggtcgggcactacgggatcactgatttcgaaccggtcaggctgactgatcggcacggaaatcttgacgtcagactggcttgaggagcgggcgctggcgtccacatactcgtatcggaagttcacggtcacggactgggcaccgcttttcgcggaggcgagcgcctgcatcggcacgctttgcgtcatggcgtaaccggcccacagcgcgtcgacgtagaacgtgttcgtgcctcccgcgatggcgaagctctcgccgccgtccacggtgacgaccatgttcgtcaccgccacctgccccttgttctggaaggtgaagtcgagattgaatttggatccggcggccacggaatcacctccatacgcgaagttggtgatgatgatgttgggcaccggtccggcgatcggcgcggaatcgccgtcgcttccctgagacgtactgttcgtgccgcttgtgccgtctgtgccgtcgaccgcgtacgcctgatgcggaagggagatgacggcaagtgccagtgacagcgtggagagcaacgcgacgatgatggcgatggtgtggtgggagaggtgcttcatcggtcagttccttgggttctatgggcggacggcgtggacggtgtagttggtgtggttggggcggacggcgtggacggaacagttgggcgggaaaggtcggtgttgagccgatcgctggtgatgcggccatcgagcaaggtgacaatgcggtcggcgtatgaggccatctgcggatcgtgtgtgaccagcacgatggtctggttgaagtcatgggcgaatgcgcagatcatcgtcatgacctcggttttggttttggagtcaaggttgccggtcggctcatcggcgaacaccacctcgggcttggtcacaaacgcccgggcgatgccgacgcgctgctgttggccgcccgacatctggcgcgggtaatggctgagacgatggccgagcccgactcgtttgagtacgccacgcgccgcacgttcgcgctgttccttgggcacgccgcggaacatcagcggcattgccacgttttcgagcgcggtcagattgggcagcaggttgtacgactggaatacgaagccgagatgcttctggcggaaggccgccagctcacgctcgtcgagtttgctgacgggtacgccgccgattctcacgccgccgcgcgtcggtttttccatgccggccaactggttgagcagcgtggatttgccggagccggattcgccgaaaatgcagcagatctggccttgcgggatactgagattgacacggtcaagcgccaccaccgtctcatcctcgacggggtattccttgcgtaggtttcttacctcgatgattgctcgcggcacgggcccttcttccttcgttcgtcgccattggcggacgcgcgatagctggttattatccagcacatctcaagtcagtgtataaccgttatgcaggagccgcaccccttaagggtgttcccggatggcagtgataagcatataaccgctgatctcaaggtcgacagttcaggctccagacggacccagaccggcataatactcaaaagcccctggcccccacagacgatgagggaccaagggtttattgcatcgtgaccccggacgggctcgaaccgtcgaccttgagattagaagtcacatgctctatccagctgagctacggggccaaactcatgtaagtctagccgtaggggtgtaaaacacctcggcgtaacgtcggcttgcaccggtaccatcggcgatatggggacaacggagagcaacgtagatcacgccgcatcgggccagaccgtcgcaggcgatagtggtgagctcactttcacatacgcacagggtcgttttgccagtgaaggcagggattgggaaagcccggttgtgaccaacatggctgcatccgtctctgccgatgccggcaatgcccccgccggcagcatcaccaacaccggcgccaacaacaccttcaccagcgccaccgaatcgtcgcttgccaccctgctgtccaaccaatgcccgttcgttatcaaggccaccattttcgagggcaatggcaaaaacgccattcgcgaacgtcacacattcaccggctcggtgctgcgccagctcgaccaagccagcgccctgctgaacggtatcaacgaatccggccaatacccggccatagccctgcgcgaagcattggtcaacgcactggaacatcgcgattacacgtactccggccccacactgatcaatatcttcgattcccgcctggagatcgtgtcgctcggcggcctgaccgatggtttggaaatcaacgatctgctcaacggcgtatgccagccacgcaccccgcgtttggctgaattgttcgccgatttggggctctgcgagaactgcggtaccggtatccaacgcattatggacgcctacgcgcagagcgcggtcagtccgcaactgcgcgtaggccccacttcggtggcgatggtgctgcccatcccggtctcggccgaggccgcatccttgcatcggaccgataccgatgcttccgccgcgcccagcaccactgacgaagcgcagcgcgccaaaatgtattcattccccacgattcagcgcatgacggataacgccgcagatgctttggccggcgcacgcatcatcggctgcgcgccattgcagacgctgattctcggcagtggattcggcgagcgcccggacggtgacgaccaggtcagtacccgcccgctcgatacagcgacgctggaaccgtcgcctcaaacgttggagcagttcacgctcaatttcctcgcgttccgcggcgtgaagctcagccgtaaaaccatgcagaaagcgcttggcctgaacaaggatcagatgacgcagctcttggaccagctggagttgagcggcaagatcgaacgtcatacgcacgccaagtccactacgtattcgctggcacatgcctcaggacggtaacgaccagagcggcaacaaagcggcaacgaccagagcaatacagcccaaggcacgataaagcagcagctcagttctcgaatacgcgatcgcgaatcatgcgaccggattcgtcgagcgcggtggagaaacggccgtagtcggacagaatcacgcccatgtacagcatgtccacgagcgcggtatcggccacacgcgagaaaatcgcattgccatagatcgtgtgcgagtcacgacccgtcagcaacgtcacgtcggcccagctggccagcggcgcgccgatggcattggttatggcgatggttttcgcgccatgcgatttcgccaatcgcaacgctttgaccgtatccgccgaactgcccgaatgggagaaggcgacggccacagcgccgtggggcaggtgcccggcaccgatctgctgcaggtaagcgtcggtattgagacggcatgtcagtcccaggtagccgagcttggtgaacagatccatcgccggtgtcaacgagttctccacgccgaaaatatcgatgaactccgattcggcgagtagggcgaccgccttgcgataggccttggggtccaacgcactgtgcagctcatcgatcagcgccttcgcgacataggccgctttgccgggaatctcatcttcgccatcccacggattcagatcgaatccagccaacggattgaaggtcactttgtgctcggcggacggatggcgcaacacgtaccgcagttcacggtaaccgccgaaaccgagcttgcgggcgaaacgaatcaccgtcggctggctgacgtgggcgatgtcggccatctggccgacggtcaggtcggccgcctcctcgatatgatcccgaatatactgggccacggcgcgctccgccggacgcagcgacggatacacgtggtcgatgcgctcgcgtattcccaccgaggattgcacagccgcgctcctagtcgtccgtattttccattcctgtttcgagggtaccggctgtataccggcgaacagtcgacttggattgaccgcaacatgaacggtgagcgaactcttccgtttacctttccgctccattccctctacaatcaaaaccatggtgcggattagcgtgggaagccccacccatcacacaagcgggcggctgtacggcgtgttcttcgaggacatcaaccatggtgcggatggcgggctgaacgccaacatggtgaacaactacagttttgacggcgtctatctcgaccatcacacgtggcgtatggccggcgccgaacgatggtgtacacaggccgattccctgcgtttctgggatttcatcaactgttccgccgccagcctcggcagtgagatacgcgggattcacggccagcgggtgaccaccgactgccccgccccaccaattcacgcacatagccgatacgctcgcatcacgtccgatgttccttccgaaaccggccctgcatatctggaaaacctcggctataacggaggcggcgacaacgggggcgagcccgcgttctccatcgccgccgaccacacctattccgtcagtctcgcggtacgtccggttcatgggcgggccaagctgtccgtcggcgtggtcgataggtacggtctgccgctcaccagcaccactcgattgtcgtatatcgtggacgcagatccgcttgacgatacggaagagaccggtctgaggcaggacgatggtgccaatgcgcaggattccggcgtttcgatcagtccggattcgtcggatggtgccatcgccatcggccgtgacggctggtaccggttcaacgccgacgtaaccggcctgaacaccgattacggcaagctgcgtatcaccattgacgccggcgaacgcaccacgttcgatctggatctggtgcagttcatggatgcggactattggggcgcgggcgacccgaaatggcgttacggcaagctgcgccgcgatctggtggaaaccattcaggcgttgcatccagcgtttctgcgattccccggcggctgcatcgtcgaaggtgtgacgcccggcaatgaatatcgctggaaggataccgtcggctccctggccgcgcgacgccaacagtattcgatgtggtcgttcaagatgccggatggttccagctattcgcagagctatcagatcggcttctacgagtatttctgcctgtgcgaggacctcaaggccaagccgctgcccactctgttcgccggcatcgcatgccagtcgcccggccgcgatccgcgccacatggatatcaattcggccactttccgcaacaatgtgattcaggactacctggacctcatcgaattcgcgaatggcgatccggagtccagctcgtgggccgcggtccggcgtgatatgggccatccagaaccgttcggcctggacatgatcggcgtgggcaacgaaaacttcggggctgactacgtggccaagtttgacatgatcagcgaggccattcacgaacgatacccggatatgctgtgtgtgatgagcgccggactgttccccttccagccgacgatgaaacgcagctgggaccatgcgcgagcgttggccgcaaccgattccggggcacatgattccgccaccggtgacgcgattatcgtcgacgaacattcttaccactcccccgaatggtttgcataccaagcgtcacgattcgacgcttacccgcgttgcggcgccggcgtctatttcggcgaatattcagccaacggctattttgccggccaaccgcagaccgaacagggcgcgaacacgtggaagtcggcactcggcgaggccgcgttcctgaccggttgcgagcgcaattccgacgtggtgcgcatgacctcctatgcaccgctgctcgcgcatatcccggctaaggggtgggcgcagaatcttatcgaactcaatccggcgcatgtgaaccccacggtgaattatgaggtggagcggctgttttccacgcatctgggcgacacgacatatgccgtgtccatcgagcagaccgcgtcacgccccgccaaacatctgtatgtcagtgccaccgggcatgacggggatgacgcctgccgttacatcaaaatcgtcaatacctccgattccccggtggatgtgacgttggaaatcgcgcgcggactggccgggctgggcgcctcgccatcgcgaccggtgcgtttggaggtgacgacgttaagcgccagtccgacggcgaaaaccactatcggataccgcggcgaggcttcgggggcgattgtgccggaacgtcgggcttacacattgccgtcgccgtcttcattgctggcgatgaagatcaagccgtacagcgtcacgctggtggcttcgcgctgattgacatcggccattaggccgattcctttgccgttagaatcaccctcaaggatgagggggaatcgtgcagattcagggaataataggggctatcccccatagcgaatacaagcacgggagggcaggatggaaaccacggcggccagaagaccgccggccaacgatgaaggagtatgcggtatgtttatcaatctgttccgcaggcagcgccctgcgctcgcccggctggcccgcaactccaacgcctatcgtcagccgatggttgcggccgtatcatcgtccgcagtcggagtatccagcatcacctctgcatccaccacagccaacacagacggcgtatccggcgtatccacgctggatgccaccatcggccgcattcatgacatcccgcagtcggccatgagccgactgaccggctcccccaccgtatacgcgcggtagactggcccaacccacaacggcggctcagagactcggctcgatgatccagctcaaggtcagcaatacggccaaaaacagaacgttgacggcggagtagacggccagataccggcctttcttgtgcgggtattggcgcacgacgttcttgtaagaaataagcgaggccatcgaggcgatgagcgtacccatgccgcccaaattggtgccaatgatcagatcgcgccattggtcgcagaagccggagagcagaatcgtggtgggcacgttgctgatgacctggctggagccgaccgccacttccagcggatggccgccgaccagcgagcgcgccagttcgtagaattcgggcacgcgcttcatgttgccgatgaagatgaagaacatgcagaaggtgagcggcagtccccaatccacgtatttgaatacgcgccgatcggtgaacaggaacacgacgaccacgatcacgcacatcacccacaggggaatcacgtcggagacggccagtaggcagacgatgaacagcagcgagtagacgatggtgcgccagccgccataaccggcgccgtagccggtgatacgaatctcgtcgggctggtgtttgttgcgctcgggagccagcacgccggtttcgaggtcgcccaggtcgccgaccggtttgccgccaaacaccacggaaatcacgatgaccagcaacacggccgccgtgccggaatacggtgccatgatgccgaggaattccatggtcggcatgccggtcagggctttgagatacaggttgtgcgcgttgccgatcggggtgagcatactgcccacgttcgcgccaatggtcatcagcgtgaccacgaggatggtcttatcctcttgcccagccatgatgagcacggccaccgcgaacggcacaaacgtgaccagcgcaacgtcattggtgatgaacatcgcggaaaagaacgtcaaagcgacaagcgtaatgaccagtccgcgcatggtgctgaccttctccagcaatcgcgaaccgatgatgcggaacacgccgatacgctggaatccgcacaccacaatcatcaggcagatgagctggctgatggtgctggcgtgaatgtagcttttgtaatcggcgtccggcggcacaatgaaacacgaaatcagggcgagtattgcggcgacgatgagaatcgtctcatttttggctacattgatcagccagcgtcgcatccattcctccgtgaataacccaatatcgcagccgttctattctacgcgcagaccggcataaggtacgtagtcgcgttgcgctggcggacatgagtttttggaccggtgccgcgcaatgctgtgcccgtatatacggctgcatcattgtgtggcaggccagacacgaataccgtacgtgactggctcaaaccaatggaacatagtttcattcgaggaagaggagcgatgaagttgcgtattaccccagtattcccggtcaaacgtttcgccgccgtgtctgcacagaacgtgaagaacgtgcagttcgattacacgaacatgcccacgtacaacacgatcaccaagtagcgcgcactgccgcactgatcggcggcacttgccgcatacatgaatggccggtgtgctgcggattccttaccaagaatccgcagcacaccggccattatgatatatgccgcaatacaggggggcaatcagccctgcaccttaccgccttgcgcgctacggtatccgaagttcatcatctcgctgttgtaggcgaccacgccacggccgaccgccggcagaacgatcatgccaccatcgccatgatgcgcggcgacttcgtccaaagtggccgtcgcggcatcctcgacgttctcgccggcgaaacgcacacgatccgacacctgatgggcggcgaccaccttgatgaacgcctcgccgatgccggtgcaggacaccgccaccgtggactggttggcgaacgtgccgcaaccgggcagcggcgaatcgcctacacgaccgtgcatctggttggtgatgccgccagtggacgtgccggcggcgatattgccttcggcatcgcgcgccacggcgccgatggtgccatgcttctcccactcatcgccaccggactgagcctcggccaaagactgacgacgctgttcggtgatgaagtactcgttgctttcggtcgcgacgccccaatcggcgatctcggcatcggtcgggtccgcgaacagcacatgcttggtctgctctttgacggcacgcgccgcatcgatcgggttcttcacggtgcttacgccggtgaccgcaccgacctcgccatcgccggtcatcaggcaggcgtccatctgggcgatgccatcgctggtcagggcggcaccacggccggcgttgaattcgggagcgtcttccatgacgtggatggcggcgaccacagcctcatgcgccggtgctccggattccaacaactggtatccggcatcgagggcgcgctgcagatcaagttcgacctgggcgatgcgttcaggcgtgctgcgcttgccacgactgcccgctccggcgtgaatgataagcgtgatgccggtttcgctgcccgccagttcagtggtcaccggagaaacggaggatgtggtcatatcgtgtccctttctggagtcagatggatgtgctgacgccaacgtatcgttgcttccgcatgtatgatagccgttgatggccgcgaccggttccgcatttcgcatcatcggctcgcgatggcgtgactcgttactgcgccacctcgccactacgccaggggcaatgcgatgccggctcgatcggccaggtcacgcaacgaccacgtggtctgccccgttcgcccgacaacgctatgcgcatgccacagcgaactgatgatggcttcctcgcttattcattcgtcgaatgcacccatcgatgtgggtatgcagccatcaaaaaactcgacaaccgcaatgagccagtcacttggctacatctgtgctatcgtctcgccaatgattcgaatgccggtatcaatgtcagcagcatccgggcgcacaaagttgagacgaatatgggaatcatccatttcgtcaacgtcgaacacgctgcccggcatgaacgtaacgccttgggaacggcaggattccaatacatccagagagcgcacgccgtccggtaaggaaacccaaatatagtagccgcctgcaggcacggtccaatacacttcatccggcgcataccgctccaatgctgcgattgctgcatctcgtcgaatgcggtaagtcttgatcaaaccgcgcaaatgttcggcgatgcggccttctttaagcagttccagacagatgcgctgcgatgacgtgctcgtatgctggtcgaccatgcgccgcagagccgccagccggttaatcacatgcgggtcggccacaacccatcccgtgcgcaggcccgaagtgacggttttcgagaacgtcgacaaatacatcacgtatcccgcattctccatgcccttaagcggtatggggcgatgtgcgtcggacgattccccgccgtaccacaaatcgccgtaagcatcgtcttccacgatcagacactgatagcgccgcgccacgtcgatgagttcgctgcgtcgttcgggcggcagcgtggtaccggtggggttttggaatgtcgggacggtgtagatgagcttgggccggaatcgcgcgcaatagccgtccaacaggtctgtacgcataccgtgctcgtccactggaacgccgatgatgcgcgcatccgccgagcggaaggtctgcaatgccgggaagaacgtggattgttcgaccagcacgcagtcgccggggttgatgaacgcgcgcacgatgaggtcgatgccctgctcggagccggagagcaccatcacgttgcggacgccgcattgtacgcctcgtgtgcgcatatgttcggcaagcagcgcacgcaactcttcgaatccctcgataggtgattccggttggccgtcgaattcccgcgattcgaacgcctcgatgctcaccttgcgcagcagatcgtccgggatatccgccgggttcggcgaaccggtggcgaagtcaataatggtgtcgccgcgctgcgcccgctcggccgaggcgatgtcatggtaggtaaaccggttggaataatcagagaacaacaccgaccatggcggacgcacgacggttggctccgggccctgaaccgagcggctttcacgaatcgtatggaccgccgcagagctgctgccctggtccgtcgtcaagaaaccagtggaggtagcacgttctacgtcgccggaagaggaggcttgcgatgttcccatttctgccgacgatcgtgttgttcgcgttattgcattcccgaagtcactgtttgacgtgtgcggtgttcggcttgcggaggcagccggcagcacgaacgtgcctttgccgactttggaggagataagaccttcgtccttgagctgctgatacgcctgcaacaccgtggtgcgattgacttcgagacgcgaggacagctcgcgttcgggaggcaggcggtagccctcggccatcgcgccggagacgatctgttcacgcagctcggcagccagctgccggtacatcggcaccttgctgcgtcgattcagctcaagctgcatagcagatcgtctccttgattcgtcagtcggataccagtctaacggcagacgaatcgactacagcgacaggaagagctcgtggatgcgggtatcgtccgtgagttccgggtggaaggcggtggccaggatattgccttgacgcaagcccaccacgtggccatcgacttcggtttcgaccgtggcctcagggccgaccgacaccacgtacggtccgcggatgaataccagtgggaagtccgtgatacgctgcggatcatccgctgcaccaaaatcggcggtggcctggaaactaccgagctgacgaccataggcgttgcggcgtacgacggcgtcgagcgcgccaaagtagacattgtcgtcattgtcgagctttttagccagcagaatcatgccggcgcaagtgccgaataccggtttgcctgccttgatgtgggcggcgatcggctcgaacagtccggtcgaatgcaggagcttgccctgtgtagtggattcgccgccaggcagaatcacgcggtcgatggattcatcgaaatcctcggccgcgcgcagcagtttccacggcgcaccgagcttgtccagcaccgccgcatgttcggcgaatgcgccttgtacggccaggatgccggtcacgccgtgcttgacgttttcgacgtccgcggactcttctttggaaatatattcaacagctacaaccatgttgtcctctccggcttcgactcccgtcactcgccgcgagcggccatgatggtcggaatctcgtcctcgttgatgccgaccatggcttcgccgaggttttcggacagcttggcgagcagatcggcgtcctgccagttggcggtggccttgacgatggcggcggcgcgcttggccgggtcgccggacttgaagatgccggagcccacgaacacgccttcggcaccgagctccatcatcagggcggcgtcggccggggtggccacgccaccggcggcgaagttcacgacgggcagacggccgttgtcgtgcacgtacttggccaggtcgtagggcacggccagctgcttggcggcctcgtagacctcgtcgtcgcgcaaggccacgagctcgcggatctgcttgttcatggtgcgcatgtggcgcacggcctgaatcacgtcgccggtgccgggctcgcccttggtacgaatcatggcagcaccctcggcgatgcggcgcagcgcctcgcccaggttcttcgcgccgcacacgaacggcacgtcgaactggttcttgtcgatgtggtacacgtcgtcggccggggaaagcacttcggattcgtcgatgtagtcgatgtcgatggcctgcagaatgcgggcctcggcgatgtggccgatgcgcaccttggccatgaccggaatggagacagcttcctgaatgcccttgatcatggccggatcgctcatacgggagacgccgccggcggcacgaatgtcagcggggatgcgctccagcgccatcaccgcgcacgcgccggcatcctgcgcgattttcgcctgttcgggcgtggtgacgtccatgatcacgccacccttgagcatctgggccagattacggttgagttccgcacgattctgcgtcatgagtttcccttcgttcgacgctgcttggtatcgcgcttcattattgaacggattggattggcccacccaaaccagtccaatttggatggggccaatccgcaacttctgcacccatccaatccggcaaccggttgtatggccttatgcatccggcacgtattcgaagatgcgcgcaatcagtgggaggtattagccgacggtgttgccgtagatttgggcttggaggtctttacgggcggtttccatgcgggtgatctggccgaggagggttatcttctcttcgccgtcgggcagctgggccatgcggcgtttggccaagccgatctggcgcatgaagcccatgtcca

SEQ ID NO: 1965 - DNA, 11320 bp, Unknown
  R17_18m  MAG No. k141_15291
cggcatcgctccggccaccggccagtccggcaccagcatcaagggcgagagaccctccagacggggcaacaaacgcctcaggaacgcgctgtggcagtccttgttcgtcgcgtccgccaaacacccgccgtccatcgcctactacaagcgcaaacgcgaacagggcaagcaccacaacgccgctgtcatctgcctcgcgcgccgacgctgcgacgtaatctacagcatgctcaaaaacggcgtcctctaccaggaaccagccctcgtagcctgaatcgggccacacgggaaaggacgccggacgccaccggcagggcgaagcgcgcccacgacagccaaccggaatcccgacacgtcaactccccaaggagttgacaaaaacataggaacacccccatggcattgtgccggtggcgctggccggtgcggccaacgccgccagcgtggtcatcgacaataccgcggccagaccgctgcacagccatttcctgtgttgagcccgggcagaagtacacccagcgggatcgcctagtgacaatctcatctataatctcctttgacttcttccggcttacgccggagatcaaccgtctgcgtactacttcgtccctaccgatgtgggccatgggatacggcgcttcgcatatcgcgccgtatcccaaatactgtttttcggttcattcgaaccggtgttatccgcggcggcggactgcgaatacgctgataccggcgagcgtcataatcacggcgaccgatagcacgacggtgccatcggaaccggtgcttgccagacgtccggttgcagactgtggcttgttgtgtgatgcgtcaccggaactaggtttgtccgtttcgcctgtgcctggctgttgcggcttgggcttgccgcccgttgcatctgcgattgcggtgttgagcgatgccgtccaggagacaacgtcagctccggtatacagcttgctggtcaggccagtgaccgccgcgtttctggccgtggtcagcgttgtccgcacatcggtatcggttgcgccgtcagctagcaatgcatccgccttggctatggcaccggtaagtgccgtggtgtcgatggaggtcagggaaagttcgagcgtcggatcatatgtgttgctgtatccgtcgttccaatccgcgccgagcaccgccttgttcacctcatacaggttggtggccgctgccacggtttggcgcgtttcggctggaacatccttggtataggacatacggtcaaggaagtggttggcagcctgcttggcgttttccagactcatgccttggctttgtgcgatggccgtcttcgtccaaatcagattcgacggtttgatgtgtgccaaatcatcgtcggaataggtgcgtccgtcgcggtcgagcgcgtagacgaacatgcctccgagattgtggtcgtacgagtatgaggccacatcatagaaatgactgtccaggtatggttcggtcgcgtcgttccaccggttattcatgtcaccctcttcggggaaggtcaggccgggaacgaacttggtcgagtcgataaactgttcgtaggtggcagcggccttggccgtccggttcgaatcggaaccgtactgctggtaggcaacatagtcgaagcaatcagaaacgttcttaaacggagcagtgtagctgccattggtgtcgtaaaggaacatcgtgccttccgggttatccgacttcggcccgatgcgcttggcgagggctgtgatgacctgatcggaaatcgccacctgcgcggcatccgggaaagtttccatatcgatgtcaagaccgtcgaggccaaccgaggtcatgtacgtttcgatgacatgatcggcgtacgcgtcataatccgattcggtcgcgctatcgacgtttttgccctgctgagcaatccacgtcttgaaaccgtcgaccataacaccgctgtaatccaaacctcgtacgagtttgatgcctcgggcatgcagatacggcgcgtaatcgctcttgagcttgtcatagaacggctgggccgccgcttcctggccactgggaacgtagctgaacacattgacgacatcgatgccgtatggaatgtcgtacatggagatccaattgtcatccggtaaatcggtgttcacgcctttcatggtcacgtcacgccatgcgcggtaatacaccatgaaatgcttgttgccgttaccctcctgcgacgccgcaacgggggaatccccctcctgggcgttcgcaaccgttcccatggccagcgaacatccgagcatcagtgctgtggcgactacgcccgccgcgacggcggcgagtctgcgcccgatggacgagcgcccttcactaccttgtgagcaacacatatataatctcctttgttgtttcctctatcgggtgacaacccgcagacttgcaggttgcgaggatggatgccttgcggtttcaggctccatccgggggtgtgatgcggttccagtgcttcgcaccccacattcatacatgccccctaatattcccccggcagcgtcgccgtgaccgtatgcgtcgaatctccatccagcgtgcaggtcacctgaacttgcccgtcaccgacatcccgcagacgatcacacggcacgtggaacgcgatatcgcgacgctctcccgcgttcaagtccatgtataccgaatcgacaagcattgccaaacgtgggatgcggcggccgccgctgacatgcgcgaacagattcacggcacccgcggccccgtgatcgtcagcatgtgccgtcacctgcaccagcacttcacctggatgcgattgcgtatcggcgtgcatctcgctgaacgtcaccgccgccagcgaaccggctccatagccgaagccgcgcaatatcggttccgccgcatccttgtagacatgcgcggcactttggcggtcattgtatcgaacgggaatggctgcgggatatgcgggtaaggtcacaggaaggcggccagacatgtcggctccgtcaaccaatacgtcggctacggcctgcggcccatattggccggcatatccggcccagatcgtcacggcggagcgttccagcacatcggtcagtacatgcgcgcgaccgcacaccgccaccgaaacaattggagcggtggtcaatgccgcgacttcgcctagcatgtcatcctgacgccagggcaggcggatgtcagacaagtccacgccttcgccgcaggtggcaccgtattcggttacggccttcgccgcgccattgtcgtcgaattcactgtcatagctgcgttcgctggtgctgccgcatacgaataccacggtcgacgcacgcgcccattgatcggccggcgcatcgctcggcttggcggccaagagaacccggtcctccccgagacgtgccaccaattgccggtagacgcttgactgttcatcggcgggcagaggggcggtgtaatcgcccaggaagcagccgaaatcgtcggcgaacgggccggcgacaatcacagggccggcttgagcatcagctatgacgctgcggatatcgtcgagcgtggcggcagactggccatcattgatcagcgttatcgcctcgcgggccatgcgcttggcctgctcacgcccatccgcagtggcctgcgcgatggcgtcggcgctcggcatggcaattgcggcggtatcggcaccgtcttcgggcaagagaccgaacatggctttgagttccagcacccggcgcaaggccgtgtcgacagcggccactacctgttcgtcatccgcatattcttcgaggcgggtgaatccttcatcccacagggagacgtccacgccggcgagcagtgcggcacgccctgccgcgggaatggagccggccatgtcttcgagccgatccacggccaggccatcggccatcacgatgccgtcgaaaccgagctggtcgcgcagataatccttgagcagccacgggttggcgcagcaaggtacagaatcgatatcgttgtaggctgccataaagcccaaggcaccggcgcgcacaccggcggccaccggcggcagatgaatttcatgaagatcgtgcgggcccagtacggcggactgtccgttgcggccgcccacggcctcgccttgcgccgccagatgcttgagcaccacggccactcccccgtggccgaccttgctgcgatgctcaccctgcatgccggtaacgatggcctcgcacatgcgggcagccatcagcggatcctcgccgaagcattcctcgcaacggccccagcgtgggtcacgggcgatgtccaaaccggataccaatgcgatatgaatgccgctggcggccagttctgcggcaaccgcggcttccgcttcctgcaccccctgcgggtcaaacgtagcgcccaaacccagattggtgggcagcaccgtgccgcccagcgcctgatgcccgtgaggcgcctcttcgctaagtaatacgccgatgccgtgcgcgccacgttccagcacagtttgctgcaccacggcaatcgcctcagtccgctcctcagggcgtatgccgttaccccaatgttgaccagaccatgggtcggctcgcaatagaccgtacagggtgccgagtccaccccatcggtcaatctcctgcttgagctcgtccgaggccaccagccgtcccgcagcattgcgttccacggacttccaaccgagcagacgctggttcaactggccaactttctgcgtgaagctcatcgaatcaatgagtcggtccactgcggggcaattgatgctcattgagcgctcccccttctcgtatattgtcttctcgttcttctcgctcttcggcgagtaccgggtcttatgttttgccctgcgcactgcaattgtgcgcactgcaattgaaaatatccggctgtggaacaaggagtagatgattccacaaccggatatcggtttaatcagccgtttcgaacgatgggtccgaaaccgcagtgtagtaacgggcggcataggggtgttcgtcagcgtgcaattccagaatgccacgctgcgcgagcgcctcttgattggccgccacctgcgaggtgatgatggtcgggcgctggcccgccacctgcagcttcatccacaggtcgcacaccgagcctcccgggccgagcgcactgcggttcaccgggtttccggcctcatccacatcaatcaccacggcgacggtcttcggctgagccggcaatgcggaacggtactgtgcggcgagttccccgaacgtacggccgatcggcttcagctggccttgctcgtcgaacaagcccagagagtgctcgaagaacgggaagtcttccatgctggcgggcacatcgtgcgagcaccaccacgtcacaccccacaggttccggcaatccatggcacgttcaacggtcttgcggcagaattccggcgtgtagtcggtttccagcacattctccggcgcaccgacttcctggagccacaccgggcgctcggaatccttgccgaacgccttggccagctcggccaggtacagtgcgtacgacgagcactcctcactggtggcgccgtatccttgcgcgatgccgttgaacacccaggagtgaatcactgtcatatcacccttggtggcggactgcaccggagtgaacgggtgcccatcgatgaaccaggtgccatcgttgacgctgtacagcgcgttgtgcccttcaccggcggcggtcggaagcagcgcgtccagccatgcgtcgatctgccggtccgtggcgctcatcttcgtgggatgcggcctgtcagacagctgattgacctcgttgcccaaggtcagacccttgaacgcgggttccttggacagctcatcggtcatggtcttgaccagttcacgctcggccgcaacggcgtccgcatcggtgaacatgttgcccgcatgccaggtgaccagccatgaaggcaggaagtcgaagctggacagatgcccttggaacacgtccacataggcatccaaaccgtgctcgccggcgatgtgcaccatgcggcgcacatccgccacgcccttcttgttgatccaggtgcgattaggttgcagatacggccagatcgggaagatgcgcacatggtccatacccagttcgctgatctgcttgagatcattgtcgatgccgtcccagtccgggtcgagccatgcgtggaaccagccatgcgacggcgtgtagttgactccgaatttcattggagtacctcctttttccagtccgctcagcccttgagtccaccctgttccaggccacggaagaagtagcgctggaagcagcagaagaagacgatgatcgggataagcgagacgagcgcaccggcggcgatcagtcgcggatcttggatgaacatgcccttgagtcggttcatgccgagggtcaaggtgtacttgctttcatcggagatcgcgatcaacggccacaggaagtcgttccaggcaccgacgaatgcgaagatgccgacaacggtcatcgtgcctttgacctgcggtacacagatgtggaagaaccgctgccataggttggcaccgtccaccatggccgcctcttcgagttccattggaatggatttgaaggcgttggtcatgagcaggatgttgatggcgccgcacaggccaggcagtgcgactgccagcagtgtgttctgcaggtggatggagcgaatgatcaggaactgggagatcatcacgccttcgatcgggatgaccatggtgcccatgaacatggtgaacaccagtccgcggccacgccacttcaggcgtcccagtgcatagccggccatcgtggagaagaccacgttgccgaagatggagatcaggcagaccaccagcgtgttgagcatgtagtggaataccgggacctgcttgaacacggaaatgtagttgtccagcgtcggggtcttcggcatcaggtagggaggcacggcgtagacgttgtcgcccttgcccttgaacgacagggacagttcccagacgaacgggccgacgagcagcaggaacatcagaatcagaatcagatactggacgactttgccgacggtgaccttatgcgtgttggtattcatcagtcctcacctcgtttttgtacgatctgctgcacgatgagcatgacgccgacgatgacgagcacgacgatggagatggcgctcgcgtaaccagtgcgggcctggataccggtgccttcgcgcttgataagcatcgacatcgtcatatccatgccgccggggcctgcggagccgttggtcaacacgtagatttcgttgaagactcggaatgcggcgatggtggacagcatcatgatgagcatcatcgtggagcgcacgccgggcattgtcacgtagatgaactggcggacagggccagcgccgtcgagggaggcggcttcgtaaagggattcatcgatgttggcgagggcggtcaggtagatgaccatgtagtagccgaggcccagccagattgtcacgaacatcgagctgaagagcacgccccatcgatcggtgaggaatggaaccggcttggagatgatcttcaatgccttgagcacggagttgaccagaccggcggaatccagcaggttggtccagatcatacccaccacaacggcggacataaccaccggcatgtagaaggcggtgcggaagaagcccatgatgcgggagttgcccttgaccagataggccaggatcaacgggaggatcaccatgaacggcactacgcagatcacgtagagtgtggagttcagcagtgccgtgaggaagtactcgtcatggaacagtttgatgaagttttcgagtccgacgaaggttcccggacggagcagtgtggagttggtgaaagcaagcctgaaagtgttgagtgccgcaaggacgatgaatacaaacacaatcgcgaacgctggcagaacaaacaggtagggggcaatgatggtgccgaagctacgattctgcttcttgccgtggttgaggttcatcggttcaggccggtcggaggccgtgcgggcctccgacctgtcagcggcgagtgccgcgttgctcactgtgcgagcttctcgtttgcgaactcgacggacttgtcaagggcttccttggcggtctgcttgccctgcatagcgagggcgatctgctgctggaagttcttggagccgttgttgtcggtgaactcggatggacgagagccgtagccgtccttgacctggtcgagcgtgatcttcagagccttgccctcaagggtgctttcgtcgatgctcttgtagtagtcgtcatccagaccccccttggcggacgggaacacggaggccttcttgtcgaactcgatctggttcttctcgttggtcacgaatcgggcgaagtcaatggcaacgtcggggtgcttcgagttggcgctgatgccgagcatctcgtaggccacggaagcggacttgccgtcgttgctgatacgcgggccgactgcgaggttcttgtaaaggtccggagcgttctgcttgaagccgtcagcggagtaggcggagccggccatggagaccaggttgccacgctggaagagatcggcggcctggctccaggaggagtcgagggcctccggcgggatgccgcccttcttgtacagctcaacgaagcggctgatctgcttgacaccggcctcatcattgaaggtgtacttgctgtggtcatcgttcatgaaggacttgacgcctgcggtcatcagatcttcggtgttgtaacccatcgtggtgcccaggtagacatccttgcagttctgcacgatggtgtcgccggcggcgaagtactcatcccatgtggtcggaatcttgttcggatcaaggccgcacttctgcatcagctcggtgttccagtaggtcgggccatcgttgacataccacggcaggccgtaggcacccttctcgatgccattgccctgcatggtcacggacttccatgcgccttcgtagtagtccttttccgcatccggagcctgcttggagacatcgagcagcgcgccggccttggcaagaccgtacaggatggagttgccgccgtcgacgatgtccggcagttcgccggccgcagcctggctggacagcttgtcttcgtaaccatcggacggggcgtcaagccacttgacggtgacgtccgggtggtccttctcataggccttgatcagcgcctcgaaatacggggtgtacttgtcgttcttgaggttccaggtctggaaggagatctccttcttgccgccgtcatcccccgcagttccgctaccacaggcagccaccgatacgagcatcgcaccggcaccggcgatggcgaggatcttcttcatagaaaacatgatgttttcctttccttttggttcctttttcaccccgccctgctgtggacggagaaacctaatcgttgtgctccagcacagtcacccgtcgcggtgattgacgtggtatcacaacctttattcagttctcatcgctgagactaaaccgttttagcttccggccagtcgcgaacctgttaactaaatcggtttagtaaaaacataacacaatcgaaacatgcacgcaacgaattcatcgtcgcgtgtcgcattgatatttgcccaacgggatcgctctccctcttctcatacaataatgggccgcgcccaaccgtatggcagagccggtctgttccggttccgttacggttgggcgcgacccaaaatatcgagcctaggcccaatatcccttatcggcgaatacgcagcgtggcgagctggaatggcgccaacgaaacgatcgcaccgtcggcaggcattggttcgtcaccggcgagcgcgcgcggcagttcggcatccagctccggctcctccatgagattcacctcctgcacgctggccttggcatcggagagagcggcgtcaaggcgcagtgtggccgtggcattgccgccggcggcctcgtacaggcgcacgatcagatcgctggaaccgtcatcggcgagcttgatccagtccaatacgatgacgccggtggcgtcggcgagcgagaccagcggcgccatatcaggcaactcccctattacggggctgttaagtcgcgccgcttcgtccagcaccgcattcatatcggcgtcagcgaccagagaccacgcgaaggagtgtgcgccttggtcggtgcgtgggtcggggtacagcggtgcggacagcagcgagagccgcaccatggtgccgcggccggtgccatgtgccgcatcggcgtggatggggctgacgtcggagccgtaggtggaggcgttgaccacagcggcggcatagtcggcgtcggcgatccgcacgaagcggtgcgtgcagctttcgaatttggcatcatcgctgcgcgtgttcttgttgatggggcgttcgaccagaccgtattggcattcgtattgcgcgttcagcgcttgcacggtgaccggcatatccactttgaggaactgttcgacggcatgccagtccacatcggcggtgaagtccagtgtggcggagcccggccttaaggcaatgcccgtacgaatttcaacgcccttcgcgcgagtgacagcatgcacgacggccccaccgttggcggtttcgtccacgcttgcaatcgatgcctcgctgagcgcgttggcggtgaggaacgcatcgcgttgaatatcccaggcgtcccagtggaagggttcgtctttgagcatttcgtagcggcccagtcgggtgccggcgggcaccagttcacgattggttcgctgatcgacgattgacgaaacggtgccgtcggcttcaatgcgcacgtgcagtcggccgttgtcgagcacaatcgtatcgccgtcatgggtaacggcgacccgagccatggatgcggttcccgcttcggctcggctcgaagccgggcgtaccacccacgtctcacaggcttggcgggaatatggggcgattacggcgtcggttatggttgcgtcatcgggttccacgactgcgatcgcgcgcccggcttcaagggcgatctcgttcagccgagcgatgtcacgcgcgtattcggtccgcgcctgacggtgtacccatgcgatggccgaaccgggcagaatgtcgtggaactggttcaggagcagcgttttccaaatacggtccagctcttcgcgcggatagacatagtccgggttcttgatactggccacggcgcacaggtattcggtgacgcgcagcatcgactcctcctggcggcagccgcgcttcatgtcctgctgggcggtgagggtggcgcggtgcagttcaaggtacagttcgcccttgaacaccggggtctccccttgcgcatcgtcgacgatatccttacgcac

SEQ ID NO: 1966 - DNA, 2870 bp, Unknown
  R17_18m  MAG No. k141_15847
acaaacagcgaaaggcccaaattgttatcgtgcgatgatcgaccgcccctttatcggccgggttccgcacctttttcgcgctgacgaagctgctccgtttgccagcgcgaactgtgttctcatgcggccatgcaccgctctgcccccctcgaacgacaccgtttttgagggactggggcgctgcagggccgcatctttagttgtaagtacttacaattttagtgtgagcgttcacttttggaggggtggattccttttcgggaaggcaatcagtagaacgcgaatgttgttcacaggtcgtaagtctcttccccacatggcttcgccgggagcccgtcccgcaatcaaggacgggctttgcccgcagcttgtcggttcgcctatcggctcaccctcgcctacgaacagcccacagggctgttcgctatacggctcggcccgtcagaggggggagcttgatggccactcaggcgcgacgcttgcgctggagagtcagagcgataccggcgacagcaagcgccacggctacgccgctaagactaagcacagccgcaccggtcttggacaaaccaagattgttgcccgtcttatcgcccgcatcgacgctcgaaccgtcgctcggcttagtcgaatcgcccgagccatcgcctgaatcggaaccatcaatcctcactaacgcagcctgcgccttaaccaacgcgacggtcgtgtcatcgacgtccttctgcgtagcagtatcgtcggcatagaccttctcagcggaggtcagcatcgtggcaaacgccttccacgaggcggcggtgtagtcggacccgtgcagctgcttggcggacgcaagcgccttggacaaaccagacttatcgaccgcaaccgcatcgtcaaccacatgcaccgtaacggaaacgatcttgttcgccagctcctcggaagagctcatgtcgaacaccggcataccgtcggcagcccagtgcacacggcgtacgaacatgtcgcggccggtggcattcacggagccgaggttcttcgtagcataagcatggaacacgtagatctggttgccgtcctcgtcctcgctccacatgccgtgaccggtgccgagctgcatctcgccattgaatggaccggacttctgaatcgggtagttgagcgccgtccagctggccgggtcggtcaggtcggagccggcggcatcagccacggccaaaccggtggtgtaggtcttgcctacgccggaaccggagaacatgaggtacagcttgccatcacgcatggtcacgttcggaccttcggctatggcggcgttccacgcatactccggggtgacgatgcgcaccggggagctggtcacatgggccgggtccttcggatccatcgtggcgatgtaggtggcgccgagctgctgccaggcgtagtaggacctgccgtcggcatcctggaaataggtcatgtcgagcgacatgcccactccgccggacgcggtggctgcgagctgcttgttaccgttgagcagcgaggcgtcattgcggtagatcggtgtcggcacagtccagttatcggggtcggtcgggtcgaggtcatgaccgtcggcatcctgcttgagctgcatgtacaccgacttgccgttggaccatgtgttgccgtatccggccatgaacagaatcgtgagcctaccatcaatctcatgaatttctggagcccagaagctgtgcatgatggcattaccctcggagtccttgtcgccagccttgagcagcgacacctccttgttgttgtagccgttcgactgaatcagggcattcgggttgcccggctcgtcggcgagaccggaaatcgtgtcggccatgcggaacggcatgtggggcgaaccatgctgccaagtgacatcaccttggatgtcgttggaagcgatcatcaggaacttggtttcggtgacttccttgccgtcgacctcatgcgtccactgccacttatacaccgatggatcggcgcggtcctcggcgaacggaatctggtattcggtctgcttgacggtgccggtgacagtgtaatcacccaccttcgtcagatctataccctcagtgttccatgaggaaatcggcagggagccggtagaaccgtcggagtaagtgaggtccacgttcttcggcagctgcgaggtcatctcatcaatcgaggaacctttctcgacggtgatgtcagtgagattgctcgtgccggtgttctcagagcggccgtaacgggtgttgagcgccttgacggtcgcctcgtccaccgcgatggtggcaccggagcggaagttcgcgatgccctgcacgccgtcggcatcgagtacgccggacttggcgatggaaccgtacagtacgctgccatgcttggacgcggagcccttgagcgaatcgaacgtggtgtacttggccacgccgttgtcatcggcccagccgacaacatactgcttgctggcggtgtcgtacacggcgtacggagcgttgacgccgttggtctcgccaaggtcgacgatggaaccggagttctcctgttcgctataggtgagcaggtcttcggaggtggcgatgagcacgctggacttcgcggtggagtcaccggtggcggtgccgcggttggtacgcacggaaatcacgccataggtgccgtcggccatgcggagcaggctcggatccttgagactgcggtaatcattgccgtcgaggttctcgttgagattctgcgccttcggcgaacgtgcgaagaagataccgtaattctcgttgtacggggtgtacgaaccgtcagcgttctgcaacgcgaggtgcatgctgtaggcgatgtcgccgttgttggcctcgtcggcgctggtggcgttgcaatcatag

SEQ ID NO: 1967 - DNA, 17984 bp, Unknown
  R17_18m  MAG No. k141_15901
atagcgggtttccttgagttctccgttgatgacttcctgaaaatgcgcttcgtggcgctgcacggcgggggagccgaggtcggtggcgttctgataagcagcctgatggtacttaatccaatgcgacaactctctgccgttggtcgaaccagccacgggtgcggcgtcatatggggtcagaccggtgatgggcgtcgcgccgggagtgcatgagccgtccgaatgcactgtggatggtgttgccgcgggcgcgggcgatacatgcccttgcacggtgagccaattatcggtgaccgggttggcggcaccatccagcgcggcgaccagttcatcatcgatttccacgctggtgacccacgtgcgttgcggaatcggatgattggccaccggcgatccggctgtcaccacatgctcgatggtatattcctctgcccaatccgaggcaagcgtggcggcaacgatgccaccttgggagtggccgatcagtgccacgggctcgtccttgccgataccagcctgacgcatcgcctcggcaaccgtgcgagcgctgtccgctttcctgcggcgctcctgatcggcgctcatcagttccacgttctgcgcccagccgaatggtgagtcaggttgtccatcggtacccgggatggtgaccagccaggagttggttccatcagcccgttcatagcgttgaatggcgatggtcccatattcgagtccgctgttcagctcgattttgccgagccgttcttcggcgagcctgcgcagattctccattgactcggccaccgatccgcttgcacggacgacgtcggcattcgcctgcacctcgcgcacgttcagatgattgccttggacgacgtctttcgccgggccggagaaattggcgattttccccgcagccttgttgacctcatcggtgtgcgcaatgctcttgccgataggtacgccgccaatgattccgcccgcgccgctgagcactccttcctggaacggataggtgaacgtggacatccatgctgggttcggtttgccgtcaatagcccagccggccagaaagccgcccgccgccacagcggcaacacccaccgcggcatatcccggtttggcctgtgtaccggcctgcaataattcggtaaacatgcgccgagccgtcatctccgcctgagaatacagagagtgtgcgcgaatcagcagatcggccgcgccacgcagatcatcgctcaaccgctgacatgccgttgcatggtcataacaccgattgcccagcgcggcatatggtgcagtgacatggccgggaacaacggcgctcggatcgcccgactgcaaggtgacgcacatcggcgcactatgccgatgtgactgcaactgtaatgcggccgattcccaagccgtggctatggccgcaaatcctgccgcctcgtcatcgagagccttggctatggcggcatattcttcaagagtggctggcgcatatcccactccgccgtaaacggacgattccacctgccagtaatcgtgctcgctcatgatgacccccaagccaatcggtgggtggtctccatgtcttgcgcgagactggccgaatactgtgcggtgcgactgagccgcgatcggaataggtcggcggctttaccggtccacacgatgttgcgagagcggttcacggccaccgccatctggtccgattgcgccagtgtggccgcacgttggacggacacgaggtcgcgactacgctgtaccgccgcatggcaagggcaagtgccgtaatcgaacggcgtcaccgtattgccggcaaagccgccggcgggatcgatgggtgctggggtgctggtgtaggtattcatatatccagctaaaaggacaggactcatgcttgtccagccggaacgaccaatgtggttctagcttgccgattttgggcgaagttattcacaagtgttgtgtatagccgtaacgattatccacaaatagcccgtttgggcacaccttggatcagccatgggctatcgggatcagacaaacgccaaagccgacagccgaaaccgggaaacagccgcgataaggccatgacccgtgaggatgtgagaaaaagagcaaccgtgaacgactgcttaccacggcttagtggccccggtacccttgttctgcgtcgctttctgcttggattgggtggtgttcgactgggtatcggtggattgctgattggccttcatcagctcctcgacctgcttcttctgctcgtcggtcaacgcgccgccctttttggcattggctgaggaactctcggattgctgcgccgactgggcttgcccggaatcggaaccgctgttctgcgcctcggcctgtttcagggtgatcttcgtcagctcggaagaaatcgaagcattggtgtcgatggcgtccttgacttgcggcaacagaagcgtacgcattcgcccggcctcggcgaattgcgcatcggtctgctgctgttgcgccttgagcgtggtgatatcagtcgactcatcctgagccgctttgatattggcattcaatgatgcggtggcctgattgaacgtaatcgaagcggacaggtttactgccgccacgccggcaaccagcagcagcaatacggtgccacaagccaggacgatacgtgcccaaagcgggcatttcgcccgcatccgaatattcgccgagccatcgttcttgtggatttcgttactgtttctcacagcagcctccttgaggttgcgatccatgcaccgacttccatggcaagcaatatcgccaacgcaatggccaacggccataccaccggcgtggtgcgtgtgcgctccttgaccgtggtggtcatgcgccactgcttcgacgacctggccgaaaccgaatccgccaaagtctgtgaagcgtccacggccacatatgtgccgctgatctcgtcggcaatgtctttaaggttcttctcatccatcttggagatgccgggttcgccggtatccgggtcgaccacccagtggtccgtggtgttggaatcgccggcactgacgccatcggcgatgacgggaatcttgccgccctcggtcgagccgacgcccacggtaaacccatcattgagatactgtcgcagtgacgagaacgtacgacgcgtcacattcgaggtctgttcgccgtcagtgatgaggtacagcacaatcgcatcatccgggtgcgcttcacgaatcgacttcgcggtcagcagcaattgatcgatcggagcatccagactggatcccgccgacacggatgtggcttccaccgccaacgtgttggcccaattatcgatggccggcgcatccggggtcagcggcacatcaagtgttcccgaagcaccgaaccgtaacgccgcgaaactggcgtccgggtaagcagcggtcacatcatgcacggcctgacgcgcggcatcgatgcgggtaatggtcttctcggacccgtatgtggcatcagccaccgccatcgacccggtggtatccaccgccacgatgacgtcggtggcattgatgacctgtgaggtggtagacgataccacgctgggagtcagtaccatcaccgcgacaatgagcagcataagcgtacgtcgtatgcaagcccacacggtctcgtcactggaagcacggcggcgaacaaacaatacgatttcgagaatggccagtacggcgagcccggccgccagcagtccgtcggcgacccagcccaaggcgggggagaaggtgaatccgttcatcgcctcaacctccatgcacatacgatccagataatgagtatcacggccagagcaagcgtccacagaccgggagcgtccaccattgaggatttcgccttgttctccacatccgtatctctacgcgactgaatatcccgtaccagctcatctatcgacgcgccattcgattgggtgaggaagatgcctccatgcgactcgatcgcggacttcatatccgttgtggtttggtccgattcactggctttcggcccggaatacaggccgtccacggtgattttggtctgctgggtcaagtccaacgcttcggtcagcgaataggtgggtttgcctgacacgacgttgtcggtggccagcacgatggatgccgcacgctgacggtcggcattcgcatgattggcttcgccataagcgaaaccggggagcatcgccgcgcaagacaccacgccgtcgccaatcaaggaggtggcgtccttgcggttctgcgtgccttcgagccaattggcgatgtcctgatattcggcatcggacatcttatcgatgtcatcctgcgactcgacgcctttcagcgccttgctggcggaggtcaactgtttggtgaccagttcgtagtcgtcggtcagcgggaacaccgtgcgtgaggtcgagttgaagatactcaaaccgatacgttccccctcgaaatgcttgaccagctccaaataggtatcgatgacctcgcgatcataggggagcgtggatcccgacacatccagacacaggacgatatctcggctggaagcgcgttcgtcaccggcatccacttggctgggacgagccaccagcacaatggccagcgccagcgcaagcaccagcacgctgatggcgagacggcccaaagcgcgccattgacggaacagacgggaagcgtgctcggtattgagatcgtcgtccatcgagaatacaggggtgtcgtcggcggcgttacggcgggcgaacacgacaatcagcacgataatcgccagcgctgccaagacgccggccagagcggcccaaggccaatgccatgccagcatcatgaacgccacctttccaccagattcgccacccactcggcggcctgctgcacgctggtcgtctgggcgattcggttgcgggcatcatcggcaaattccggtggatacaacgcgctaatggtctgcttcaatgcgtccaatccttggcgattcgcgggcgtgcgattcaggtacgccaaatcggtcagcgtactggaactaagctccttgcctgatgcggcaccggcgaaatcacgggcgatgacggccaattcgacgaaagcctcatgccggggcagtgctccggattcatgacgggccaccacatcgtcgatgcgggcacgccactcggccttggagctggcattgctatgagtgccacgcgcacggtcgctgttccgaggtttgcgtgcggggcgagccagcatgatgatcaacgcgatcagacctaccgccagcaacaggcatgcgacgatggccatcaccaggggagtggtcaaggccaacgactccacgggcctgagatcgccgggatcagtggcgagcgggatgatggggaacatgctgtgcatcatagatcacccgccaaagtcagtccgaccagttcgggtgcagtgcccagtctattgcgtgtggtgcgggccaatgcccgggacaccagggcgacgaaacgatcgaacatggattcgctggatgcggctcgaatgatatgggaaccggcacgggtgagctcctgttccaaagccgcggccatatacgcgcgatgagtatcgacctcggccgctgccttggcgttgcgcaggaatgccggcacacgccgtgcactcaagccgtcggcgggagcgtggcgggatgagacggccttgaacggattcatcgtcgccacatcgatcagcaccatcggatgggtgcgggtaatacgacggatcgtggtgatatgccgctcctccatcgcatgctcatcggtggccaatacgatcaatgcctcacgatccttgatacggcgcgcatattccagcagcgcgtcgatattacggtgatgatcccaatcacgatcaagcgccttgtccagcgtgcgttcgaactgcgcgaacccaccgttgaacggcacgcgggtgatgctggactcatcgccgaacaccagcgaaatatcgtccgaccggcgcaacgacagtgcggcgaacatacgcagcgcattggcggcaacctgccatgcgcgttctccggaagggcatacgccagtcatctccaggccaacgtccatcagcaaccagacccgtgacgtcgacaggcgctcgcgctcgaccaccatggggcggccttggcgggcgctggtcttccaatcgataagacgggattcgtcgcctggctcataggcatgcacatccatcgcatcgccgctgccgccacgacgcccggatgcgtgttcgccctccagcacgcccaaagccttccttacggtaggcaggctcagctgagtgccaagggcctcgattttcttgcgaacggaatcggaactcacggaacaggaaccgtttcgacgatcttgtcgacgatctgatcgctgaccacgccatcggccagtgcctcgaacgtcagcataatacggtggcgcagcacctcatgagcgaacgccttgaggtcctcgggcaccacatagtcgcgcccggacagcaacgccttcgcctggccgatacgggtcaaggcgatggtggcgcgcggcgaggcacccaaacgcaccaaggacgacagtcccttgatggggcgggagccggcacctcgtgacgtggcggtgatatcgaccgcataacgcatgatcgcgtcggaaacatgcacgcggcgtgccgccttgcgcagaaaatcaacgtcagacacggaaatgcgttcgccggtgatggtgtcgggaccgatcatatcggagccacggtgggtgagcatggccagcatgcgagcctcttcgtcgggcgaaggataggtcatgacggccttcatcatgaaacgatccatctgggcttcgggcaggttgaacgtgccctcctcctcaatcggattctcggtggcgatcaccatgaacggcttgggcaaggcgatacgctgcccgccgatggtcgtggcaccctcggccatggcctcaagcatggcggactgggttttggcattcgaacggttgatctcgtccagcagtacgaaattggcgtgaatcgggccgatctgcgtggtgaacttctgcgacgcaaaatcgaagacctgcgtgcccaccagatcggatggcatgagatcaggagtgcactgcacgcgtttgaacgagccggatacgcaggtggcgagcgtctgggcggccgtggtcttggccaagcccggcacggattcgataagaatatgcccgccggccaccaaggtcacgataagcgattcgcgtagattatcctgacccaccagtgtctgggcgaacctcgcccgaatggcgtcggccaggatacgtgcgcgtttggcgtcatcggcacccagcggagccgacacgccgggcgtgggaacggtgaccggtcgtgcggcggtggtcggcgaaggtatgttcggttgcgtggggaacaaagtcatgccctcactgtaactactcacaatgactgttggtctgtctaaagagtccaatccaccgggtcggcacccatggtgactagggcttgattggctctggagaatggtttggagccgaagaatccgcgggaagcggacagcggactcggatgaggcgatttgataatgaaggcattggtcagcaatggctcgaggctttgcgcattacgcccccagagaatcgccaccagcggcttgggcttgccgtcggcgtccgtgcgcgcgttcaacgcacgaatcgcggcctcggtgacttcctcccagcctttgccctgatgcgaattcggccgcccgacgccgacggtcagacatctgttgagcaacatcacctcacgttccgtccacggtgtcagatcgccgttggtgggcatgggcaccccaaggtcgtcaaccaattccttataaatattgaccaggcttttcggcagcgggtgaacattcggcgccacgcagaagctcaaacccaccgggtgacccggggtcgggtaggggtcctggccgacaatcagcaccttgatggaatcgaacgggatggtgaacgcgcgcagaatattgtggcttgccggcagccacgggcgcccggcggcgttttccgcacgaagaaaatcgcccatatggtggatggcgggctccacgtcggccaaggcatgggcccaccccggctctaccagttcgctcaatggtttgatcatgactcaccactgtagtcaaacgtgcatatccggtgcacgaggcgtggtgtggtggactgatgagttgtttgccgattacactcatgggtagttttgacaggaagaaagggcgattatggcacgcgacatgatgacctacgaatcctatgaaccggattccttcgacaatcctccgaagggaccggtgggagttcaccgtggcgctcgttcggcagtggcccgcttctgcccgttcatcgtcgttattctggtggccgcactgtgcggtgtcggggtctgggcatggatttccggggaatacaggaatgcaataggaggatcgtcccagactgcgaccacgtccgggactgcttccaagtccgattcgtccagcaaggctgagaccaaaaacagcaccaaggatgattcctcgtccacttcgaccgatccgtccaaggactcgacttcggattcggcaaaatccgataccaacagtgatacgacatcctcgaatgagaatcaagactccgatcagcagtctcagcagtccggagccaccgcgactgtgaataaggccacgcaggtgcgtgtggtcaacgccacaggaatccaaggatatgcaggtcagcaggccgatgtgctgcagaccgccggttacaccagcgtcgaggcgaccaatccgcgcggcacattgccggcttcttccgtggtatggtatcagaatgaagccgataaagccaccgccgaagatgtggcgaccacgcttggcatttcggctgtggagcaggtgcaaggactcgccgttcccattacggtggtgctgctcaactagcgttgttgatgcgtccctgatatcggcgtggaatacatcgaaaaccgtgagcgttctcacgtctatgaaataattcgtaccgaaaatgtgccactgcggttgggattgttccctcgtcactgtacaatcgtcatctagtcgcgaggtaggggagcgcgatgcggttctttctacgttccctataggttttgtgtcgcgacgcctaagggaacaaaggaaagatcagatatggcacaaggtaccgtgaagttcttccttgccaagaaggggttcgggttcatccagccggacgacggcagcgaggacgttttcgtgcactacgcggaaatcaaggacgacggcagcaccaataagttcaagatgctgtacgagggcgatcgcgtggagtatacgcccgcttcgtccggcaaaggcacgcaggcaaaggatgttgtcaagctgtcttcgggtgaagcccgctccgagtgagcaacacgcacgcaaggatgtgcattgaaggccctgaccgtttcgacggttggggccttttcatgcccaaagcgcaatcgccgccgatgatgttggcactcggcggtcgcgagtgctaatgtctgggttagcactcggaggtcgagagtgataatcggcggctgacggctggtcgtcacgactcgacgcttgcgagtgataaccggtatacctagccatttggaggaatacgcaaccatggcaaagatcatctcttatgatgaggaagcccgtcagggcatgctggagggccttgacaagctcgccaacaccgtcaaggtcaccttgggcccgaagggccgcaacgtcgtgctcgacaagacctacggcgctccgaccatcaccaacgatggtgtgtccatcgccaaggaaatcgaccttgaagacccgtacgagcgcatcggcgccgagctggtcaaggaagtcgccaagaagaccgacgacgtcgccggtgacggcaccaccactgcgaccgtgcttgctcagtccctggttcacgagggtctgaagaacgtggtcgccggctccaacccgatcgccctgcgtcgcggcatcgagaaggccaccgaggtcatcgtcaaggaactcgtcgccgccgccaaggacgtcgagaccaaggaccagatcgctgctaccgccaccatctccgccgccgaccctgaggtcggcgagaagatcgctgaggctctggacaaggtcggccaggacggcgttgtgaccgttgaagacaacaaccgcttcggcctggacctcgacttcaccgagggcatgcgtttcgacaagggctacatcgccccgtacttcgtcaccaacgctgacgaccagaccgcagtgctcgaagatccgtacattctgctgacctccggcaaggtctcctcccagcaggacatcgtgcacgtggccgagctggtcatgaagaccggcaagccgctgctgatcatcgctgaggacgtcgacggcgaagcactgccgaccctgatcctgaacaacatccgtggcaccttcaagtcctgcgccgtcaaggccccgggctttggcgaccgtcgcaaggccatgctgcaggatatggccatcctgaccggtgctcaggttgtctccgacgaactgggcctgaagctcgagtccgtcgacacctccgtgctcggccacgccaagaaggtcatcgtctccaaggacgagaccaccatcgttcagggcgctggctccaaggaagacatcgacgctcgcgtggcccagatccgcgctgagatcgagaacaccgactccgattacgaccgtgagaagctgcaggagcgtctggccaagctggccggcggcgtggctgtcatcaaggtcggcgctgccaccgaggttgaggccaaggagcgcaagcaccgcatcgaagatgccgtgcgtaacgccaaggccgccatcgaggaaggcctgctgcccggcggtggtgtggccctcgttcaggctgctgccaaagccgagaaggccgaggccgtcgcctccctgaccggcgaagaggctaccggtgccgccatcgtgttccgcgccatcgaagccccgatcaagcagattgccgagaacgccggcgtgtccggtgacgtggtcatcaacaccgtccgttccctgcctgatggcgaaggcttcaacgccgccaccgacacctacgaagacctgctggccgccggtgtgaccgacccggtcaaggtgacccgctccgctctgcagaacgccgcctccatcgctggtctgttcctgaccaccgaggccgtcgttgccaacaagccggagccgaagcctgctgccccggccgccggtgccgacatgggctactgatccgcaagcgatcgctagctgattgagctgaaaggggactccttcgggagtccccttttttgtattctggctcccctctttgggggggggagctgtcgaacgcagtgagactaaggggagctgcggtgtagggatactccctcagtttcgcttcgcgatcgagctcccctcagggaggagagccaagaaactagctggcgaacaggcgcgaagcttggatttcggcgtcagcgtacacggtggaggcttgcgtcagcgagcgttggatggactcgagtgaggcctccatctgctgttgggccgcacgccactgttcggctaccgcggtgaactgggtggccgccgaacctcgccatgcgtcctgcaaggcattgagattggtgtacatgccgcccacggcctgcctgatctgcgagatcgaagtggccactgcggccgaggatgattggattcgctcggaatctacctgatattggggcatcgttgctccttttctagagggttaatggtatgtatggcggccgcttgccaataccggccgctaaggtggaggatatgtcaacaacgaatcgggaagacggaaaaacaactattgtggtcctatcttcggagccgtcctgttcggccttcgggaatatggtccgaaaatggcttgtttgtgccatttgcgcccttgctgcagtagcgatgaacgcaatgtggataaccgcaaatgcctatggggataactcgggcgacagctctgacagctccagcagcagcaccgacagcggcgtgaccatcaccgagaacatcacggatacggaaaatctcctgggctcccatgcggccgaagtcgcggatgccatcgccaaaaccgagaaggaaaccggtgtacacgtgcatctgctgtatctttccagtttcaatagtcaacagaaaccggaagactgggcggcaaccgtgatggagtccatgaatcccaagccgaacacagtgatgcttgccgtggcctcgaatgacggcaacctggtggtcgtcgtgtccaagaactccgataagtggcttctcgataacaaaaccgtcgataagctatccgaagccgcacagcagccgttactggaaaacccgccgagctggtctggcgcggcaacggcaatgatggatcaaatcgtgaaatccaaaaaagcctccacctcatcatccacggtgaccgtaggcataatcatcatgggtgtggtgttggtggcgctggtcatcatcatcgtggtcatggtggtgattcgtcggcgcaaggagatcaagaaggattccaaggccgaactccaagatgacattcaggaaacgcccagaagagcgcgacactctaggaagcatgagtaagcctattgaagcatcgattgttgttgtcgacgacgagccgtccatccgagaactgctggtcgcttccctacacttcgccggattcgaggtaaacaccgccgcttccggttccgaagccattgaggttatcgaaaaagtgcagcctgatctcatcgtgttggacgtcatgctgcctgacatcgatggatttaccgtcacccgccgcatccgccaggaaggcattaacgcccctgtgctgttcctcaccgctcgtgacgacacccaagacaagatcatgggcctgaccgtcggcggtgacgattacgtcaccaagccgttcagcctcgaggaagtcgtggctcgcatccgcgccattctgcgccgtacccgcgaacaggtggaagacgacccgattattcgcgtcgccgacttggaaatcaacgaggactcccacgatgtgacccgtgcagggcagccggttgacctgagccccaccgaatacaagctgcttcgctacctgatggacaatgagggccgagtactgtccaaggcacagattctcgaccatgtctggcaatacgactggggcggcgacgcagccatcgtcgaatcgtacatctcctacctgcgcaagaaagtcgacggcatcgaggtcgacgacggcgaaggcggcaagcgcaaggtgacttcgctgattgaaaccaagcgcggcatcggatatatgattcgcgaaccgaagaactagtcgccccatccataacgcatcgcaatctcatgagtatccccgataagcagtcaggcggcgtaccgccgagcagcacgccgaacgccgccccgaacacgaatcccatgcctgcaatgccgccgttcgccgcccatttccaagagcggcacgaacgtaagaaaaacatgctgatgcggcatatcgaccgtatctcgttgagcagcaagctggtggcctgcaccatcgccgtgctgcttatcggcgtgtcggtgatttccttctccatccgcgcgttggtgaacaactacatgctgcagaaaaccgacacccagttaagctcgcaaagccagctggtggtcaacaatatcgatctgctgtcaaaaaatgactcatcggggccgaactcgtactttctgcagattcaatataccgacggcaccaaagacaaagagggcaatcctctggtcgtgaccccgctgatgccgcagatgcaggacggtatcgtatcggtgccgattcttcctacctatggtgataccagtggcatcacgctcggccaggcattcactacgcaggcagtggccaagcagatcatcacggtgcagtccgacagtgcggacagccagaacgatccggccaacggaaactccaattcctctgacaccatcaccaaggtactggccaaccccactgtcaatgccaaccatgccgccatcgtcacggcgagggcaccatggcgtattctgccggtgaccttccagcaaaacggcaaggaccgtgccgtggtgtacatcggcttgtcactggccgaccagatcgacaccgtcaacacactcacccgatactgcattgtggtcggcatcgccgtggtgctgctcggcggctccctgtccacgctgatcatccagcacacgatgacgccgctgaagcgcatcgagaaaaccgctgcaaagattgccgccggcgacctgagccaacgtattccttccgcgccggaaaacaccgaggtcggctccctggccgcctcgctgaactccatgctcacccgaatagaatccagtttccatgaacaggaggagaccaccgacaagatgaaacggttcgtctccgacgccagccatgagctgcgcaccccgttggccgccatccatggctatgcggagctgtataagatgcagcgcgatatgcctggtgccttggagcgtgcggacgagtccatcgaacatatcgaacggtccagccagcgcatgactgttcttgttgaggatctgctgtctttggcccgtctcgatgaggggcgcggcatcgatgtgaccggcacggtgaaactctcgtcgctggtcaccgacgccgtcgacgacttgcatgcgctcgacccggaccgtgccgttcgccgcatgcagatttccctcgaaccggcgcgcgatttgaaccatcccgccgaattcaaccttgccgaaggcgattggcccgaggtcgtgctgcccggcgacgcctctcgactgcgccaggtggtgaccaacatcgtgggcaacatccaccgctacacgcctgccgattcgcctgccgaggccgcgctcggtgtgatgccggccgccatcgatccaagacagctcgctcgcatgcccgccagcgacgcgtcaatgcggcggttcatcgacgccgccgaagtaggtgcctcgatgcagaccggctatcgatacgccgtattgcgtttcgtggaccatggccccggcgtgccgcctgaatcgcgctcgaagattttcgaacgcttctacaccgcggacccatcccgtgcccgcgaaaagggtggtaccggtttgggcatggccatcgcgcaatccgtggtcaaagcacatcacggctttatctgcgccaccggcaccgatgggggaggcctgaccttcaccgtggtgctgccgattgagcagatcgtcgctcctgagcccaagcggcccaccggcaaaaccaaggacgccaaacagaagacttcttggttcagctctgagcgtaagactcaggcgactcagcccaaagcgtgaggtcaagccctgtgaggtaaactgtaccttcggtttactatttccattgaggattaaggaaggttcgcaatgcccaccggtcgagttcgttggtttgacgcagccaagggttatggcttcatcaccagtgaggaaggcaaggacgtgttcctgccggctcaggccctacccactggcgccaccacgttgcgcaagggggccaaggtggagtattccgtggtggacggccgtcgtgggccgcaggccatggatgttcgcctgatcgcctccactcccagcttggtcaaggccacccgcccgaaggcggatgacatggccgccatctgcgaggaccttatcaagatgcttgatgcggccggcaatacgttgcgccgtcaccgttacccatctgctgccgacagcaaaaagctggccacgttgctgcgtgcggtggcggatcaattcgatgtacaggactgatctgatctatgactgataccaccgaaaccatcgtgacaccggaccctcacgccatcgcgcgcgccgtgctgctcgaagtggccgacgagagcgatcaggtgggggatttcgttacctcatatgatcttgaggatcacgtcactgacttccgcttcgccgcgaatatccgtggctacgaaggatggcaatggtcggtgacgctgtatcacgacgaggagatcgactcctggaccgtcaacgaatcctccttgatccccactgagggcgcgttgatgccgcccaagtggattccttggaaagatcgccttgagcccacagatctggctcccaccgattcgatcggtaccgatccggatgacgagcgcatcgaggaaggcgaagtcgaggaatcctcgctgcaggatgtcaacgatgccgtcgagaccttccgactgacccgccgtcacgtgctgacctcgttgggtcgtgcgcaggctgccaagcgctggtatgaaggtccgcgaggccccaaagcgttgagcaccaaaaccgccgaaggcaacctgtgctccacctgtggtttcttcgtgccgctcgcgggcgaactcgaccgtatgttcggcgtgtgcgccaacaagtggagtccggatgacggccgcgtggtctccctggaccacggctgcggtgagcattccgaaatcgaacctcccgagccaagccagctgtgggtgcagtccaagccagcctttgacgatctgcatatcgacgtggttgccaaccgtccgtgcaagcaggagcaggttgcccaggacgaggccgaaggcgaaaccgacaagacaggcgagcctgccggtgatgatatcgaagcacagaagactgttgacgggaacgccgtcgatactgagcccgctgaggaggcggcaggcgacgggacctcgcaatcccagtctgccggtgatgagtccgttgcacagaacgcatccgattccgttgtggatgttgatgcagctgattccagcgacgagtccaagtctgatgctgacgacgaggccaccgaagaggacatcctcaacaacaccgttgccgatgatgatgaggatgatgagatggacgacgaagaggataacgttcgtccttcagacgatgtgactcctgaactcgaaactgtcatcgatctcattgagcagctgcgccagaacagggcggacgaggaataaaataaacgccaatcctgctccccaacagcagaatgtactctcggatcaacttataggtctcagcgaagatgtttcctaaaaagtagatggtgatggggttataacctgctagattgattatttgctttagtttgttttcgtgtgatataattaagtcatgcgtgtcagggaatgggcgaggcgtgagggcttcaacgagcagacggtgtggcagtggtgtcgcgagaaccgtatgcccgtcccgttcgagcgcatgaacacgggcacgattatcatccacgacccgaaatacgagaaccagcccgccgcccccacggcgaacggcaggacggtgtgttacgcgcgtgtcagctcgtccgaccaaaaggacgatttgcaacgtcaggccgaccggttgaaggcgttcgccatcaacatgggcgtcaagagccccgaggtggtcacggagaccggctcgggcatgaacgacaagcggcgcaagctcaaccggctattgtccgacccgaccgtgggcacgctgatcgtggagcacagggacaggctcgcccgcatgaacgcgggactggtggagagcgcgttgaaggcgcagggacgccggatcatcgtggtggacgacacggagctggacgacgacttggtgcgcgacatgaccgaggtgttgacctcgttctgcgcacgactgtacgggcgtcgtgccgccaagcataagacggacgcggcgttgagggcggcgcgtgatgcttgaggcggtcagggtggcgctcgacccgacgccacggcaggaacgactcttggagtcccatgccggtgcggcgcggttcgcgtacaacgcgggactggcgcacgtcaaggacatgcttggacggcaggagaagccggaatggtcgtactacgcgctgcgcaggtggtggaacgccaacaaggacgccctcgccgtcagcatggagaccggcaagccgtggtggccggagaacagcaagg

SEQ ID NO: 1968 - DNA, 6353 bp, Unknown
  R17_18m  MAG No. k141_16674
acaaaatccatcagatttcgcgttagaccgaagtccgttgccttttcccacgcaaaccaacaagccatgcgatgctccacaagcacagtacgcagattgcagcaagggccacgatctgtttggtccgggcattgcggtcttgagtggggtgcaacacgatggtgtcttggtaggagctggattggaagggcttggataagccatccaactgcgggccgcgcaaattgcctgacagggtgacagatacagcgttcatagggtccatgatgccccagccggtcagctggtcgcgattgtctgggtcggcacggttggcggtggcaagaatacgttgccgccattgtgccggcgactcattaggatacatcgaggccaccagcgcggcctctccgctcacgtatgccgtggcgaagcttgaggaggctgcatcggtggcgaacacacagtccactcctcccggaatcgttccggccgtctgcataccaggagccgcgatatcgacttgatctccatgtacggagtcgttggtgggctgtaggtcagtgttcaacgccgtcacgccgatgacttcaggataggcggctgggtatcgttcgccgtctttggtgctggccgaggtaagacgattgcctgcgctggcgatgatgaggctgccgtgcgtttcggcataggatactgcctgctgcatctcgggaatattgcgggtgtcgctcagggagatgttgatgattttcgcaccgtgatcgaccgcgtaagtgaccgccgccccgattgtttccatggagggggcacccacttgtctgccgttctcctcccgaatggtatcgaacacgcgaatcgtcatgatggtggcaccaggggcaataccctgaacggatgaaccgtctactggacgcgcggcgatgatgccggcaaccgcggtgccgtgattgtaggtatcgatggttccgttggatgggtcgcccttaaccatgctggtgcccggtatcacggcaccgttcagatgcggattatcagtgtccacgccggaatcgatgacggcgacaatcacgttttgcccggtggcacgctgatgcagagtatcgagctcgaatagattattggtccagggctgctgtgtgacgtaattttcgatgcctgcctggcattgtgcttgccccgatgaggtttgggatgatgagtcagaagagtcagatgagtcggcgtatgcggcttgtggcgccgccgcgcatatgcccgccatacttgtggccagaccaactgcaagcatggcgctcagagttttggctacggtggcgcgcgctactgaacgcagacgcggcatagcgggaaacggcatacgattcataatcagttcttcccggtctgttcgagcacagcttgcgggttgggcgcattgcctgcggcttcggtggtgagctgcactcctgaggggaagatgtctacccatgaacgcggcacggaacgaacatcctgaccggtgtagcctaaacggttcagtatctcttgtgttgcgtggggaatcggatatgcggtaccggtggaatcgatggcgaataccgttcccttgtcggtatctccgatcgccgaacgcaacagcgccccggtgccaccagtaatcgtggtggaaacagtgcttttttcgctggcatcgactcccgatgcagtatccgcccctgactcggcggaggatctgaccgcaagccgaacgcgtgaagtaagtcgttcgtggcccgatgcagacagggggaatgtggcgcatatggtcggcgtgccgctcacctgctgcaacgcactggtgggccaattcgtcggaataactgatgatgtggcgttggctaggctttggaagtcgtgggcagacagcgctgtggggcgtgcgatggattctggtttgccgatgatgtacaggttgtaggagaagtcatctagtgcggtgatcttgccgccctcctgcacaaggtattttgttgacttcgtctcgccctgctgggtgacgatgccgccgaccgccacttcggtgccattaacgttgacgaacgagcccgctccgggaacagtgatgggtttgattgggcttccggcttcgaacaggttgatccactgtgcggttgccttgatggttctggtctgtggtactccgaacatacgcaggaaactgtctcgaattgaagattccgatggcagttcgtaacgcttggaaccggaaacaaggtaactggtgttgtccacagtggcgacgatggccgtacgactatcggcaccagtagctaaggcggtattgctaatggtgttgctgagcttcatattgtccatgcagctggtcagcgaaccggatatcagctggttttgtgcagggagtgaatcgggggctcccagaatgccaagagtcgaaccgatgggaattcccgccaactggtcgtcgtccacggtcaatacgtcgaaatccgaggaggggatgagcagtcgcgcactgatggcattgataaccgggtgaagcgtgccgttgacactgacatatcgtgctgcggaattcttggccacgatgagcttgttgtttttccaatccgagggcagagacgggctcatgatgccgtagaacacgctgatgagtatggtgatgaccaccaatcccagtcccacaatcaccggcgtctggttcttcttcggcgtgagctccacgccggaaggaatgccgctggtaaatgcagtgaccagtctcctacgtgagtagctttgcgcttcggaaagatcctttttatcagccatgacctatgttttccgtttccctgaaaagttcttgtgacgattccccatcggatttatctggcaaccatccacgctcacatggtgatggcgagataggcaagtggcggcagcagcacgaggcacagcatctcggcggcgtccgccattctggtggcaaacaatgactgctgacgtgtaacgttcgtgagaatgatggtcgccaaagcgctcgccagcatgatgagaataagcggtatgttcagttcggggtgagcctggctggcgagcaggccggtggcgataatgccgattccggcggctcccacggtgacgatcatctccctaagcgtatagatttggcgggaatcgagcagcatgcccatgaatgccaacaggcagatggccgctcccaacggtgtgctcagcgaaaccagcagcggcgtggcaatgagcagcagggaggcgacggcgatacgcccgatgaacaacatggtggaaccgaaaatataccgctgtttgatgtcttcataatcaatgtcttcaggcagtttgaagatatcagattcgctgtgtgggctgttcacgctgatacgtgccagcgataggcacatagagggcagtgcgttggcggcgagtgcaacggctgtggcggtgaaaatccatatctggggctcattgatggggaacatgaatgccaatccgctgggtatcaccgcaatcacgccgatgacgatggggatgagagagtacggcctggttcgtgatgcggcagcggccatcagtccgccatcgacgataagccctgccgcagctcccagcagaggcaacccatggaaaggatgccccgggaacagcgtggagatgagctggtagccgccgatcgcggcgaacacgctagagatgagtcccatggccaatgcctgcggaatcatattcttgccgcttaataccgagcagagtgcaatcagcaccaatgcgaagccgaatcccaatgccgcattgacaatggatggtgggaataccgcgagcaagccggcgctgatggcaagcattccggcgctgatgataagggaggtcagcgtggtgtggtcgttggtccatggtttgtacacacgctgcacgcttgcgcccaccgcttcaacgacatcgtcatacatgatgtccgtttcgttcaacgccccgggttcgagagtaagggtgctgccttcttccacgtgttgttcgtcaagcgtttgggaaggggagagggtctcgccctcgctgttgagcagacggtaaccgccatagactattgccgggtcaagcacgcccagtcggcgggctatgtcgggtagcagatcggccacaatcggtgtggggccaacggagagttcgatggttcttgccttgtatacaatggtgatatggagctgccgggttgcttccgggtccaatggcgcggcctgcgatgccgtaggcgctgcgggagccgcaggtgccgtagacatgggtgccggaacggcacccggctggaatggtgcggaaggtgcagcgatgccttgatagggggtatgggcaaggggcgcggggcctggtgtggggagcggcggcttgttctggctcgaatgcatgcgtcgtggtggtatgggggttctcgctgccatagacttcccttcatgtgagcatgcggcgctgccgcgcgcactcttctctgatggagactcaccggccccaagtgctccggcgtgctctccgtctccattcatcatacggtcttactcgacgtgttcacagtgttgcttgcgaataccggaaaaattgttggacaagagctgaatgccgggtatgatgggccgtgctgttgtatatggtgaagagagagtcaagggtgatgtactcgttggcgggaaaatcaaagttgtaccttcccggtggcccaatgtcatccggcttgatcatcagcagtcgcaacgcgatataagcaagcactcataagaagggatgcgaaatggctgagaagatcagggcaggcgaaggcgcgcttgagaagggcgccacggctgtagaaaacgccaggaccggcattgatagccgaatcaaggacatcgatagcaagatggccgagttggggtcgttctggagcggcgacgctgccacctcctacaacacgttgatggcgaactggcaggagaaggccaataagctgaacaacatccttaacgatttgcgtgacaacctgcgcggaaccgccaaggaccaggccgcgaacgaggaagataaccagtctcgcacttcccgactccagtcgttgctgagctgagccggattcgataaccaatataggaacgcttagagtttaaggattatcatcatcatgtcttctatttccgttcgtccgcaaatggtggactcgctgtccaccgacattgccaacgatgccaagggcatcggccaggagctggagaacctcgacgccgaggtccgcacccttatcgaccagtgggatggtgccgcgcaagaggcataccaccgcgcccagaacgattggaccaccaagctgcaggagatgaaccagattcttggccagatttctcaggccaccgctgaaatcgcccagcagtatgtggagtccgacaaccgttcggctgcgcgcttctgactctcttaccagttcgggtgccgcatgggtaatccacgcggcacccgaacgtatcgggggttgtattgtttgcattggccggattggccaatggttgtgtatggtgaaattggtgtgaggggaaacacatggcgaatgacattcatgtcgatggcgatcgggtgcgtgccgaggccgctaacctgttgactgccggcaaagacatcaaggatggtgtcggcgcacattgggatggcagcacgcgcagcaaccctaatgatttcgagaagggtatggagaagtatcttcagcaggcggccaaggtgttccaggaatcgcgcgcgaatcttgaggcttccattcgtcagtattccgattcgctagtgcgatccgttgccgaaatcgaaaagggcgagcagtcccaagaagagactatggccggtgtgaaggcacaagtcgaagccgcttcggatgtgcaattcgcggatgagaaaaccaaggatatgttgcgtgaggtactgcagccgcttgacgacttgcttggcacggatttggcaggcacggtgccggataccatgccactcaccgaggtgccgatgccgcctcagcagtcggggtcggtcccgttgcctccggcacgagtctaattttcctgcggctgggagatgtttttatggtgaagggctggtctgtgaagcggtacacgcggcgtttgattggtgctgccgtgactgtggtgatggctggtacggtgtgtacgccggttgcgatggccgatgatgctgattcgtctgccagctattggtatgtggatgacatgggcgtgcgtgacgcatggaagcaagatatcaccggcaaaggtgtgaaggtcgcggttattgacagccaggtggtgtccgattatccggggttcgccgatgcgaacatctcgtataaagcggtgctgaaaaacgggcttgcatcgtgcactgctcagactaaacgggga

SEQ ID NO: 1969 - DNA, 10791 bp, Unknown
  R17_18m  MAG No. k141_17608
gttctcccgcgccaccgcacttttggaggctgtggccggcaacccgcacaccccggtggccgatcgcgtgttcctcgccgacaccatgccgttcccgaacgtattggtcaaactctccgaagaccccgaaccgtccgtgcgtcaagccgtggccgccaacggggatgacaagaattggctggtcggccgcctgaccaaggacccggtgcccgaggtccgggatacggcgttgaaaaacaagcgcaccagctggaagatgcggcttgagggcgcgcaggaccccactgcggatgcggagacattggatttcttgggcgtacttggcaccgaatccgaagagggagcaccggcggtgctttcctcgatggtccgccgtgccgtggcgctgaaccccaatacgtccgaagcgatgcttgccaaattggccaacgacccctcggccgaggtgcggcacgccgtggaaagccgccgctaagcacactattgctgtgttttgccgtgcaaatttggccggcaatcaccctctatccaccattgtgagcgctcacatctcactatgtgagggtaaaaagtacataatttggcggaatcacggcattttgcttacggtgtggcgcaatcaaacggcgttagactggggctatgagtgagattaccgagagtgaagagcgtctggcccgtccgttgattcgactggccaagttggtcggtgtcggcacgagttatgtgggcatgagccatgactaccacgagatagacgatgacgtcctgatcgaggtgctggcagcgctgggcatcgacgcctccagcgagaacgcccaactcatcgccatccgacgcattctgaacgagcgttactcccgattggtggcacccaccgtgctgcatatcgccggtagcgaggaccgggtgctggtgaacaccggcattctggacgtgccttcggcgagcatcacgctggagaacggcgagccatatcagggcaccgttgaagttggtcctggagatggatcccaggcctacgacttggatggcacgttcatttcgaatgcggctgtggtcattcccgccgatctgccgattggctaccatacgctgcacgtcaaggtcgccgaccgtgtgcaagacgccactttgatcagtgcacctgatcgcgtcgatctgcttgacccgatgaagggcggcagtctgtggggctggatggcccagctgtactcgattcgctcctccaactcctggggcgtgggcgattacgaggatctgaagaccatgctggtggacgccaagcagaagaccggtgccgacttcgtgctcatcaatccggtacatgccgccgagccggtgtccccgctcaccccgtcgccgtatctgccggtaagccgtcgcctgatcaacttcacgtacatccgccccgaggcgatcaccgaatatgccacgctcagcgcgggcgacaagaacgccgtcgacggactgcatgccgacaccgaaccgctgaacggtgattcccagctcatcgaccgtgacgccatgtggcgcagcaagatgcacgccctgtggattatcttcaaggccggccgtaccgccgaacgccaaagcgcgttcgaccaattcaaggcggactgcggttccgacttggaggcgtatgccacgtggtgcctgtgctacgacaagtggggagcacccaacggcgaggagagcaactgggagcgcaagttcaaccgcaactccccggaaatcgccaatctgcgcaagcagtacccggacactttggacttctaccgctggctggaatggattgccgccgagcagctgtcctccgcccagcaggcagccaaggacgccggcatgcatatcggcatcatgtccgatatggccgtcggcgtgcacccctccggcgctgacgtgtggtggaatcccgagcgcttcgccaagggagccacggtcggtgcaccgccggacatgttcaaccagcaaggccagaactggagccagccgccgctgagcccgatcaatctggaggccaccggctacgagacctaccgcaatatggtgcatggcatgttcgcccgtgccggtgcggtgcgcatcgaccacattctcggcctgttccgcctgtggtggattcccgagaaccggtcggctatggatggcgcttatgtgtactacgactcagacatcatgctgggcgttctggccatcgaggcctctcgcgccggcggcgtggtcgtaggtgaggacctcggcgtggtgccggaccatgtggccgattccctgtcgagccacggtattctcggttgcgccgttgaatggttcgagcagtgcgacggcgtgttccgcgccccctcccagtggcgtccgtacgcattggcctccgtgaatacgcacgatttgccgccgaccgccggttacctggaatacgagcacgtcaagattcgtgagcgtctgggcttgctgaccggcccggctgaggaattcgaagcctccgcaaaggccgagcaggatgcgatgctggtcatgctggtcgagcagggctatcttgatgccgacttcgccgaacatcgtgaggatcacgaggcggatatcatcgacgcgctgtaccgcgcactgaagggttcgccgtgcaagctgctcgccgcctcgatcaccgacgcggtgggggagaagcgcgcgcagaaccagccgggcaccaacaacgaatacccgaactggcgcatcccgctggccgacgccaagggcaacgtggtaccgctcgaaaccctcttcgacacccccggcgtccaacgcttcgcccaaatcttcaattcctgacccactttacctccctctgacgagccgagtcgttaagcggacagtccagtggactgtccgtagacgaggcctgaacgaagcgatagctgagagaaggcagggaattgcctcaccgtaggcgagtcggttagccgaagtgggtggaagagaaaccataaataggggaagagaagccataaacccaatggagtgtccccagttgccctatgtcaagcccggcgatatactagtggattgttgtgtttccctaaggggtccttcaaagcgctatcccactcgccatcgaggactttcagggagcccacggataatgaggttcgatgcctcttggatgcggccctgaccaagccacgccaagcagctgagacccggaacacaatatagaaaaggtaatccagtgaaaactttcactccgaagccagctgatctgactcatgactggtatgtcatcgacgccaccgacgtggtgctcggccgtctcgccacccaggctgcaatcctgctgcgcggcaagaacaagccgacctacgctccgcacgccgattccggcaaccacgtgatcatcatcaatgccgacaagattgctctgactggcaacaagatgggcaaggaactctactcgcactccggtcgtcccggtggtctgcgtcgtgactcctacgccgagctgctcgagaagaaccccgagcgcatcatcaaggaagctgtcaagggcatgctgccgaagaaccgtctggccaaggtgcagctcgaccgtctgcgtgtcttccgcggcgccgagcacccgcacaccccgcagaagccccaggtcttcgagatcgcccaggtctcgcagcaggccaagtgaaacctgagaggagataagaatcatggctgaaaacaccaacgactcccaggttgtcgagaccgaagaggagctcaccaactacaccaccgagaccaacgctggcgctggcaccggcacctccgcgatcgagccgggctacggcaccggtcgccgcaaggaggctgtcgcccgtgtccgtctggttccgggtgacggcaagtggaccatcaacggccgcaccctggaggagtacttcccctccaagctgctgcagcgtgaggtcaactctccgattgttctgctcaagctcgaaggcaagttcgacgctatcgtcctcgttgacggcggcggcaccaccggccaggccggcgctatccgcctcggcgttgcccgcgctctgaacgccatcgatcgtgatgccaaccgcgccgccctgaagaaggctggcttcctgacccgcgacgctcgcgtcgtggagcgcaagaaggctggtctgcacaaggcacgtcgcgccccgcagttctccaagcgttaatttcgcttgtcctgtaccgagcatacaaaggctctccgtggaattccgcggagagcctttgtgtttgtgtcgtgctgttttgagtgtgactcacacctgtttcatcagcgtgatgctcagcgccggcatggtccagacattgtcgtcgacgggagtgtccggcgtatcatccacaggggcatcaggcatatcatctgatacctcatcccgaggcgcggacgaggtgccgtttgcggcgtgatccgttgctggcatcgcgaattcgatggtatccgcttcatcctcagtcgaggattccgtgcgctgcatggccacttcttcgaccagcgtgcgtaccgtctcgctggcgtccggtacatgctgcgtccaaacggtggtgtcatcgttcaaatcgcattcctcgacctgaatgccatgcccggctcggcggccgttgatttcggccgagcaccatttaggcgtccagtgagtgtctggcggcaggtggaatgtgcggtcgtcagcggtgccgttgaccacaatgcacacgtccacctcactgttggacagcaatcgcatggtgaagctacgtacgcccagatcgaaccagtcacgctccatcggcgtggtgccgtcgggcaggaaccactgcacgcggcttgagggcttgagtaggccgagttgggtcagtcgggtgaagaagtcctcgtggtgatacaggtccagtgatttacgtagcgccaccagtcgagacacggttttcaggcgacgcatttcgcgtgtcttgttggtggaatacatccaatcccacttcagccacgtgatgtcgttgtcttggcagtaggcgttgttgttgccgtcctgtgtgttgcggaattcgtcgccggcgagcatcatcggcgtacccagcgagagcagcagcatgccgatcatgttcatggccgcctgttcgcgtgccgtgatgacgtctggatcatcggtgacgccttcgacgccgaaattggcggaatggttcaccgacgagccatcattattgttctcgccgttggcttcattgtgcttggagcggtatctggtgaggtccgtcagcgtgaaaccgtcgtggcaggacacgaaattgatggaggccggagcgccgcgcccgggttcggtggcgaacagatcggccgagccgcagagtcgcgtggccatctcctgcaaactgatacgaccgaaatcggagccgccgtccacatcctcaagccagaaggtgcgggccgtgtcgcggaagcggtcattccattcggcgaacggcacggagaattggccggtgcgccagccgaggttgcccagatcccacggctccataatgagcttcaggttgcccagcagcagatcggaacgcagggcgtagaggaacgggtgatgatgggtgaattcgccttccaggcgggccagcgtgacgccaaggtcgaaacggaaaccgtctatgccgatacgcttggcccagtatcgtaatgagtcgatggcaaaggtgaccacatgcgtgttggtgaagtccagcgtattgccgcaaccggtggtgtcttcgagtcgaccggtattggatttttgatggcgatagtaggccaggtcgtcgaggccgcgccagcagaccgtcgggccttcgacgccgccttcgcatgtgtggttgtagaccacgtccatgatgacttcgaagccggcctcgtgcagcgcgcgcaccatgtctatgacttcttggcgcacggcggccgcgcccttctcttgggctgctttggtggcataggagggttcgggggcgaagtagctgagggtggagtagccccagtagttcttgcggccgtgttcttgcaggaagagctcgtcctgcttggccataatcggcagcagttcgatggaggtgatgcccaatccctgcagataggcgagcgttgtggggtgggcgagtccggcgtaggtgccacgcaacgcttcgggcagccacggcgcgttggcggtgaagcctttgacatgcatctcgtagatgacggttttgcgccacggcacatgcgggtgctgcgggtcgccctcatgcttatggatatcgcgatcgtcgatggccacggataccggcacatggccgagcgagtctacggtgctcatggcaccgtatgccgagccggttaccttgcgatccacgacatcgcattcataggagaaggcggcgggggtgagctccatggagccgtcgatgcccttgccatacgggtcaagcaggaatttgtatggattgaagcgcacgccgtgtttcgggtcccatgcgccgtccacgcggtagccataacgcatgccgtcccatgctttgggcaggtgcacgtaccacaggccgtagttcggtccggtcatgcggaacagggtctcgcgcagatacaaatgttcgataatgcgcgtgcacaccggaaactcatggatctgctggatgaacgaggcgttcgggccttcgaacaggcggatggcgtcttggaagaaggcgccgggctcgtcaatgggctccagcacacacagccaaacctgatcggcagtttcggaacgaacaacgacgtcagccccaccgtcgtcagtgaagtacagccctgggcgagtggcgtaacgatgcaacggtgggtttttcatacctccattgtagacgtgttgtcacttctggtggaagcccttgatttcctgccgcgttccgcagcaccacagatatcgtcgagataattctcggcgaatcgcaatgcggcaccgatgatgttctggtcttcggcgcagtagctcttgcgcagattgaaatggtcggtgccgaacggactgcgtgcgatgacgcgcgccttcagatcctcgatgtcactgtcttcaagatgctgggctgcttcaccgccgacaatcacgtcgcccgcgatgatggatcgcgcgttgacgatggcctgcgccacgtaatccagccattcgtccatgcgctcgcgatgatgccgttcaccctgctcaagcacgctgaagaagccgggaatactttcgtaatcctcgggcaaggtctccggcgagcagtaggtgtccatgcaaccgcgctggccgcagtagcattcgcggccgcccggcaccagcgtcatgtgttcgatggcgccattgcacatattcggaccctgatacagcttgccgcccacgatcaccgcgccgcccgggcgtcgctccagatagacgcacaccgcatcggtgagcgtggagtcgaaccatagctcgaccatggcggaggcatcggaatcgtggatcatcatgcacgggtaatggaccgactggctgatggtttcgagcgtaagccccgtgttgcccataatggtgccgaaggtgatggtggtggcgtcgggggagaggatgccttggatggcgaacgagacgccgagcactttgccgtgcttcttttcgacgtcggaggcgaagttgttgatgatgccgccgatacgctggtagtaaacgttggtgttgcggtaaggcagggcatcgttgcgtttttcgatgacgttgccgtacaggttaatcgcgcacaggcgcagttcgttggaccgcatcactacgccgatggcagtgcgatgatcgggattgaactcataattttgcgccttgcgcccgccggtggaatcctgcagttcgcctttgcggatgagtccgtcatcttctagggcgcgcagattttgggtgatggtgggcaggctgaggccgagttcgcgttccagttcctgcttggtgacatggctatggccatacagatactgggtcatggcactgcggttgtgcgctttcactgcggtcgatggcattgccctcatatttacccctttgtacgatgagatatatgtaagtatactttatgaaagtggctttcatgtgcctcgacgcggagattatgaggcaacaatcgtatatttgtaggcgattttgggcacttttttaaaccaattttctagaaatgtggggaaaatgagtacttttggaaacttgatttaagaaagttgtcggattgcgttgtttgcaagcatgtgattttcggtaaaaagtgaacaaaaagtaccaaatcgccgaataaagtgaggatttgttcgatatttcgcacaactcttaacaaaaactgttcaatatcgcacgtgaaacgccgtcgattttgtgcgtatgcatcgcgccggaccgttcggtatattgtgactcaagtcacatatgcaatgtgacaacgcatcaccggtcattttcggttactgaggcggtatcccgctggtgcaactgaggtgacgaggcgatggcccagaactttgccataataccccaagaagatcgaggaggaccccaagtggcagaagcaaagaagaaagtcgaagctgccaatccgaccccagaagagaagcaggccgcagctgaggccgaagttgacgcgctggttgcccgcgccaagaaggctctcgacgaattcgagaatctcgaccagaagcaagttgatcgtatcgtcgccaaggcctccatcgccgctctgaacaagcacctcgttctcgccaagatggccgtcgacgagaccggccgtggcctcgtggaagacaaggccaccaagaacatcttcgcctgtgagcacgtcaccaactacctggccggccagaagaccgtcggcatcatccgcgaagacgacgtgatgggcatcgatgaggtcgccgagcccgtcggcgtggtcgccggtgtcactccggttaccaacccgacctccacagccatcttcaagtccctcatcgccctgaagacacgctgcccgatcgtcttcggcttccaccccggcgcgcagaagtgctccgtcgaggccgccaagatcgtgcgcgacgccgccatcgaggccggtgctcccgagaactgtatccagtggatcgagcacccgtccatccaggccaccggcgcgctgatgcagcacccgggcgtggccacgatcctcgccaccggtggtccgggcatggtcaaggccgcttactcctccggcaagcccgccctcggcgtgggtgccggcaacgccccggcctatgttgattccgatgtggacatcgtccgtgccgccaacgatctggtgctctccaagcacttcgattacggcatgatctgcgccaccgagcaggccatcatcgcccacaaggacgtctacgaccagctcatcaaggagctcaaggtccgtaaggcctacttcgtcaacgccgaagagaaggccaagctggagcagtacatgttcggctgcaccgccggttccggcgtcaagcccgtgctgaactccgtggtgccgggcaagtccccgcagttcatcgccaaggctgctggcttcgagattccggccgacgccaccattctggccgccgagtgcaaggaagtctccgacgacgagccgctgacccacgagaagctcgctccggtgcaggccgtgctcaaggccgacaacaaggagcaggccttcgagatgtgcgagaagatgctcaagctgggtgccggccacaccgccgccatccacaccaacaaccaggagctcgtgcgtgagtacggcgtccgtatgcacgcctgccgcatcatctggaaccagccttcctcccttggcggcatcggcgacatctacaatgccatcgccccgtcgctgaccctgggctgcggctcctatggcggcaactcggtgtccggcaacgtgcaggccgtgaatctcgtcaacatcaagcgcattgctcggaggaacaacaacatgcagtggttcaagatcccggccaagacctacttcgagccgaacgccatcaagtacctgcgcgacatgtacggcatcgagaaggccgtcatcgtgtgcgataaggtcatggagcagctcggcattgtcgacaaggtcatcgaccagctgcgcgcccgctccaaccgtgtgaccttccgcatcatcgactacgtcgagccggagccctccgtcgagaccgtcgaaaagggcgcggagatgatgcgcgaggagttcgagccggacacgatcatcgcggttggcggcggctccccgatggatgcctccaagatcatgtggctgctctacgagcacccggaaatcgccttctccgacgtgcgcgagaagttcttcgatatccgtaagcgcgccttcaagatcccgccgctgggcaagaaggccaagctcgtgtgcatcccgacctcctccggcaccggttccgaggtcaccccgttcgccgtgatcaccgatcacaagaccggctacaagtacccgatcaccgactacgcgctgaccccgtccgtggccatcgtggacccggtgctggctcgcacccagccgcgcaagctggcctccgacgccggcttcgacgccctgacccactcgatggaggcatacgtgtccgtgtacgcgaacgacttcaccgacggcatggccctgcacgcggccaagctcatctgggacaacctggctgagtccgtcaacggcgagcccggcctggccaagaccgacgctcaggagaagatgcacaacgccgccaccatggccggcatggcattcggctccgcgttcctcggcatgtgccacggcatggcccacaccatcggtgctctgtgccacgtcgcccacggtcgtaccaac

SEQ ID NO: 1970 - DNA, 2737 bp, Unknown
  R17_18m  MAG No. k141_18329
gtcctgcaggtcggccgggatgtcggtggtgtcgtagtgagcgcccatatcgccggaaacatcgttccagacgtaagccttcatacgaatcagatcgacgacgccggcgaagtcgttctcagcgccgatcggcagctgcacgacaagcggggtcgcgcccagcttggtcttgatggtgtcgacggagtagtagaagtcagcgccgagcttatccatcttgttgatgaagcagatacgcggaacgccgtacttgtcagcctgacgccacacggtttcggactgcggctccacaccttccttgccgtcgaacacggcaacggcaccatcgagcacacgcagggagcgctccacctcggccgtgaagtccacgtggccaggggtatcgatgatgttgatctggaacttgtccttggtgtcgtgggactgacggctccagaagcaggtggtagcagcggactggatggtgataccacgttcctgctcctgcgccatgaagtccatggtggaggcgccgtcgtgggtctcgccgatcttgtagttcttaccggtgtagaacagaatacgctcggtagtggtggtcttgccggcatcgatgtgggccatgatgccgatattgcggacgtcgtggaggtccgaaatctcttcagccatctttttccttagttttactcagggcgagtgattaccagcggtaatgagcgaaggccttgttagcctccgccatcttatgagtatcctcgcggcgcttgacagaagcaccgaggccgttggaggcatccaggatctcgttggcgagacgctcggccatggtcttctcacgacgggcgcgggagaagtcggtcagccagcgcagcgacagggtgttggcgcggttcggcttgacctcgaccggcacctggtaggtggcgccaccgacacggcgggagcgaacctcgagggacggacggatgttgtccagggcgcgcttgagcacagccaccggttcctggtcggacttctccttgaccatatcgagcgcggagtagacgatgtcttcggcgatcgacttcttgccgtcaagcagaatcttgttgatgagctgcgccaccacggtggaaccgtagatcggatcgggcagcacgacgtgcttcttggaaggtcccttacgtgacatatctcttacttcgccttctttgctccatacagggaacgaccctgcttacggtccttgacaccctgggtatcgagcgcgccacgcacgatgtggtaacgcacacccgggagatccttcacacggccgccgcgcacgagcacgatggagtgctcctgcaggttgtggccctcgcccggaatgtaggcggtgacttcgatgcccgaggacaggcgcacacgagcaaccttacgcagagccgagttcggcttcttcggggtggtggtgtagacacgggtgcacacgccgcgacgcagcgggctgcccttcagggccaaagtcttggacttcttcggctttgcctgacgtcccttacggacgagctgttcaatagtaggcaacttgaattctccgattcagtggtttctcttgcttttgtgtgaccgccgcactgcgcccacacttttcagcacactcgcttggcatccgcctgttggcgacacccgacgaatcggaaaagatagcccagtccaccggcccgatggccttcgcccctcccgtcggcgcattgctgcgtgcgatcagcggtttgaaggatatcccagcatgctcgcctgttacataaggcgtgctactggcacacacgaatatctatactacgattccgccggacaacgacgcgccgggcctcgactcactagcttgggacaatccgcgccctgtacttttcctctccttctggcgcaacaatcccgggaatgcatcgcacaacacacgcacacacgccctcccaacgcaacattcccgggaatgcgtcgcgaaaaagcaaacgccacacagcaggtgcccccgcggagactatgtcacacgggggcaccgccaaggaggttacattatgtttcttttcaccacatgccgcttctgtgttatctgtttccagcacatcctcgtgctcttccatatccgatgggaacctctagcgacccggcctctttgccgtatcaccttgccgctttctgcattactaattatagcaaaaccgccctcgcgaaacgcccgatacatcaatcgggagtaagcgggagcggctatgttatgcgaggtaggaaaggtgagtgaccgactgactggagtcgtgccttacccgacctttctcaccatctcaggatttcaggcagcgaccttggcggccttgtcggcgtcgaacgggtgggccacggaaacggtgctcttggcggagcccttctcgccgttgtcagaatcccaatgaatctcgtgccggtcgtcatggttgcgccaccagctggacaggatggagccggagatgttgtgccacacggagaagaaggtggacggcacggcggcgagcgggttggacgcgaaggaggtcagggccagcgtggcgcccagggcggagtcctgcatgccgacctcgaacgtgatggccttctgctgcgcgtagcggaagcccttcgggtagatcctgtacatcagcttcgagaagccgaagcccagcgagtagccgcacagattatgcaggatgaccaccgggatggccatcagggagctggccacgaacagcttcggaccgttggcggcgacgaccac

SEQ ID NO: 1971 - DNA, 24202 bp, Unknown
  R17_18m  MAG No. k141_18495
ctccgtctacgatccctaccgcggcatcgtcacctacatccgtatggaggacggcgaactgcacgaccgcgaaaaggtccacatgatgggcattggcatgacccacgatcccatcgagatcggtgtgatcagccccgatatgacccgtaccaaggcactcggtgccggtgaggtcggctacatcatcaccggtgcgaaagatgtgagtcagtccaaggtgggcgacaccctgacctcggccgtccgcccggccaccgagccgctgcccggctaccgcgaccccaagccgatggtctacgccggtttgttcccgatcgacaacgcgcaattccccgaactgcgtgatgcactcgacaagctcaagctcaacgacgccgccctgatctacacgccggaaacctccgtggccttgggcttcggcttccgctgcggcttcctgggtctgctgcacatggagatcgtcaacgagcgactctcccgcgagttcggcctcgacctgatccagaccgccccgaacgtcacctacgacgtgaccgccgaggatggcagtcagcatcatgtgaccaacccgagcgaattcccggacggcaagatcaagaagatcgtcgagccgatggttgccgccgacatcatcacacccaaggaatttatcggtgcggtgatggatctgtgtcaggaccatcgcggcattatgggcacgatggagtacatctccaccgatcgtgtcgagatgcattaccgcattccgctggctgaaatcgtgttcgatttcttcgatcagctgaagtcccgcaccaagggctacgcttccctcgattaccatgaggatggcgagcagtccgccgatttggtcaaggtggacatccttattcagggcgagaaggtcgatgcgttcagtgccatcgttcaccgcgataaggcgtattcgtacggtgtgatgatgaccaagaaattgcgtagtctgattcctcgccaacagtttgagattccgattcaggccgcaatcggttcgcgtatcatcgcgcgtgagaacattcgtgcgttgcgcaaggacgtgctcgccaagtgctatggcggcgacatcacccgtaagcgtaagctgctcgaaaagcagaaggccggcaagaagcgtatgaagatgctcggccatgtggaggtaccgcaggaggcgttcatcgccgccctgtccaccggcgaggactccaacgaccgcgacaccaaagacaagatccgcgccgctcagaagaccgagggctagtgttcgaggtctacatccacgtcccgttctgcttgcggcgctgcggttactgcgacttcaacacctacacggctacggatcttggtgcgggggcctcgcgcggcaactatgccaatatggtcattcgtgaaatggccctgaccaagcagtggcagctcgaccacggcatcgaggagccaccggtctccaccgtgttcttcgggggtggtacacccacgattctcgccgcccgcgatctggtcgccatgctcgatgccatccgcaagatctggagcatcgcgcccgacgccgaaatcaccaccgaagccaacccggacacggtcaacgaatattacatcaatgagctcgctgccggcggcttcacccgcgtttccttcggcatgcaatctgccgtgccgcacgtgctcaaaaccctcgaccgcacgcatacgccggccaacgtggccgcaggcgttaatgccgccaataaggccggcctgcgctccagcgtggatctgatttacggcgcaccgggggagagccttgacgattggcgcacctcggtcacgaccgccatcgacctcggcgtgaaccacatctccgcctacgcactgaccgtggaacccaccacgaaaatgggtcgtcaaatcgcggccggcactctgcccaaacccaatgacgatgacgaagcagccaaatacgaaatcgccgacgacctgttcgccgccgccggcctcgaatggtatgaggtctccaactgggcccgccccggatacgagagccagcacaacctcggctattggcgcaacgtcgattgggccggtctagggccaggtgcccactcccactacaacgcggtgaccgaggctgaccacccccagtcggcttcgctgacagcccccgccagcgggggcaagtccgaagccattgcctctgcctcagctgatggacaggccaacgccgaacttggagaaaccaacgccgaactaggtatgatcaacgcgcatgggaacaactcccaagaaattcatgcccccgctggcgggggctgtccggcggatgccggactgggggtggtttctgtctcacacggtctgcgcagctgggacatcgcgcacccgcgtttgtggggcacggccatcaacgagaaccgtgtgccgtgggccgatagcgagacgatcactcccgaggaaaacctcgaagagctcatcatgctcgggctgcgcctgcacgagggccttggcctcgaccgcatcaaccgcgccatcaacgatgcaggtatgagcagcacgccccagactctccgaaccgtttcggttgaccaactcgcccccatgatcagcgaaggcctgattaccgtatccgataatcatcgagtggtgcccactcgtcgtggccggttgctcaatgactcggtaatcgaacagttcttcgattacgtcggtgtatgagtcggtggtatggtgcgcggcagtcgccattacccgttcgctagttgtggttacaccgtcagagggagcttttttgttttaccggcgggggagggaaccgcgtaggactacgtccggggcgctttgcacgtagatcaggcggttggcagtgccgccggtggcctccgcgtcatcgcggttggacaggatgctgtccacggcggcctggcccatttcggccagcggcagatgcacggtggtcagtggtgggaacacgtcggcggagtaggggatgtcgccgaaaccggtgacgccgatttcctgacccggctcgatgccgttggtgcgcaacgcggtcatcgcaccgatggccatcacgtcgttgagcgcgatgattgaatcgatgcctttgccgtcgtacagtgcgccttcgcccggcttcagcagtccggatcgggccatttgcatgacggccgcatagccgtcggtgcggctgaacttaccgtttgccacggctttcgggtccacggtgatgcctgcctcgtccaacacttccatcacaccggccagtcgttctttggaggagcggtgtgcgtcatcgcccttgagaatcgcagggcgcgtatacccggaatcgacgataagctttgcgatggcacgcgcgccgacgtcgttcgccacgtccacggccgggaagggcaggttgcggttgagtacgaacacggcatgtccgccggacgattcgtactggatgagttccgtctgcaacgcctggcgttccggcgtgtcggtgtattcgctttcggagatgatgatgccgcgcggcctggtggatacggacttacgcaccgcctccaactcctcgtgcggggtggctgccacgccgatggtcacggagatgccgcgttcggccgccgccttgaccacgccttgcgacacggatgcgaagtagggatcggagatatcggagaccagcagcacgatgttcggtgcagtgcctttggccactgcctgagcataggcgttgggacgatagttgagcttggtggctgcttccatcaccttgacatacgattggttgcgtaccttgcgggtgctgccgttgagcacacgggatgcggtggcgatggagacctgggcttctttggcgacgtccatcaatgtcgctggcgattgcgccttatcgttctgtacagccacgatcgaatcggtccttttcttccctgaaacggaaagcatgtctaaacgcttaccgcaatgataccgcagttttgcttgcaatagtagcattgtggattggaaagcctgaattttgaacaaaaaataatcacgcgaattacggaaagcgattaccgttccgcgtatcgtgcggtatgctcgaagcatgacgcgatacttatgtgcccctgactccttcaaagagagcctgaccgccatggaggcggcccgggcgatggctcaggggattgagaatgccgaccacgatgccgaggtccgttgcctccccatggccgacggcggtgaaggcaccgcacgtgcgcttgtcgacgccactggcggatcgatgcacgccgtgccggtccacgacccgctcggccgacctgtcgaaggccacttcggcctgctcgccgacggcacgaccgccgtggtcgagacagccgaagccagcggcctcgcactgcttgaagccaaaaaacgcaacccgttgattgcctcctcctacggcaccggcgaactcatactcgccgccgttcgttccggagccaagcgcatcatcgtcgggctcggcggcagcgccaccaacgacgccggtgccggacttctgcaggccctcggcgttcgtcttctggacgggaacggcaacgaccttaagcacgggggagcggccctcgctgatctggccaccatcgacatcagcacgatggacccggctctcaagaacgtctccatcaccgccgcctgcgacgtgaccaacccgctgaccggtcccaccggcgccagcgccgtgttcggaccgcagaaaggtgcctcccaggccgacgtcgccacactggacgccgcgttggcgcacttcgcgcaggtcatcgaaagccggctcggcgtcgctgtgaacgacgtgccgggcgcgggcgccgccggcggtatcggcgccgcgctgaaaggcttccttgacgccgaattccgtccgggcatcgccatcgtcatcgaacaatccggacttgatgcggccgcgcaatgggctgacgtggtgttcaccggcgaaggctccatcgacttccagaccaagttcggcaaaaccccggccggcgtggccgaaaccgccaagcgccacggcaagcccgtgatcgccgtcgccggacacatcggcacgggcatcgacgaactgcatgaggtcggcatcgacgcggtattcggcatcgcccccggtgccgccagcctcagcgaactgctggccgacgcggccgccaacgtgacccgcaccaccgaacaagtcgtacgaaccctacaactgaagcagcttcacaagctccctctgatgggccgagccgtgaaggaaacgccggaggcgtttccaggcgagggcttgacgacagtcaagccagccgaaggctccataattgcgggacgagctgccgcggcaaagccgtgactgagggggagacttgtggcgcagccgcaaaaaatggcatcggctttcagccgatacagtcattcgtctgcttctctccctcagtcagctgcgctgacggctccctcgtcagagggagccacacaattcggaaaggaagatatgcgcaccatgctgtacaccaaggtgaccagcatgctgagcaccacgggcatcgccagcgagaaatacgccttcggaatcggcgccttttcgaagagttcgttatccatttccgtcccttggtgttttcgttcttcagtcactgcgcgggatgccgttcggcgtgcatcacaggcattgtagaggcaacagtgtggacaacgggcggggaaagtatctcatgatgcggtgagggcgttgatgatgacgcatcgtgtattggtggccgtgtgcatcgtatgtgaacctgtgctggcacggcgtacacacgatgggaaaagaaagaatatatggaccccgttgtcccggttattgttcagttattactgtgttgaattattgcgttattcaattattgtggtgtgccggccgattgcggcctgcgggggattgccttcgtatgtgtcgtgcaatctcatgaatgggatcgttcgctagattcagcgagcgtccttgttggcggcgttgatgatgtcggcgaacatcttggagtcggcgtagccggcgcgggcgatggcgtccataccggagagggtgaaaccgcgaatcatggaatccatgaatgacataatgtgttccttgtcttgacttgcaaagccgtgggctttgcgatgtgttgttgtttacgttatgagacgggccgtgtgtgagcggcgagtcagggaagaggctcagcgagcgttcttatcggtgtcgttgatgatgtcgagaatcatctgggagttggcgtgaccggactgggccagggaagtggcaccgtacatagccagaccgcgaatcatggaatccttgagagacatcatgtttcctttcgttggtcaaaaccttgtggctttgagttttgtttatcggtttctttctgaaaccggtttcagaataacgcagtccgatgacaaacgcaaggggactattccgctctcggcgtttctggcggaatatcgccgttctatagataccgttcggtagttaagaggctgtctagtcgactttctgacggtcttgttctgggcgcatggttttcacgaaatggcctcatgtcgcggaaatcgtacgctgagtcgtcgtaagcgtacggtcttcacgaaatggggtctcatctcgtgaagaacgtacactgagtcgttctgggcgtacggttttcacgaaatggggcctatcttcaccggattttgggcacaccggccttgagcagcttggtctcaagattgatggggcgtagcagatcctcatagaacacatggacgatttcggtgacgccctgttcccggagatgccgatcacgtctgcggtcgtactccattttcgcctggaggcttgcgcgattcttgttgctggtgtcggcgtatttggccatgccgtcgtattctgccacgatgatgcggccgtctgcgagcttccaacagaaatcgacgcgatatggcattgcgggattgtcgggattcatgaactgcacctgcagcaggggaatgccgaaagacaattcggtgatctggccacgcatcaatgattcgccgccgttttcgctcaggggatccgcgtacttcagcagcttggtcacggagacctcgtcgcagacgctttgaatcatcagcgactgcacctcttcgatggtcgtcagggactttctcagagccgaatcgtatatgggcagcgcctgtgggaatgggaatgccgcgcagtcgagcagcgttcgcgccggagtcgtcaagagaatgccattatgcttccgcgtcggaatccgattgatatagatgcggttgagacgcgcctcgtctccgccgccgatgccggacttcgaggcgatgtgcactgtgccgtcgtgcagggaatagttgtgctgcagtccgtatacgcacgccgcactcaaccccgcaaatacccactgagggtggattgcggacagcgcacgtatgacctgcaatgactgttgctctctggtcatggtgttccaaagtattcggtcggcgtacaggttcttatacggtgacaccagctccccggcatgcaggcgacgtttcagggcgcgccgttgcgcatcactggtgccatagcagcagcgacgctcctgcttcgcctgctgcagcagtgcagaaacttccttgtgttctttcatatctcgacgctaagggtgattttgattgttgcacaagctcaaccggcaaatgtgaatactatgtcacgcgaattgttggtgtggataacttgaatcgacgtcgacggctttgccgacggtcttgtcggaggcgatattagcctaggacaccttgctgcgccgccttccataccgagaacagtcatcagtgacaccgagggcatcttcagcgtatgttcttcacgaaatcagctgccatttcgtgaaaaccgtacgctcagaatgactcagtgtacgttcttcacgagatgaggccccatttcgtgaaaaccgtacgttgacgacgattcagtgtacgttcttcacgaaattagggatgatttcgcggaaaccgtacactcaccgcaactcagcgtacggttttcgcgaagttattgatttggatataggttccccgtcatgaactacaatgaatcgcggcgaaaaacggggaaccgaagtcggagcgcggctgaacggatatgggtgtgactggatgactgccatggtgatgccggttctccttgacgtacgcaataacaacaactgacaacaacaggggagacaaggatggcgagaagtgcgggccgcacccgaccggtgatcaaggacgtggccagactggccggagtctcggcaccgaccgtctcccggtatctcaacggcaccgtcaatgtcaccgaagacaagcgtgaacgcatcgccaaggccatcaaggagctgggctatgagccgagcattgtggcgcgcgccctgtcgaaccgggagatggactccgtggtggtgttcgcggccaatccttccgccttctccacgtccgaaacgaaccatggggtcgaggccgccgcccgtaaacgtcggttcctgctcaatatcgtttctttggatgagtccgacatggactccgtcaaggctcgtgtgcgcatgggtttgtcgatcaggccggcgggcgtgatcgtctacgagtacgaccgggccggcatcgccgcactggaatacattcccaaagatatgccgatggtcgtggtgggtggcagcttcggcgacggcgaataccagatcatcaacgccgaaagggatggtggccgttggatgaccatgcatctgctggatctcggccatcgcaccgtgttccatgtggggcgcccggaaggaccgaccgataacacccgcaccaatgggtggcgtgacgcgctcaaggagcgcggcgtcacggtacctgacccaatcatcgtgcccgacgatgatttggaggagtcggtcaaggctgggcgcaccttgggccgtcgtggtgatgtgactgcgattttcgccgacaacgacgagaccgccatcgctgtgatccgaggtctaagggaggttggtcgccgcgtgcctgctgacgtgagcgtcgtaggctttgacgaccgcaacttcggtgccatgtggaatccggcgctgaccagttacacccagaacttcctggacatgggggagcggtccttccggatgctgttcgaacagattcaggccaagcgtgccggcgatgacgcgccgccctcgcaggtcgaagtggtgcaaggcaagccgtgtctgcgtgcctccgaacgcgcgtacggcgacggcgaaatcgcgtagtcgatggggcgtgcgtatcaatcgatagtgactgtagcgcattcatatcgtgacgaggagtctcccatgccgaactgtaagcgcttaccttaaatagttcataatgtgatttacgtcatactaatagatgttctgaatcatagtgttctgcaaggattccttgcagaaaatcactatttatcaacagttttcgaaaagtccgcatgatgggcgactgtgagcacgctttatggtaatcgctttccgtagtgttattgttacagtgtgacttttgaacaatcggtaactctgaagactcagccccagacctcgggcactatctcagcggcagacgccgcgatgcaatcggcccgcgacgaacgcatccccggcaaactcatctgcgcgatcgtggccgtcggctcactcgcattcttcggcatcctgaccgaaaccgtgatgaatgtgctgttcccgcagctgatgggcgtgctccacatcagcgaggccaccatccaatggctcaccaccggctatctctggtcgtgtcgattactgtgccgctcagcgcatggctgcgccgtcgcttccgccagcgcagcatcttcctggcggcaacgcgatgttctccacgctgcagcagttcacgggtgcggccggcaccactgtggtgggctaccgtgatctccgtgttccagtccggctcgggcaaggtgggttccgccggctatgccgccgccaccgtgaccggcgcatagattgactacgcgatcatggctgtggtcatcgttatcgtgttcgtcgccatgctccacgccctgcgtaaccggaagtagatggtaagtcgagtggcaccatgctaccgcgcaatggctgggcatggagttttggctaggaatcgttcgacaggcgttggcgcggccgctgagagcattcgcgtcgaaaggtttgccggagctcgttcggcgtggaatgggccgattcaccggtgattgttggtcaaacagccaatgctgacccttctgccaatggttagcgaggttcctatcataagcatttcggagagcgatctcgaaaaaggcgacatccttcacgaggatttgaccaaggtcaacattccactcgtataaagtaaggctgtaagcgcatcttggtggcaagcgtcaaggtatgtacggaatcgcggggcggaaagccactcctcaatccactgcggattggtaataacggatgattgtaacgcatgaatcacgaggcccccttacctcgtattgcaatgccccggtgacatgaaaaacggcggtcaacacggggcttgtacattaaggatacaggaagggtagttataagttgctgatatgccgttttttacgatagtcatcggcctctcccatacggcggaacaggaactgacggatgccgagatgccgtgattcggcgggaggacctgtactggcccagtccttctgctcggtagcggtaccgctacgccgactcttcccgacgctccagtgccgccgatatcagtgaatgcccagcctgatgtcggtagagttaaggctattggcttggtctcgacggtgagacttctccaatggccaatatgcactgttgcaaaggagtatgcggtatgcaaccaatcaaagccattcaatacggctgcggcaaaatggcgaagtacacgattcgctatatgcacgagaaaggcattcaaatcgtcggtgccatcgacgtgaatccggaagtcgtgggcatggatgccggtgtgtttgcaggcatcggccccatcaatgtgccgattcgcgccgatgccgaggctgtactcaacgagtgcgacgcggatatcgcggtagtcacgctattcagcttcgagaacgaaatcgccaccatgtgcgagcagtgcttggcccgcggcatcagcgtgatcaccacctgcgaggaatgcatctacccgtggaccaccgatccggccaccacgaaccgtctcgacatcatcgccaaggaagccggtgccaccatggtcggctccggcatgcaggacatctactgggtgaacatggtctccaccgtcgccgccggatgccacagcatcaagaagatcaccggtgcggtgagctacaacgtcgaggattacggcctggctttggccaaagcgcacggctgcggtctgaccgccgaggagttcgaggccgagcttgcgcatcccgaaaccgtggtgccctcgtatgtatggaattccaatgaagcgctggcccagaagcttgggcttaccatcgcatcgcagacccaggccagtgtgccgtatttcagcgatgtcgacgtgtattccgagacgatggacgagacgattccggtcggcaaatgcatcggcatgtccgccgtggtaaccaccgaaacgaatcagggcatcacgttggaaactgcctgtatcggcaaggtgtacgggccggatgatggcgatatgtgcgattggaagatcgagggtgaaccggacgtggagttccacgtggtcaagccggcgaccgtcgaacatacgtgcgccacaatcgtcaaccgcattccggacgtgctcaacgcgccagccggatatgtgacggtcgatcagctcgatgaaatttcatatctcacgtatcccgccgcgctgtacgtggcatagacccatattttcagggatgaaggccggcactcataagggtgccggccggtatcaggcggccagagtcgacgtgcgtggcatcacctggaactggatatggtcatgggtgatgtcatcgggccgttcatgccgtaggttcgactcgatcagcgtcaccatgcgatcgataaccgtacgagccattgcggggacgtctatcgtcacagtgctaatgggtgggttggcgcagtcggagaaggggatgccgtcgaatcccatgagccgtacgtcgtcgggcacgcggatgccatgttcggtgagttcgcggagcgcgccgatcgctatggtgtcagacatgcacaggatgccacaatcgcccgggacaggcgtcaggaccgcaagcagcatcctgctcggcatcggcggcgacatcgccaacttcaaaagcgcggcccacctggccgcccacgccggcatcgctccggtcaccggccagtccggcaccagcatcaagaggcgagaaaccctccagacggggcaacaaacgcttatagactattgcgccttgtataaatgcgaactgccagtcaaccttaccgttgactggcagttcgcatttatcgctcccgctggcgggagctgtcatgcgaagcatgactgagggtggtccacagccgccaatccgtaacatcacccaacgcagcatttcacgatacggacgtttccgtatcgtattttcgtgtggccaaatagacatttcgggcgaaaaagttcgaaatacccccataactggccataaaaacaattgcttgagaatcactattgacttttatggcgactcggtatatggacacgcgaaacgaaaatgacatggagcaacggtactgtgtcaacagcaatgaacgaagaggcacgattcccttacgtgcccacaagcaattgaggtgattccggtgacattcaaagccccgctcgatctcacggtccacgctccggacggtatgtatgatcccgccaacgagcatgacgcctgtggtgtgggtatggtcaccactttgaacaagcgtcctgaacgcaaaatcgtcactgacgccattgaggtactggtcaatctcgaccaccgcggtgccgtgggtgccgaggagaacacaggtgacggcgccggcattctgatgagcatgccggatgagttcatgcgtgccaccgtgcccgccgaactgcccgaagccggccactacgccgcaggcatcgccttcctcgaccgcgacatcgaaacctccggtcagcaggaacaggccattgccaagatcgtgcgcgaggagggccttgaagttctcgcatggcgcgtggtgcccaccaacccggacggcctcggcctgcaggcccttgccgccatgccgggattcaagactctcgtggtcgcctctccggacggtgctctggccggcgtggacttggatcgcaagaccttccgcatccgcaagcgcgtcgagcatgagataggcgtctacttcgcttccctgtccgcccgtaccatcacgtacaagggcatgctcaccaccatgcagctcacccacttcttcgaggatctgaacgacgagcgcatgaaggccaccatcgccatcgtccactcccgcttctccaccaacaccttcccgagctggccgctggcccagccgttccgtctgctggcccacaatggcgagatcaacaccattcagggcaaccgcaattggctctccgcccgtgaaggtcgtctgagcagcgaactgctcggcgagttcgagccgctgctgcccatcaccactccgggctactccgattctggcaccttcgacgagtgcctcgaactgctgcacctcgccggccgttccctgccgcacgccatctgcatgatgctgccgccggcttgggagaagaacacggatctcgatccggacgtgcgcgccttctacgagtacaacaacacgcttatcgagccgtgggatggcccggccgacatcgtcttcaccgacggcacccaggtcggcgccctgctcgaccgcaacggcttccgccccggccgctggcagctcaccgacgacggctacatcgtgctggcctccgaggccggcgttctgccggagatcgcgcaggagcacatcgtgtccaagggccgtcttgagcccggtaagatgttcctagtcgacaccgccgaaggccgcatcattcccgatgaggagatcaagaagaccctcgcctcccagcacccgtaccgcaagtgggtggaaggcaactcggtcgagatgagcgatctgccccgccgcgagcacgtgagccactccggacagtccgtccagcgccgtcagcgcgccttcggctacaccgaagaggatctgaagctgttgctcactccgatggccaacaccggcaaggaaccgctgggatccatgggtaacgatgcgcctatgcccgcactctccagccgcagccgcatgctgttcgactacttcacccagaagttcgcgcaggtcaccaacccgccgctggactgggagcgtgaggagatcgtcacctcgctcgaatccgccatcggccccgagcctaacctactggccgattccgagctgcacgccaagaagatcctcatcccgctgcccgtggtcaactctgatgagatggcccagctcaagcgccttgacaaggcccgcatcctcggcggctactatcgtccgtacgtggtcaagggcctctaccaggtcgccggcggcggcaaggccctcgaagagcgacttgacgagatctttgccgaaatcgatgaggccatcgccgacggcaagaacttcatcgtgctctccgaccgtgaatccaaccacacgtggggcccgatcccgtccctgctgctgacctccgccgtgcagcaccacctgctgcgccgccacacccgtacgcagatctccatggccgtcgaggccggcgacgtgcgcgagattcaccacgtcgcactgctgatcgcttatggtgccgcctgcgtgaacccgtacctggccttcgaatccgttgaggatttggcccgtaacggctacctcaaggtcgacgcggacaccgccgtgaagaacctcaccaaggcgctttccaccggtgtgctcaagatcatgtccaagatgggcgtctccaccatcatgagctaccgtggcgcacagctgttcgaggctgtgggcctgagccaggaagtcatcgacgaatacttcaccggcaccacctcccgtgtgggtggcgtgggccttgacgagatcgccgaagaagtggccattcgtcaccgcgtggcctacccgaaccagtggagcgcatccccgcaccgcaacctgcgcacgggcggcgactacaagtggcgtcgtaccggcgaggaccacctcaacgatcccgaggccatcttcctgctccagcagtcgacccaccgtggcgactaccagatgttcaagaagtattcgcaccacatcaacgacacgtcgaaccgactcatgaccctgcgtggcctgatgaagttcaacaacaaccgcaagccaatcgacatctccgaagtcgagccggcctccgagatcgtcaagcgcttctccaccggtgccatgagctacggttccatctcacaggaagcgcacgagacgcttgccatcgccatgaattcgattggcgcacgctccaactccggtgagggcggcgaatccgacgatcgtatcaacgacccgcagcgctacagccgcatcaagcagatcgcgtccgctcgcttcggcgtgacctccgattacctcgtgcacgccaccgacctgcagatcaagctcgcccagggcgccaagcccggtgagggtggccacctgcccggtgccaaggtcccgccgtggatcgccaaggtccgtcacgccaccccgggcgtggagcttatctccccgccgccgcaccacgacatctactccatcgaggatctgaagcagctgatcaacgatgcgaagatggccaacccgaaggcacgtatccacgtcaagctcgtttccgagttcggcgtcggcaccatcgcggctggtgtggccaagtgccatgccgacgtggtgcttatctccggctatgacggcggtacgggtgcagccccgctcaacgccatcaagcacgccggcaccccgtgggagatcggcctgtccgaaacccagcagacgctgatcctgaacggcctgcgctcccgcatcgtcgtacagtgcgacggcgagctcaagaccggtcgtgacgtggtcatcgccgccctgcttggtgccgaggaattcggcttcgctactgcggccctgatcgtggaaggctgcgtcatgatgcgcgcctgccagaagaacacctgcccgcagggcattgccacccaggatcctgagctgcgcgcccgctttaagggcaagcccgagtacgtggtcaacttcttcatgttcatcgctgaggaggtgcgcgagatcctcgcccagctcggcttcaggactcttgaggaggccatcggccacgttgagtgtttggatcaggacgaggccatcaagcgctggaagtccggcggcatcgacctgaccaacgtgctcaagcaggccggcccggtacccggcacgatcctgcaccagaccatcgagcagaaccacgagctggagaaggcactggacaacaagctcatcgaacttgcccagccggccctcgaacacaaggaacccgtgcgcatcgaaatgccgattcgcaacgtcaaccgtacggtcggcaccatggtcggctacgagatcacccgccgttacggcgaggaaggtctgccggacgacaccatcgacatgaccctgcacggttccggaggccagtccatcggcgcgttcatcccgcgcggcgagaccatgcgcatctacggcgaagtcaacgactacgccggcaagggcctgtccggcggtcgcatgatcgtgcgcccggaagacaccgtcaccttcgacaagcacagcaacgtcatcgccggcaatgtcaccggtttcggcgccacttccggccagatgttcgtggccggtcgcgccggcgaacgtttcggcgttcgtaacggcggtgccacgttcgtggtcgaaggcgtgggcgaccacggctgcgagtacatgaccggcggcactgttgtggtgctcggccccaccggacgcaacttcggtgcaggcttctccggcggtaacacttatgtgcttgacctcgatatgaagaaggtcaacccgggtgccatcaagtccggtgcactgctcttcaagtcgcttgatgccgaaacctccaagctggtgtacgcactggtcaagcagcatgccgaagagaccggttcccagttcgccgcggccctgctggaggactggaacgaaaccgtcaagcggttcactcacgtggtgccgaagcagttcgtggccatgacgaaggccatggaagaagccaaggccaacaatgtagatttcaatgcgcccggcacctgggaaaaggtgtacgagcaggttatggaaggagcgcgctgacatgggcgacccgagaggattcctgaaggtccgtacccgccgagagttggctgaacgccccgttgaggagcgtatcaaggactggttcgacgttcacgccgaaaccggcctgcaaccgtggacccaaacgcaggcggcccgctgcatggattgtggcaccccgttctgcatgaccggatgcccgctgggtaacctgattcccgagtggaacgacttggtccgtcagggcaagtgggaagacgcctacaaccgtctgtccatgaccaacaacttccccgaagtcaccggccgcatctgcccggccctgtgcgagcaggcctgcgtgctcggcatccaccagccgccgaccatgatcaagcttgacgagcagaccatcatcgatcaggcatgggatttggactacgtcaagccgctgccgccgcagcgtctgaccgaccagacggtcgccatcgtcggctccggccctgccggcctcgccgccgcacagcagctcacccgcgccggccacaccgtcgtcgtctacgagaaggacgacgccatcggtggtctgatgcgttacggcatcccgaacttcaagcttgagaagggtctgcttgaccgccgtgtcaagcagatggaggccgaaggcacccgcttccgcaccaacgtggaaatcggcaaggacatcacgtgggatgacctgcgtgaccgttacgacgccgtcgtagtggccatcggctcccgcgtgccgcgcgatatgaagattccgggccgcgagctcgacggcatccacttcgccctcgacttcctgcccgacgccacgcgccgtatcttcggcgtcaagccggtgcacgacatcaccgccaaggacaagcacgtcatcgtcatcggcggtggcgacaccggttccgactgcctcggcacctcgatccgtcagggtgcgaaggacgtcaccgtgctacagatcatgccgaaagagccgtcaagccgtccggacaacagcccgtggccgaccttcgcccgcacctaccagaagacctcctccatggaagagggcggcgagtacatctactccaccgactccgtgaacttcgagggcaccgaagaggagaaggccaaggtcaccattgataactcgaccaccgccgaaggcttcgtggccgatgagcgtggtcatgtcaccggcttgaaggtcgtctccgtggctcccggcgaaaatggtccgttcactcgccagcctggcactgagcgcgtgctgcccgccgatctggtcctcatctccgtgggcttcctgcatccggacaccgagaccatcctcgaccagctgcccgtcgaactcgacaagcgtggcaacatcgctcgcaatgacaagttcgccacctcccaggatggcgtgttcgtgtgcggcgatgccggccgtggccagagcctcgtggtctgggccatcgccgaaggccgctcctgcgccgcagccgtggacgagtacctctccaaggaaaagagcgagctgccggccccgatcaaggccagccagcgtccgatgatgctgcctcgctgaatactgttccaaacagaaacatgaaaatcccttcttcatgaggggatttttgcgtttctgggattaattactgccttgagtcttcagtaatgtttatatttcgagaatattgcatacatggttaacatgaagctcctatggtgtctttcgtcgccaaaaagacgacgccagaatatttgggagagattcatgaacacacgtcatgtcacttcactggtcgcggccggtgcggcaatcgtcatgctgctcagcggctgcggatcgaccggtacctccaattccagcaatgcttcagattccaatatcatttccgtgtacggcagtgagccggcacacccactattccccggcaacaccactgaggccggtggcggcaaggttgtagaccagctgttcgcaggtctggtgacctacgatgcgaagggcggcatccacaacgaggtagcagacagcatcacctccagcgacaacgccacgcattacgtcatcaagctcaagagcggatggaagttcaccgacggcactccggtgaccgcgcactccttcgtaaacgcatggaattacaccgccaacagtgccaacaagcaggccagcgccagcttcttcagcacaatcgaaggctatgatgatctgcaaaagccggacgtggaccccaaggccacgctgagcggcctgaccgtcgttgacgacaacaccatcgatgtcaagctcagccagcccgactcggcattcccggtcaaggccggcagccacgcctacatgccgttgcccgaatccgcgttcaaggacccgaagaagttcggtcagcacccagtgagcaacggcccatacaagttcgtgtcctggcagcacaaccacagcatcgaaatggtgaagaaccctgactacaagggcaatcgtgtcgccaagaacgatggcctgaacttcaagatctatacctcgcccgattcggcatacgccgacctacgcggtggcaacctggacttcacgaacacgattcctgacaccgcacttacctccttccaatccgacaagtcgctgaaggcatacaacgagcccggtggcaatacgctcaccttcaccattcctgaatggctggaacacttcggccagaacgaggaaggcaacctgcgtcgtcaggccatttccatgtccatcgaccgcaagaccgtcgccgagaagatcttccacggcaccgccacgcccgccgtcgacttccttgcagccccaatcagcgcctactccaaggaactcaagggaaatgaagtactgaagtacaacccgtccaaggccaaggaactgtgggccaaggccaacgccatctccccgtggagcggtgagttcggcattgcatacaatgctgatggcactgcgaagaactgggttgaggcaatctgcaactacatcaagaacacgctggatatcgatgccaagagcatcccgatgtccacttccgacgaattcctgtccaatgtggattcaggcaagatgacctccgcataccgcagcggttggggccctgattatccatccgcggacaactatctggtacagctgtacgattccagttcggccgacggcaagggcggcaacagcggcaactacaagaaccccgagttcgatgccatgatggacaaggctctttccgccccgtccaccgaggaagccgacaagtattatcagcaaggtgaggagattctgctgcaggaccttccggctatcccgttgtggaaccagaatgccaccgcagccagcacctccgcagtctccggcgtcgcattcgactacggcggcggcccagtgttcaccgcactgaccaagaagcagtaagcagtaagtaataaacagacagcgctagccccccgctggcgggggctgtcggcaaagccgactgggggtggtctcaaacagcagaccacccctaatcttgttatatgagcgagctcccgtaagcgggagcaatcgagaacatacaggagcacattaactatggaattcaccgtatccggcactaccgtgcgattcgatgaacgaacaatgcagttcgcttttacgcgcgacggtgccgaatggaatacctgcgctgatttcaagccgaccctgcaatgcgcgcaaggcaccttcgcgttcgcggatgccacttccatcacccatgagcagcgtgaaaccggcacgggaaccggcattcgcagcatcttcaccggctttgggcacagcgcatactcctttgaaacctatgtatgggtggagcgtgcctcaggcgatgtgctcttcgaatggattccgctcaatgagcaaggcctgaacatcaccaatgtgacgtggcccgcagccatggacttcgattgcgccgacgaccatgacacgacactcatcacccatgagcaaggtgtgatgatccccaacacatggcctaccgccgtgagcaccaaagatatcgccttcgacggtcgcttcgaaacggctggcggttacatgccgtggttcgcgcagctccgcgcagacggacacgggtatatcgccatctgcgaaactccatggaatgccggttacggcatcgaccatcccagcgatggcccgtacacccatatcaatacttggtttgagccaagcctcggcacaatgaattatcgccgcgtggtacgctaccagttcctcgaccacgccgatcacacggcggtgtgcaaggcctatcgttcgtacgtcaacgaacgaggtcgcctgcgtacgctcgccgaaaaggcggcgcgcaatccctccgtgcgtgacctgattggtcgttcatgggtgcacatcggcatcaaaaccaaagtacagcccgactcgtactactacgataaggaccaccccgagaaaaacgattcattggtcacctttgcgcagcgcgaaaagcaaatgcgaacattgcacagcatgggtgcaggccgactgtacatgcacttggatggttgggcacagcccggatacgacaacgcacaccccgactatctgccggcttgtcaggaggcaggcggctgggaaggcatgaagtcgctggtcgacgcctgccatgagcaaggcgatattttcggcacgcatgaccagtaccgcgattactacttcaccgcgcaaacctttgatgccaacaatgcgattcggctggcagacggtacgatgcccgaacacgcacgctgggcgggcggccgccagacctacctgtgcgccgagctcgcaccggactacgtacgccgcaatttcgccgaaatcgccgcgcatggcatcaagctcgactgtgcatacttggatgtcttcacctgcaacgaaggcgacgaatgctcgaaccccgaacaccgcatgacccgccgcgaatgctttgaccgccgcgccgaatgcttcgaatatctgctctcgcacggcatcctctcctcgtccgaagaggtatcggactgggcagtgccaagcctgatattctgccattacgcgccatacgacttccagatgcgctcacccaacgagccgcgccaaggtgtaccggtgccgctgtataacctcgtctaccatgattgcgttatcgagccgtggatgatggagcgtgtggtggacggcgacgattacatgctgtacgccttgctcaacggcggagctccatacctgattcgcgatgccgcatacatcggcgttgacggcgacatggacgacgaacagcgcgctcgcacggaaaacgacatcgaacgctgccatacggtcgctgcattccatgagcgggtcggcatgcaggaactggttcgtcacgagttcgtggatgatgatccgctggtgcagcgttcggtattcgcggacggcactgcggtcacttgcgacttccatacgcaaacctatcgcatcaccgattgaccgcatcactgactgaaaaaacaatgacacacagtgggttccgatggactggtggcaaattgccgccgataagcgggtaatatagccaacagtgtcaccgtcgaaacaggagtagtggaatgccgaatcgtgcagaacgccgtgcccaagccaaagcaggccgcaggggagtgccgtcgcagtatgaccagacccgtggccgtggccgttcgggaatgattgacgaatatcagctgcagcagaagtcccagcgtctgcaggacggcaccgacggcaccgaatggaagcccagcggcggtacgattgcggaccccgaaaccctgctgaccactaacccgaactacacgaatccgaagatgttcaaggcaccgcattcgctgcgtcagtggttccgtgtgggcagctggacgctgatcgctatcgcgattatcgcgttcttcgtggttatgtggctgccaagccatccgatgtggctggtcatcaccgtttccgcggtgttcattgtgggtgtgctgagcctgttcttcaccgctggcgattccaagcacaatccgaatttggatcagaacggcacggcagtctgatcttttgcccggtaaatccggcttgaaaagcaaaacgcacgacggaagttgtgcgttttcttgtatgcggtgccctaaagtaagaagtgcttgagtttctttctgacgcacgaaggagaggcagtccgatgaaagttgatattctaacccgcgaatacccgccgcatgtgtatggcggtgccggcgtacacgccgaggagctgtccaaggttttggccgagcgcattgacgtgaccgtgcgtgcgtttgatggcaagcgcaccgaggctgatatccccgcgattcccaatgccgctaatgccaagggcagtctgaaggttgtcggatacgatacgccgtccgagcttgccgatgccaatccggcattgaagaccttcggcgtggatctgcagattgccaacgacgttgacgccgatatcatccacgcacatacatggtacgcctgcctggccggctacctggccaagatgctgcacggtacgccgctggtcatcaccgcccactccctggagccgttccgcccatggaagcgcgaacagctcggcggcggctacaacctgagctcctggggcgaaaaggaagcctacgagaacgccgaccgtgtaatcgccgtttccggtggcatgcgcaaggatattctgaccgcctatccgaatcttgatccagacaaggtggttgtggtctacaacggcatcaccatggccgacttcgctaccccggcaccagacgatccgggttggaaggtgttcgagcgttaccacatcgaccgttcgaagcccaccctgctgttcgtgggccgtatcacccgccagaagggcctgcca

SEQ ID NO: 1972 - DNA, 8071 bp, Unknown
  R17_18m  MAG No. k141_18782
gggcaggaacttggctatggtcaccatcacggcgggcatcatgtcaaccggcaatgcgacgcccgacgtgaacatgatgagcaggccgaagatgttggcgaacccgttggccgcctcttccgagagcccgaactcgctgagcatgaatccgcaggcgacggtcatcagcgcgtacacgcaggtcgcgccgaacgtcatcagcactcccccgacgctcaggtgcaacggatcgagccccgccgccatcatcagaccgattgacagcaccaaatagccgacgcatacgacgagcgcgaatccgcccaacgtcagcaaccgctggagtcccatcaggaccatgcgtcggggcgaggcggtgagacgccgccgcacctcgccggtggtgaacgcgcccaggatcatcgatccgcagatggtcatcgccagggacagcgggtacagcgcggttttcatggtgccgccgaatccgctgaccgccgtatccgcagcgcttgccgactcctcggtcggcgtatcgaccacggcgatctgatggttcacgtctgtatcgctggccgattcggcggccattttggcggcctgggacagatccttgatatccggcttgtcgacttgcccttccggcagcgagtccagcatgtcttggtccagactcgcgccatcaaaaccggcggcccctcctgtagcgttcatcatgccggcgagcgccgcctggtcgaccctcgtctgcgcgccgatcagtgcggtgcgggtgagcgagaggaacccgccgacgttcatccgcgccatcgacccggagccggatgcgtagctggtaaccgtgtccacgttcggcggattgtcgccgtccgccgccgcggcgacataatcgtcagcgaatccgtcgggaatgatgacgatcaggtccacccagttcgaggcgacggcctgttgcagcgtttcgctggtgtcgtcgaggtccaccagttcgctggaatcgcgcaggtaggcgcgcatcgacgtggcgatatcaccccggtcggagtcgcggtcgatgatggcgacgcgcgtcttggtcgattcgaacaccgcggacatggagccggatgcggaggtcagcatcgcccagctgatggacatcatcaggatgcctatgaatacgaggtagatcatcaggtagacccggtgcgcgaacagcacgcgcagcgtggctttacaggtgttcataacgttgcctcctcagcattgcgatgccggccaagaggaataccgcgctcatcgccagcagaatgatgcaggtggtgatgaacggccggtagctgtcgtagtacaggatgtcgtagaacaggttcgtcacctgctgtgcggggttgatggtgccgagtatgggcgcgttgcgggctatccagtcgctgatctgcatggcaaacccgccgtacagtccggtgaacagcgacagcgtgcaggagatgccggtcgacagcccgtatttcgtgttgtacgagagcttcggcaccgcaccgagcagggtgcctgctgagctggtcatgaacgaggcgatgatgaccgcaaggatcgccgccggttcgcgtccgccgagcgagacgttgcaggcgagccggatataggccaatgcgatggacagggcgaccgacgagcacagccagcaggagaggaagcccgcgacgagctgtttggcccggctcagcggcgctacggtccgccgtatgcccagcgcggacaggttcgcctgtgcggcggcgactgtgctgatggagtatcccatggccatcatgcaggacatggccagcagcgcgtaatagtatcgggcgatctcgtcaggctggaaatgcgtgagcgtcgtctcatgggtcatgtcgacgttctgcccgacgctgttccagaagttccggctgagcgcggcctgtggattgtcggcgatggtctgccgggtaacggcgtcggtgcggttgtacaggtcgatgacgctgcgcagggccgcgaggctaatgtccagtccgctgttttgcgtggagtccttggctgtgacggcggtttcccggctcacggtcatcgccaatcggccgttattgtcggcggtcagatagccgttggcagtgccgtcggcgagccgttgttcggcctccttcacggtgtcgactgtggtgatggtcagcagcttttggtcgatttcggcgtaggtcgtgtcgtctgaggccgattccgtttccccggccagcgcgtctacgaaggtgcgggcaccgtccgcctgctgccaacgggtgtcttcgatgacggccatcggcaccggcttgagttcgtatgcttcggccagcccgccgaacagtccgttgaacatggtcgccagcacaatcgggaacacggtcatccagatcaactccgaccggttacgcaagttcgctttcaatgcgaccagaaatgtggtccacatgatgtctccttactcaggaactcccctcagtcacctttggtgacagctcccctcggagaggggagccaagttatttgcttgccgactgaggggagcatggtcagtccctcagtgctttgccggtgagttcgaggaacacgtcgttgagggtgggcgggcgactggtcaggtggccgatgttggcgccggagcgtttcaccgcgtcgagcacgtcggtcaggttgtgttcgccgcgacggcatcgcacgtcgagttccttgccgtcgtaggtggcttcgatcacgcacggcagcgcacggacctcggccatcgccgaatccgccagatcgagcgtttcgatggtgatgcgctcgcccgtgtcgatcatgttcttgagctcgttggcggttccgagcgccaggtgccggccgtggtccatgatgaggatgcggtcgcagatctgttcgacctcctccatgtagtggctggtgtaaatcaccgtggcgccggcctggttgagccgctggatgccttccagaatcgaattgcggctttgcgggtcgacggcgaccgtgggttcgtcgaagaagatcaggttaggcttgtgcgcgatgccgcaggcgatgttcaggcgtcgcagcagaccgccggacagtttgccgggccggaacttgcggaagtcctggagtccgacgaattcgatggactcctcgaccagcggcgcgcggtcggttttcttcggcacgtacagcgagcagaagtagtcgatgttttcggtgacggtcagttcgttgaacacggccacgttctgcggcacgatgccgatacgacgtttcagcgcgtaggaggtcggcgtcatcggctggccgaacacgcgaatcgtgcccgaatcgtaggtgagcagcgcgaggatgcagttgatcgcggtggttttgccggacccgttcggtccaagcagcccgaaaatctcgccctggttcacgtcaaggtcaaaatagtcgagcgccaccatgtcgccgtagcgtttgaccagttggctgacgtgcacggccagagccgggttggttgtcgagtcgtgttcggaagctctgttgtcggttgccatagccactcccttccttggtgattccatcatcccaagaaggggccagacgccgccacaggcaaacgtcacgacttggccgtacaggcgtgacatttgtcattacagtccttcggcgtcggtctgcatggccttgtacaccttatcgaccggcatcaggctgatctcgtccatcgaatagttggacgccctgtggctttgcgtaatcatcggtatcatccctttacggttgtgtcgacgacatccgacgcttgtgcctcatctattcgggaagtgtaagcccgttgtcttggaccgtcatgcgggtaattccgcacgcccgtcaagttcgtcgtgttccgcacaccgctagactggtggtggaagagcgtcgagccggggaggtgccatgcgcgtgttggccgagatgggcttgctactcgtgttgggcctggttgtcgggctacggtccgatggcgtgttcatcgccggcctgctgttggccgtttccgtcgccggattggtggaatggctgcgtcccgcgcaatggtcttgggtcttgtgtacggcgtatctcgtcatcgccgtggcggtgccttcatggtgcgcgttcatgccgctcatcgcctacgatactgcacagctgccggccctcgcctcgaccggagcccgggctggggcacggactgcggcaagcggccgctcccccagtgtctcgcggaccgcggcctctcgccgttcccttgccgatgcaatacgttcggccccgtggctttcggtcgccgcgcgctggatatgggtgttgccgccgatcgcgctctggttcgcccgtggcaccgaccgtctccagacgctggtgatgacgctggtcgccctgcttggattcgttctgggccgggcccgcgcctcctcggacgaggcgcggcgcgcgttgctgcacgcgcaggacagggcgcgcgaatcctcgcgggccactcgttcgcgcatcgccgacatcgatgaggaacgcgcccagtcgattcgcatggcgaccctcggcgagcgcacgcgtatcgcccgggagatccacgacaatgtgggccatctgctgacccgcgcgatcatgcaggcgcaggccggcaggacggtggccgaggcgacgaacgatacggtcgccgcgcaagggttcgccacgttgggtgcgacgttggatgatgcgatgacgatggtgcgccgttcggtgcatgatcttgaggatgatggcactgatttcgccgcgcagatcgatgatgccgtcacgtcgttcgacggcatctcccccggtttcgccgtgacgctggccaacgatatcgccaaggcgcctgcgccggtctcgcgctgtttcgcgaccgtgattcgcgaggcattgtcgaacgtggtgcatcacagcgcggcgcgcgaggcgagcgtgacgttgcgtgacttccccgcgttctggcagttggtcattcaggatccggggccggccgtgtccgagtccgatgggtcccggacggccgctgcccgcccgcgtgcgatgcgtgccacgcgcgtcggctcgcgactcgccgccgacggcgttgccgatatgcgtggttcggccgatgagctgatgcgcggcatgggtttggcggatatcgaatcgcgcgtgcgcgcccttggcggcaccgcggtctgcgggccgtatgaggacggctggcgtgtgttcgtatccgtgccgaagaagcgttggaccatggaatcgagggattgatgagaatcgcaatcgtggatgatgatccgatcgtctgccagtcgttggagacgattctgacggccaccggcacggccgaggtgctatggacggcaaatgacggcgacgccgccgtgcgccgttatttcgagacgccggcgagccgaccggacgtgctgctgatcgatattcagatgccctgcaccagcggtttggatgccgcgcgcgaggttctggccacggacccggccgcgcgcatactgttcctgaccacgtttgcggaccagtcgtatatcgcgcaggcgatggggcttggcgccaagggctatctcatcaaacaggatgtggcggcggtcgggcctgcgctgcaggcggtgatggcaggtcaggtggtgctcggcgcggaagtgctcggcaagctcaccgaacggactccggatcctgccgattccgacgattccagagataccgccgattccatcgagggcctgcttggcgagcgtgagcgtgagatcaccgcgctggtcgccgagggcctcgataaccgcgacatcgccgccagactgttcctgagcgaaggcacggtccgcaatcgcatcagcgcgatactggacaagctcggcctgaccaatcgcacccaactcgccatcctctggctcaacgcccatcggtgaggggcctttggtcaagtaggtctctccctccgtcatcgcttcgcgatgccacctcgaacgcgattcaggacagcttgcagctgacctcttattcgctcgttgtcactcacccttgcctaaaaacacctccggcgttttcttcacggctcggctcatcagagggaggttatgaaaaaccaacctcagctgtttttcatgacgatactgtcgatggtgttggccacgcgctcgcagtcgtcggagcactgttcgaggtgacggtacacgtcatgccaggcgaacacctgcagcggatcggtgcaggtggtgtgcagcgtgcgcatcgactcgataaacaggtggtcggcgtccgtttcgatcgtgttgatggcgaacaccagttcgcgcaacgtcttggaatgccggaatcgcggcagttcgttgaccagctcgcagatgctttccgtggcgcgcaccaccatatccgacatctggaccgcatcgtcgcgcatgtcggtcacattgtcgtagtacatgcggttgagtacgccttcgatgctgtcggtcacatcgtcgagcacgtggccaagctcgtcgatgtcctcacggtcgaacggcgtgatgaacgcggtcaccagttcgtccatcatgtcgtggcgcacctcgtccgccgacttctcaatcgcgtgcatgctgtccatgcgttcgcgcagctggtccggattgaagtcgtgcatgacctcggacagcagcttcgcggcctggcatgcgtagtccgcgctgcggcggaatccgtcgaagtagaacacgtctttttgtctcgccatgatgggtggaatcctttctagaacacgaccatgaacagtttggccattacgaagctgatgagaccgcaaccggggaaggtgaacacccaggtgagcatcatgtcgcgcaccacgccgaagttgatggcggagaggcggcgtaccgcgcccacgcccatgatggcgctggtcttggtgtgcgttgtggagacggggatgccgagcacggtcatgacgagcaggcacagcgcgcttgacagatcggccgagaagccttggtatttctcgagtttcaccatgtcctggcccacggatttgatgatgcgttcaccgccgacggacgtgcctacgcccatgatggtgctgcacagaatcatgagccagaccggaatcatcacaccggtcacgctgggttggccgttgcagaacgccatgccgaggaacagcacgccgatgaacttctggccgtcctgcgcgccatgcatgaagctcatggccgccgcgcccacgatctgcgcgtaggtgaagaacccgttggtgcggcggcggtccatgccagcgcaaatcagggtcacggccttgcataccaaccagccgacggcgaagccgaacaggaggcttgcgaccagaccgtagagcaccttgacccattcgcccatgttgatgccgccgatgccgccttggatggcgatggccgctccggacaggccggcgatcaggctgtggctttcggaggtgggtatgccgagcagcgaggcgcccacgctgtatacgacgatggagaacagcgccgcgcatagggcgatgagcgccgcgttcgtgtcgccgccgaaatcgaccatgttgctgatggtggaggccacggaagcgttgagctgcgtcatgatgaagacgccgaggaagttgaagatggccgccatgatgacggcggagcgtacgcgcatgcatcgcgtggtcacgcaggtggcgatggcgttgggtgcgtcggtccagccgttgacgaagatgactcccagcgtcagcaacgttgtgacggtcagagccgggttggaaagcacttgttggaggaaatgcgccagtgagacgtccaaggggaatcaacaccttcttcttcgggggcgggagccgtcacactgattgtaacggaagaatggctacgtagttcccatggcgcgcggattatatggtgttgttatgttgcgcgccgcgcatcctttcgtgaaaacagagcgggacagtcgtatgcttcgattcggcgcctgcatcgacaactctcgtcatctaccgaggattcggtcatgcgtgtgcgaaaatggacacggtgtcaatcaggaggtgcacagtggttgtaagcacggattcgagccgcacaatgcccgattgggtgaagta

SEQ ID NO: 1973 - DNA, 8759 bp, Unknown
  R17_18m  MAG No. k141_18897
ccttgagcttgatctgcttgaagcccatgacctcggtctcctgcttggccaggcggaccatcttctcgtcggaatagccgagccatccagctgcggttgaatatcacggatagccgacttccttgaggtgggcgatgcgttccgccttgccttcctgagcagcacgcagaatctcgagggcttcctgcggagtgagggcatcagtcaggtagcggaaatcgagagtcgcaacgagctcttcgggctccatctcggaaaggagcagccagagcggcttgccggcgcgcttggccttgagatcccacagagccgaaagcacggcgccgatggccatgtgctcgacgcccttctcagggccaagccagcgtagctgcgaatcgcgcacgaacagatcccacgcgagacgcatgttgtcgagcagttcctcgacgttacggccgatcagggtttcggacatagagtcgatggctcggacgacgacatcattgccgcggccgatggtgaagacgaatccgttgccggaatcaccggcatccgtgctgatgacaacataggcggaggaataatccggatcagggttcatggcgtcggagccggagaaggtggccgacgtcgggaatcggaaatcataggtggtgactttggtaataacgctcacgatgcgcttccttctttggaaaatggttaatctcaaaaagggaggacggccattcggccgccctccctagcagtggcgggccggatgtcagtcggcgtcggtggtgaccttgaagccgttgtcctttgcgtaggtcttgagcttctgctgagccttggccatagcgccgaccatgtcaccgccaaccttcatttcaggagtgatgacatccttgtatacgactccaacctgagacatgaacggaagatactcccaatcagtattgaccttgtccatggactcgaagtagacggagttcacgtcagtattgacaaagtatccatctgtttccttcatattgcggatgtcttcgctatcttggtaagcggaagctgccatgaagtagttgccatggttgttatcctgccaagactgaattgcttccttgtcggaatcaagccaattgatgaaggcaagggctgcagcctgcttgtccttagggcatgccgcggaaacactcatcatggagccgacggaagaagacttgaaatcatcggcagaatcaccgaatgcaggtggcagcgttacctgaatcagacccttaagagatggattctgtcccttgtaggagttaccttgccagttctgagaaatataagtggcataggtgccctcattcgtggcgcggttgaacgcatcggtccagcctggagcggcctccatgaccccatcctgaaggcacttttgcaggaattcaatgaactccttggtagtgccagaagtcatgctcaagctgatgtcatcgacagaattgaccttccaagggcgcgcaccagccgaacgcagcaaatccgtaaagcaggagatatcgttattgatgaggacgcccatgtacttgctgggatcttccttgtgaagtttgacgccttcttcatagaattcctgccaagtggttggcaccttgagattatgctcgtcgagaatgtccttacgcacatacatggccaaaggagtggcgtcagtcggcacgccccacagaccaccagcataatgcacctggctccaagcggtctttgcataaagcttgctccacgccttttcgatatcatcgttggcgaaattcagcagagctccagaaatagcgtactgttcgaatcggtcagcactcatctgcacgacatccggaacatctttattggcagcaacgacattctggaacttggtgaaatggtcgcttgccgcgccggtgttggtgaatttaattttgatgtgcgggtacttcttctggaaagcttcaatcggtcctgccatctgcttcccggagaatccccatacgttcagctcgatttttttggaagtatcggtgagagcgttgttaatgtcttctacagtgactgcagttttagtgtccttgacaccagtacttgagccacaagccgcaacgctggctaccatagtaagcgccgccagcgcactgacgattttggtcatcttcttcatgattactcctttgtgtgtcatgaatcactgtcttattgttgttcttcaaatggatgtggatgccgcacggtcattagagcaacgaatgggtgatcgccaataaccgtgcggcgaggattcactgcttgactgcaccagccgaaaggccagactgccagtacttctgcaggaacatgaatgcgatgatcaacggggcaactgcaatgaggcatccggtgacaatgtagttgttcggaatctgaccgtccgcggtgccttcggcacccatcttcaaccacatgttcaaaccgaccgtcatcgggtagtcgttggtgtccgagagcatgatcagcggcaggaagtagttgttccagacaccgaccagcgtgaacagcagtacggtgacgaaacctggagacagcagcgggaaggcaaccttccagaagatggtccacgaatttgcaccatcgagcttagccgcttcaaggagagaagtaggcaccgatgtctgcgcataaataatcatcaggtacagtccgaacggcgtggccagctgtggaataatcactgcccatggggtaccgaccagaccaatcttcgagtacatgaggaacagcgggacagagatgaccgtggccggaatggacatgaatgccaaggtgatcgccaacagactattacgtccggggaaccgcattgtggcaatggcgtagcctgcaagtgtggcgatgatagtggcaccaaatccggcgacaactgcatacatcaccgtgttaagcaaccaccgtgcgtatgtaccatgctgatatgcaagagtttcctgaacattctgccagaacacattcttgtcatcgaaccacagaccaaaggagctaaacatgccctcgttggtctttgtcgcagagaagaacacccacagcaacggcacgagacagtagatgaccatcaggcccatgataatgtgcagcagccagttaagcacacgctgcttgccggtcagctttggagctgcctcacgctgctgcatacgcttatagcgttggctcgccttgagcgccagcttggcgtctctgcgctgcagcgacttggaacgtggttttgcgattgcttcactcatcacttgttctcccacttattgccaatgaccttcacgactgcgacaagacccataacgatgacaccaatcaccaaggagaccgctgcagcatagttgaggttctggccgttgaacgcaaggttatatgcgtagagattcggcgtgtagttactggtgatcacattcggcgcggaattcatcaagatgctcggttcgttgaacaactgaagcgtgccgatcaccgagaagagcacggtcatcataatggatcccttaatctgcggaatctttaccgaccatgcgatacgcagctcggatgcgccatcgatacgagcggattcgtacagctcgttcggaataccgatcagtgcagaataataaatcagcatgttgtagccaagagaacaccaagtgcagatgtttgcgatggcgaacagcatgagcttttcagaaagcatgttcggcgcagtggccccgatcatagacgcaatctggccgacaaggccatacttgtcgccgtagatatatccccacatcagtgctgcgatgacgcctgggacggcataaggcaggaacagcaggattcgcggcactgcgatatggcggattctctgggaatccagaatgagcgccgccacaagggaaaggatcaaattgagaggaatctgaatcgccgcataaatcagcactcttctgaaaccgctccacagcgcttcatccttaaatgcagctatgaagttgtcgaagcctgcgaatgtggtgccgccaagaagggactgcttgaagaagctgagataaagcgcgtagaacatcgggatgatcatgccgaataggaagaccaccacgtatggaagacaatataacatgcctatgtactcgcgcttcggcttgcgcatcccggaagtatccggtttcgccgttgcatttgtcatagtttttctctttcttcttaacccgtctgaatgagcccgccaacaacatcgttgccattgccgtttcattcatcggtacgttcaatatacaaggttttacaaaaaagagcaaataaaacttcgttgcgcgtggcgaaattttctttatcttgttttttcgtcttaaaagggctttattgcaacgatatgcacaaatcgtactcatcgaagaaacagcagccaatccatgtctacaacacccatttccgctatatagacagcaatacgccgataaaaaagctgttttagagtagcgaaaatttcgctactctatatataacgctttttttgcagcgtcgcatacgaaaagagaagagtcatggccacaatcaaaacaacaaacagaccgaaggtctccgacatcgcccaagcggcgggagtatcccccgctaccgtgtccaaggtcatcaacggccgtgatggagtctccgacgagacccgcgatagggtggaactgctcctcgaagaagccggattccgcaaaaaacttcccacaacaaaaaccatacggtcaatcgaactggtcgtcagcgaaatgaccaacaacggcaccgtggaaatggtcaaggagacagcttcatacgccagagattttggcctcggcatcaccgtaagctgcgccggaccggattccggagaatacgcaacaagaaacgaggccagcagctgcctccgtaacgccatcgaacgcaacccactaggcgtcatacttctcttatcgaatatctcatcggccgaggaatcgctgctgcagacgaggaacatcccatatgtgattgtcgatccggtcggccaggtctccgctgacgcattgggagtgggcattgataactggaccgggggaatgctcgccacgcaatatttcatatcattggggcatcgacgaatcgccgtcatcactggccctactaattcacagtcctcgcaggcgcgactgagcggatacatggcggcgctgcagaaaaacggcatcagcgcggatccgcatctcatcaaggttggcgactacgtatctgacaaggcatacaaggcggcatgcgatctcctggaaatgagggagcaggaccgaccgaccgccatcttcgcgttcaacgatctcggcgcgatcaacgtctatcgcgccgcccgacagcacggcatcagtctgcccgaacaattatcgatcatcggtttcgacgatgtctatcctgcggcaagcatgtgtccatccctgacgaccatcaggcagccattcgacctcatcgccagacaatgcatcaacctgattctcgaagcgcgggaaggaaaggtggaacagaattacttcatttttcccacgcagcttgtcgaacgcgaaagctgcgtatcgccagcacgtccgtaactcagcaacggaacacagaatcagcttccacgaagcacccatgcatatgcaatccgtctctggcacaagcatttacttctgtttaccagatgaaaatacaatatcgtgcgattacggggggcgcagccctagcctcagctggaggtcaggaaggtttcgttgcctcgggtgaagtcgaggacggaaccggcgagttggacctcgtctgccagttcggggtcggcagccagaagctgctcggcacgggtgcgggcgtcggcgatcatgtcggcgtccttgaccacgcgcaggagcttcaggctggacttgccgccggattgggcgtcgccgagcacatcgccggcaccgcggaattccaagtcggcttgggcgatttcggcaccgtcgagcgagcggtgaatcacttcgagccgttgctcggccggggagccgggttccgcacgggaaataaggaacgcccacgagttggtgccgccacgccccacgcggccgcgcagctgatgcaactgagagaggccgtatcggtcggcatcaaagatcacgatgcagctggcctgtttcacatccacaccgacttcgatcaccgtggtggacaccagaatcggagtctcgccgccggcaaaatcggccatgacctgggttttgacgtcatccttgtcgcggccggtcagagtcgcaaaccgaatgccttggaattgcgggagtttctgcaaccggtcggcgatttcggccaccgcatgcaatggcgggcgagccacggtttcgccgttctcgtcgaaggtttcgtaggggtcgtcgatgccgatggcgtcggccgccgcgcgcgttgcacggccgcccgcagctgtgcgggcactggaaccagatgctgcggcgcgtccgcgggcagaaccggctgctgccgaaacgccggaaccgccttcgttcccctcatcatccgcatcaatgcgcgggcacacgatataggcccgctcccccgcgtcgactcgcgcgcgaatgtgcgcgaacatacggcccatggtggcggcgtcggcctcattgaccaccacggtgcgaatcggtttgcggccgccaggcaattcggtgagccaggaaatatcgagatcgccaaaccaagtcatggcggcagtgcgcgggatgggcgtggcggtcatcaccaatagatgcggcgtggtgccgtcatcggttttggcgttgagactttcgcgctgttccacaccgaaccggtgctgctcgtcgattaccaccaaggccaagtgcggggcttggaaggtcttggaaaacgccgcgtgcgtggccacgataatgcccggctcgccactggacgccgcagcaagtgctttacgtcgcgcagcaagcttcatgccgcccgtcaacaacgtgactggaatcgctggcttaagttgctccaccatccggccaatggtttcggcatgctgctcggccagcacctgagtcggggcaacaagcacggcctgatagccggcgtctacggcttggagcatggcagcgagcgccactacggttttgccggagcccacctcgccttgcagcagacgctgcattggccagtcatgagccaaatcggcggcaatatcatgaataacctgctgctgccctgcagtgagggagaacggcagggatgcgatgaactgatcgcgcagactgtcggttaccaacgggcaagagtgagccgcggatttatgggcgtgcgacctggctttaagcagcgaggtctgcgaaacgaaagcctcctcatagcgcagggtttcgatggcctccttgaaccgggtcgtggaggccggatcatgaatggccaggaacgcctcagcccgatgcatgaggttcttggccttgcgcaccgattcgggcagcacatctgggatggattgggagagcgcctcagcaccggattcggcggtcgtgccggaattctcttccccgttttggacggcgatggtgtcggtcgtgggagccacaatgccggctgacccagcgccagcgagttgcccgtcaggcgtggatgacgtgcgggcccccatcatccacagcaatcccagaatcgtctcatgaatatgttcggacgagatacgcgaactggcgtgatataccgggcggggccggcagacgcgggtaagcgcctcttgcacggtatcggcgtcgtatttcagcgcggccccggaagaggcagccgcggccggcggatacgcggactgcacactggcatacggatcggtacttcccgcaaacgcaccattgccggatgccgcaccccgagcgtaaccctcaagccccgctcctgctccggccgacccgggcgcgacagtgaggatttcggggtgcgtgaattgcagctgccccatgtattcgctgggcataccggagaccaccacagacgtgccggcgcgcagccgcatgctgacccaatccacatacgatttacgatacgaaaagaacgtaagccgggccgtgctgccgggtacgcgacgagaccgggcgaagtcggcgtcgtcaaccgtcgcctcgagtcggtagccgcggcgagcgttcatcggcaccacgcgcatgtctcgtatcacggcggcaaatgccatctgctggccgggtgcggcctcgcggatggcgcgaagcggcaccggttcggtgacgcggaagggatagtaggtcagggcgtcgccgacagtgacgattcccagcgatttgagcgcggacacgcgacgcttgttggtgaccagcgaagcgagagtggtgtccatagtgatgctcatattggcctattctattcgcacggcctctttaggccgcagaaacaacaaaacccgctgagccgaagctcaaacgggttttgctccacgttagtacgcgattcacgcggccacgcgctgaaccttgccggccttgaggcacttgacgcacacgcgcagacgagtgttctcgccatcaatcgtggtgcgtacagactgcaggttcgggcggaagctacgcttggtacgacggtgcgaatgggaaacggtgaaaccggtctgcggtcccttgccgcacactgcgcaacgagctgccatgatggactcccttaaccttgatgtgtcaagtctttcacgcattcgaccgccggtttcacccgacatgccgaacacacaacttcacaaatatatagcccaataccgacaaccgcaactcttgcgtgtatcatgggcgaacttcggcggttca

SEQ ID NO: 1974 - DNA, 15605 bp, Unknown
  R17_18m  MAG No. k141_19844
gcccttgtggaagtcgccacccttgccgtacgacttgcggtagccgccgtggccctcgccgtcaccatcacggcgcggcgcgtagccttcgccatcctcacgacggcgcggcttgaaaccttcaccgtcatgacgcggcttgaaaccgcccttgccgcgcggcttgaaacccttgccgccgcggttgcccggtcggcgatcgccataccccttatggccgccgccgtaggacttgccggaacgctcgttaccttctgccattacttgttttccttaattcgttgttgattaacggttttccacggcgccgagcgccttcttgccacgacggatgagcgcgaagcggcctgccaggaagtcggcttcggccagcacctgctcctcatcctcgatacggttgttgttgagatacacgccaccggacttgatggcgcggcgtgcctcggaagcggacttgaacagtccggcagcctgggcggcgtcgattacgcgatcgcccggcttggagacggggaaggcgtgctcgccgttctcgtcgaccaccttgaagccgtcgagcacggattccagcgtttcctcgtcgatgtcttcgaggttgccaccgcggccgaacagcgcaccggaagcatcgatggcagcctgggtagcggcctcgccatgcacgaagctggtgacctcccaggcgagggtcttctgggcctcgcgcttgccggggttggtcttggattcctcgaccagtcgttcgatttcggccttgggcaggaaggtgaacgccttcagcaggctttccatctccacatccgggcggttgatccagaactggtagaacttgtacgggctgagcatcgtggcatcgagccagacggcgttgccctcggacttgccgaacttcttgccggaagcatcagtgatgatcgggctggtgaacacgttgacgtccacaccgcgcaccttgtggatcaggtccaggccggaggtgaggttgccccactggtcggagccgccgagttgcagcgtgcagtggtattcgtcaaacaggtggaggaagtcgttgccctgcagcacctggtagctgaactcggtgaaggagatgccttcctcagagttcaggcggcgggcgaccgtgtccttggcgagcatggtgcccagacggaagttcttgccgacgtcacgcaggaagtcgatgacggtcatcgaggcggtccaatcgtaattggacacgaaacgtacggcgttcgcgccttcggtgtccagaatgccgccgatctggttcttcagacgatcggcccagccggccaccacgtccttcgggttgagcgtgcgttcgccggactggcgcgggtcgccgataagtccggtggcaccaccgaccagagcaatcggatgatggcccgcaagctgcaggtgacgcatgttgatgagctgcacgaggttgccgatatgcaacgatgcagcggtgggatcgaagccgcaataataggtgatgggctcgccgttcagtgcttctgcgagtcgatcccggtccgtggactgggaaatcaacccgcgccattccagttcctcaagcagggtgttgaaacccgcttccttgaagtcggtgacgtgagccatagcttgtcgcttctccctatcgaattgtgaatgagactgcccaattgggcacagtcaagtttcgcagaacatggcgacagtgccgaacaccagccgagccgcgcgattcagtaaaacgccttattctagcggcgcgggcccataagttcgcgcaaagagtcgatgatgtcctgacgatccggcacctggaacttcgggaaggacttgagcatacgcttctgctgtgcgttgatgacgccattgacggcccagcgcagacgctcaaccgtatcctgcgaaaactcacgcatcctgtcggataccgcactggagccccgctgccacgtgccaccggcgcgtgccgccacatcctgcaccacctgagcgacggaatcgagcacctgctcgaatccgagcatgcccgtaaccgtgaccgccaagtcgatgatggtgatcagagccagtaccgtgaccagcgtatgcagcatcggcagcggaatcatatccgtgacccgctcgacatatggctgcgaaccaagtaccacgcccacgccgccgagaccgaagatcaacgcgcccagcaggcagacgcggccttggaggttgaagcggaaattcgagtaatcccaccagcgggcgtggaacagctgctccatgacccacgaggttgtgtattcgagtatcgtggcgcccaccatcgaaatcaggaagatgatgatcgggttatgtacgttgccgagaatggcgacgccgagtatcgcgccggtgccgtagatcgggcacagcgggccgttgaggaaccctcggttgaccaagcggtgctgttggcaggagacgagaatggactcgtacgtccagccgacgaaactgtagaacagaaaccagaggaaataatgttcgagtgtggtgatcatcgacgggcttcgatctcggcgtagggcttcgcggcgggcaacgcgcgcttgttgaaccggtcgaacgagaaggtctcggcggtggcggagcatttgtccgccaaggtgaccagatagccttcgatatagcgcggcggcaccagggtcatcgggaacatgtggttctcgatgctgttgcgttcgatatcgttgagcttgaagtccttcagggcattgaccagggcggcgtggccatgggtgaagccatgccactggtgttcgccgttatcccagtcgtgccagtcgtacaggaagtaatcgtgcaggagggccgcgcgaatcagggatttgaggtcgacgcggtaccacaggtgcgcgcggtcggccatccacacagccaggcaggcgacacgcacggaatgttcgaacgtggtgacgttgccgtgctggtagcagcagcgttcgatctgcatgtggcgatgctcgatgacctcacggccgtgcttggcgaccaggcgttgaatctgcgttcgggtgagcagatgtcccacggtttcgaccctccgttcgggttggttcagtgcaatcccttgttgtgaattacgattacccgacgatattcaagaatccatcgagtaataccgtgaccgattgtagggcacacgtatgtccgtgcacactcatccaaaagaacgacaacgggaaccgttaatcgtggtgggtttcaagatagtcgagataaccctgaaaaccgccatcgaggcttgctacatcgtaaccgcgatcggcaaggatttcagctacttcctcgctccaccatccttgagcacaatagactacgacagttcgatctgtgggcacggttttgagcacatgggccagagggtcgagtggtgcattgatggcaccttcgaccgggtgggcggcgaagtcggctggttccctcaagtcgagcagcgtgaccgtattcgggtcgagcttggcaaattccgccggcgtgatgcggcggtacgatgcttcactgctctcatcgtcatcgaccgcattacgcaaagcaataggcatgttcttcccctctcgttccgatcttggctcccctcaaggaggggtgccacatagctctaaatcgcgcaggccggctgaatatagttggccggatcaatagcagtaatggtcggctgctcaccgcacaccgggcagtcgggcacatggttcggcaacggcacacggcggatgttcatggtcagggcatccacagtgagcatacgagccacgagcggctcccccacgccggcaatcagcttgacggcctcagtcgcctccagactgccgatcacaccgaccaccgcgcccagcacgccggcctccttgcaggtcggaatttcacctgcggcgggcatatcgcggaagatgcagcggtagcaggggccttcgcctgggatgacggtcatcacctggccggagaacccgaccacgcccgcatggatatacggcttgccggccagtacacatgcgtcattgatgaggaattttgcggcgaagttgtcggtggcatcgatcaccagatcgtacggttcgatgaggccggcgatgttgctggcatcgacgagctcgtagtaggtgtcgaccgtcacatctgggttgagcgcgcggatggccgtggccgcggattccactttgggcgctccgacacgtgcagtggtatggatgatctgacgttgcagattgctcatatccaccacatcgccgtccaccagtccgatatggccgacgccggccgccgccagatacagggcggccggagagccaagcccgcccgctccaatgatgagcacgctggaggccaacaaccgcttctgccctttgacgcccagccccttcaaaatcagatggcgcgcgtaccgctccacctgttcatcagtcaatgccatgttttctccatgtttccagctcccctcagtccgctacgcggccagctcccctcagagaggggagctaataaaagtgtcagtgcaaatatcccgtagtcggactggacggcacggcctgtccctcggtcaccttgcccagaccggacagatacgccgcacgaccagcatcgatggcgtgcttgaacgcctcagccatcagcgggatattgccagcagaggcaacggccgtgtacgccatcaccgcatccgcacccatctccatggcgtcgcatgcctgactcgggcgtccgatgccggcatcgatgatgaccggcacatgcgcattggcgatgatgatctcgatgaagtcacgcatgcgcaggcccatgttggagccgatcagcgaaccgagcggcataacggcggcggcaccggcctcctccagctggcgtgcggcaatcgggtccgggaacatgtagggcatgaccacgaagccttccttggccagcatttcggtggctcggatggtttcggcgttgtccggcaggaggtacttggtctcgtgttcaatttcgaccttgacgaagtcggtgtggcacacttcgcgtgccagtcgggcgatacgcacggcttcctcggcgttgcgcgcaccggaggtgttgggcagcaacgtgatgccttcgggaatgtagtcgagcacgctgttctcggtggtctgcgcgcggcgcagtgccatggtgacgatttgcgtgcctgcatgttcgaccgtggccttgatgaggttcaggtcgtagcggccggagcccagaatgaatcgcgactggaactcgtgaccgcccagggtcagcggcttgtcttccactggcagaatcggcgcggcggtgccgaccggattggtgacggcgggctgcggcggcagcggagtcgcctcaacagatgcttcagtaaccggattaatattgctcatagcttttcctttcatccaccctgtacaaactgcacaatttccatgacgcactggtcgtcgagcatggcgtcggcacgcttatcgcgcgggataatctcaccattgagttcgatggccacacgctcggcgcggaatccgtgcgcttcgagataatcggcgacgctgaccggcgtctcgagcgtgacctgctctccgttgacctgcataatatcctttcagatagtaaaaaagggtgcacgaaacgaaccgtaccttaagtggtgcgcccattcatgaacccaatcatgcgaccgttcgaccgctgtgatgtattggctccatcacgaccgtctcacggctgaattatgcaaacggaatgaaagctgtatcggagaacccggcaaatctgcaacaacgattccttacggcggcatgacccgcgtcaagttccccggtcgaagtctggcgacttcctctcagcctcacggctcccgttcgttacgatttctcagtgtatgccgttgcagtgacaacagcaaaatagagctccctctgacgagggagctctattgggactagaacgtgccgggggctttgtaggcggagccatccgacgtggatgcggggaagagcttgagttcttcgacctcggccttggcgtcggcgatctgctcgcgcacgcgaccgtaagcggtgccgcccttgccgttgcgggagtcgaccgaaccgtggctggagagcacttcgcgtactcccggagccttgtcggccggcaggaacgcggcgaaggtctcgatgaagtcattgtcggtcagatcccacagttcctggccgcggccttcggcgagcttgacgcaggcaccagagagctcgtgcgcatggcggaacggcacaccgttcttgacaagccattcggcgatgtcggtggccagcgcgaagccggtcggggcttcctcttcaagccgctcgctgtcgaagtgcatggtcttgaccatgccggtgaaggcgggcagcagcacttcgagcgtatcgacctggtcgaacacggcctccttgtcctcctgcaggtcgcgagcgtaggcggtgggcaggcccttcagggtggccagcagaccggtcagatcgccgatgagtcggccggacttgccgcgggcgagctcggcgatatccgggttcttcttctgcggcatgatggaggagccggtggaatagccgtcgtcgagcttgacgaaggcgaactcctgggtgttccagatgatgatctcctcggacaggcgggagatgtccacgccggtcatggcggccacgaacgcgaattcggccacgagatcacgtgcggcggtgccatcgatggagttgtcggtcacgcgggagaagccgagctcacgcgccacggcctccgggtcgaggccgagcgtgttgccggccagtgcgccggagccgtacggagaggcgttgatgcgcttgtcccagtcgatcagtcgctgcacgtcgcgaatcagcggccaagcgtgggccatgagctggtgcgcgagcagcacgggctgggcgtgctgcatgtgggtgcggcccggcatcacggtgcggccggccttttcgctctgctcgatcagggcgttgacgaggtcaagcaggagtccggcaatcgcacgggagtggcggcgcagccacatacgaatcaggcaggcgatctggtcgttgcgggagcgtccggcacgcagtttgccgccgagttcgtcgccggcaatgtcaatcagtccgcgttcgagggcggtggcctcgtcctcatcgtcttcgatgggggcgaaggagccgtcatccacatgacgctggagcgtgtcgagcgcatcctccatgcgctgcagctcgtcggcggtcaaaagtcccgcacggccgagagcacgggcgtgggcgcgggaaccggcgatatcgtcgtcggccaagcgccagtcgaactgcgtggacttggacagtcgggccaactccggagacggaccggatgtaaaacgaccaccccacagggccagatgttcgttgttctcagtcatgaaagctccttgaaaagtgaaaatagctgtgtttaagcgtagcaatgtgttcaaacatacagttgcccccgctggcgagggctgtcacatggagtgtgactgaggacagtcctttcaaagaccactcccagtcagctatgccgacagcctcgcagcgggggcgactgagtaagaattactcgacggtgttcttcgggacctcgatgccgttgccgaacttgacgtcgcgggctgcggccacgcgggacggcaggccgtagatgtcgatgaagccgttggaggacttctggtcgaaggtatcgccggaatcgtaggtggcgagcttgtagtcgtacagcgaggagtcggaacgacggccggtcaccacggcgcggccaccgtgcaggaccatgcgaatctcaccggacacgtacttctgggtgtcttcgatgaaggcgttgagcgactgggttgccggggagaaccactgcgcatcgtaaaccagctcgccccagcgcttgtcgatgtcgcgcttgatgcggtgctgttcgcgttcgaggcagcagttttcgagttcctggtgagcggtgatcagagccacggcacccggagcctcgtacagctcgcgggacttgatgccgaccaggcggtcctcgatgaggtcgatgcggccgatgccctgggctccggcgcggcggttcatctcttcgatggcctgcagcggggtgacgtcacgtccgtcgatcttgaccggcacaccttccttgaactcgatgacgacttcatcttcgaccggcgggaaggccgggtcgtcggtgtaggagtagcagtccttggtcgggccgttccacggatcctcgaggaagccggtctcaatggcgcggccccatacgttctggtcgatggagtacggggacttctcggtctgggtgatcggcagcttgtgctccttggcgaacgcgatctcgacgtcgcgggtcagggacaggtcgcgaatcgggctgatggccttcagcgtcgggtcgatggaggcgatggagacctcgaaacgaacctgatcgttacccttgccggtgcaaccgtgggagatggtgtcggcgccgaactggtgggcggcgcgcacgaggtgcttggagatcagcggacgggagatggcggagaccagcgggtagacgccttcgtacatggcgttggccttgagggccttcatgcaatattcgttggcgaactcgtcacgggcgtcgaccacgtaggattcaacggcaccgcaggcgagggcgcgctgcttgatggtctcaaggctttcgccgccctggccgacatcgagggacacggccacgacgtccttgccggtgcgctccttcaggtacgagatggcgacggaggtgtcaagaccgccggagtaggccagaacaatgcgcttgttatctgccattggttccctttcattcaaggtctgaaaaaacaaactgatgcaagtatatacagaggactgtatatttatgcacggcgtgttggttatttggaagcgaggcttagtagccagtcggagcgggagacggcggtgtcgtcattggtgcaaatcaccatgacggtgtcgtctccggcgatggtgcccagcacgccttcgatcggctgcctgtcaatcaccgaggccacgtattgtgcggcaccggaaggcgtgtgcaccacaaccagatttccggcggcggccaccgaggtgaccagtccgttcagcacgcgggacatctgtgcctcaccgcgctcccctacatcctcaccttccgaagcaacgacgctgcgacccaccgtgtaggccaccgtgccgtccttcagccgggtcttcaccgcatgcatctcgtcaagatcgcggctcagggtcgcctgagtcaccgcaatgccctcgtcgataaggattttggacagctgtgattgcgaggtgatgatatgcgtggcgagcgcctgttctatggcactcagccgcgccgccctggtggcagggcgctgcagggacggaccggtttcactcatgcgagcaggctttcgtctccacgggccttgccggtcaaccaagtcagcaacgctttctgtgcgtgcagacggttctcggcctcgtcccacaccacggactgcgggccgtcgatcacttcagcggtgacttccttgccgcggtaggcgggcaggcagtgctggaagagcgcatccggcttggccaatgccataagttcggtgttgacctggtaatcccagaacggcttggaacggatggcgtattcggcctcctcgcccatggagacccaggtgtcggtgaacacgcagtcggcgtcctgcaccgcttccttggcatcggtggtgaccaggatggagccgccggtctcggccgcgacgcgcttggcgtcggccacgatgtccgggcggggcaggtagccgtgggggccggccacgcgcacgtccatgccggccacggcaccgccgagcaggtaggagttggccatgttgttggccgcgtcaccgaggtaggcgatggtctggttcttcaggttgtcgacgccgcctcggtgctcggcgatggtctggaagtcggcaagaatctggcagggatggaagtcatcggtcagggcgttgaccaccggatgggtggagtacttggccatttcttcgacgcggtcctggccgaaggtgcgccacaccacgccgtaagccatgcggtcgagcacacgagcggtatcggccacgggctcgccacggcccagctgggagccggacttgtcgatgaccagcgggtagccgccaagctcggcaacgccgatggagaagctggaacgggtgcgggtggatggcttgtcgaacagtacggcgacggcctgcggaccggcgaacggctgcttgtagaagcggtcatggtggaacttgatggcaagttcgagcacctgcttctgctcctcatggttgaggtcgtcgtcacgcagcatgtggcgaagttctggggtcatgatgatctccttggatcggtgggtcggcagtgacggcgagaaatcagtcgtcgggcaggtccgtaggcacatccttgaggatggcaagtgcctgatccacgtcttgagcggttacaatcagcggcggtgcgaaacgcagcgcattgggagccaccgcgttgacgatgagcccgtgttcgaggcagtagttcatcaccgcgtgggagcagggatgcttgagctcgacggcgtccagcaaaccacgaccgcgtacggaaacgaacagcggattaccggtggccataatgccatcgcgcagctgttcgccgcgagcttcggcgttggccaccagattctcgtcttcaatcacgccaagagtggcgagtcccgcagccgcacccagcggattgccggcaaaggtggagccgtgggaaccaggagtgaacagagccgcaagtttctcgccgaaagcgatcatgccgcccatcgggaatccgcctgccacgcccttggcgaaagtcaccatatccggcgtcacgccgccggacagatcgtcacgctggaatgcgaaccacttgccggtacgtccgataccggtctgtacttcatcgatgatgagcagcgcgtggttgatatcgcacagttcgcgcacgaacttgacgtaatcggcgcccaacggctgcacgccggcttcgccctggataagttccagaatcacagcagccaccggacccttgccatagcggccgagaccggtctgtgcaaaagcgtcgtgcagggcgaccttgtcgccggcgcgtacgaattcgatgttcggcaccagcggatcatacggcttgcggataccgggtttccatgtggcggacagcgcacccatcgtacggccatggaagccgtgagtcattgcgagaatgcgtgcgggcttgccgccgatggaaggcagggcaccaggcaaggtgcggccatacagcttggcaagcttgagggcagcttcattgccttcagcaccggagttgccgaagtagactttggagccttcaggtgcaccagccagcttgaccagtttggatgccagctcaatttgcggctcggacgcgaaatagttgctgatatgagccaccttggcagcctgatcggcaaccgctttgacccacttggggtgggcgtatccgagggaattgacggcgatgcctgccaggaaatcgaggtattcgttaccgtcaacatcccagatgtgggcaccttggccgtgatccatgacgcgcaacggcgtaccgaacacattcatgtggacctgagagtactctcccagccacttgctgtcttccgtacctagtttttcctcatgctcagtagccataagagctcctcatttccagtccttcatcgggcataaccatggtaccgatgcctgcggaggtgaatatctcattcaaaatcgaatgcggcttgcgcccgtcgatgatatgggcttggggcacgccaccgtcgatggccctgacacaggcctccatcttgggtcgcataccggattccaggtccggcagcatatcgcgcaggttttccacaccgatccggccaatcagagaattcttgtccggccaatcggcgtacagaccatccacatcggtcaagataacaagcttgcgtgcgcccacagcggcagccaaagcggcggcggcggaatcggcgttcacgttgagcacttcagtggcatcttcttcgttcggagccacggaagagacgaccgggatacgaccggcggccaccagatcctcgactgccgaggcatcgacggaaaccacatcgccgaccaagccgatatcggtgggcttgccattgatgatgggcttgcgctgcatggccgagaacaggccgccgtcttcaccggacaggcctacggccagcgggccgtgcgcgttgatcaggccgaccagttcgcgtgacaccttgccggtcaggaccatgcgcaccacgtccatggcctcgggggtggtgaccctcaggccgcctttgaattcggatttgatgccgagggccttgagcatgtgggagatctgcgggccgccgccgtgcacgacgatcggatgcaggcccacctgacgcaggaagaccatgtcttcggcgaagcactgcttcagatggtcatcgaccatggcgttgccgccgtatttgacgacgatacgctggccggcgaactcctccagccaaggcagcgcttcaataagcacttccgccttctgatcggcgcgcaaatcggtgtgcacgtcgaaatggaacccaggtcccttcaattctgtagccaatttttctcttttctgcgacgccggcgacgctatcgccgccggctgctacaaacagcccactgggctgtttgtcagctttcgtagtcggcgttgatgtggacgtattcgtgggtgaggtcgtcggtccagacggtggcctcggcgtccgagccggtgttcaggtcgatgtcgatgtggacttcgcgcggggtcatgtcgacctcgctgcggtcgcggccggcgccgccgttctcgcagatgcgcacgccgttgacgtccacggtcaccttgttcgaatcgtaaggcgcgacttcaggcggcacagtgcccagggagctgacgatgcggccccagttcggatcgttgccggagatggcgcacttgagcaggttcgaggcggcgacggcacgaccacaggcaagtgccgcgtcttcgctggtggcaccggtgacggtgatgcgaatgtcgtgggaggcaccttcgccgtcgccgatgatctggcgggacagggagacgcagacctcacgcaccagcttgttgaattcgtccttgtccggttcgacgccggaggcaccggaggcgagtagcaggaccgtgtcgttggtggacatgcagccgtccacgtcgatgcggttgaacgaatgttcggcggccacggcgagtgcggcctgcatctggccggcggagacgaccgcatcggtggtgatgacgcacagcatggtggccagctgcggggcaatcatgcccgagcccttgaccatgccgccgatcttccagccgttggagccggtcagttcgaccgtcttcggcttggtgtcggtggtcatgatggcgtgggaggcgtcggcgccggcttcggcggtggcggcaagagcctcatgggcgctcttggcaccagccagcacgttgtccaacggcagcagttcaccgatgagaccggtggagcagacagccacatcattcggttcggcgccgatgagaccggcgaccgtttccgcggtggtgacggactgggcgtaaccggcctcgccggtgcaggcgttggcaccgccggaattcagaatcacggccttgacgtgaccgtcggcgacgaccttacggctccactgcaccggggcggcacagaaacggttcgaggtgaacacgcctgcagccgcgtcgagcgggccgttgttgaccacgagggccaagtccttcttgccttcgacggatgaaataccagccgccacgccggcggcggagaaaccttgtgcaaatgtaacgctcacggtgctactccgatcttggtcaggcccgcgtcttccggcaggccgagtgcgatgttcagtgattggaccgcttgtccggcggtgccacggttgaggttgtctatggcggcaaaagcgtagatgcggccggccttgcggtcggcgacgacctgcaggtgggctgcgttggatccgatgatgttgccggtggcgggcagtgtgccctcgggcagcagcaccatgaagtcctggccttcataggccttggaccatacggcgcgaatctcctcatcgctcagcgccttggccttgtccgtcatgcgggcggacacggtggcgaggatgcctcgggacatgggggcgagaatcggcgtgaagccaagcgtgaattcgctggcttcggccgcgctcttgccggccgcgtgggcgaagttctgcaggatctcggggatgtggcggtgcttgccgcccaccgaatacggcagggcggattgcagggcctcggcggcaagcaggttggtgcgcttgagattcttgccggcacccgagtatccgacgaccagatcggccacgatatcctgcgattcaaccagtccttcggcgatgccgggctggagggccagcgtggtggcggtgacgttgcagccagggcctgcgatgcgcttggtgccaggaagcgccgcgcgctggcgggtgtatgagccgtccgcggctttgccggtgatgagctcgggcatgccgtaggtccaatgctcatagaaatcgccgccgtagaactcatcccaagcggcctgctcttcgagacgatggtcggcgcccaaatccacaaccacggcatttggatcgagctgcgaggcgagcttgcccgaagcaccgtgcggcagtgcgaggatgataacgtcatgcccgttcagcacttcgggcgtggtatcttcgacgaccagattggccagttggggaatatgcggcatgtgcttggccatcgactcccccactgaggaatggcctgtcacgcaggtgatgtcgaagtcggggtgcgcggccagaatgcgcagcgcttcaccgccggcatagcccgtggcaccggccacggccactgtatatttcgccatactcatctcttttcactgatgtgtcttgggatgagtatacgcgattatgcagactattgcatatttatgcagtgggtgtgttggtatgtgaacgccacttatgcggagatggagtcggaggaggagccggtgccgccggtgagttgctggagggcttcctggtagaggctcatggcgtcatagccattgaaggccatccagatgacggcgatggtgtatagcacgttgatcaccacggcggccacggccaaaccgaagcccttcatatggaaggtgcgcgtgcgccacattgccaccgcgcccatcagtgccgagagcaccggcacagggaagaacagggcgaggataaaggagatgatcgcatacgaatcccagtgcccgtagagcgggttctggtttggatcgttcaggtcgatgccgtggtaataatgcggctggtgaggctgaccgttcggctgttgaccatacggctggccctgcatgcccgggtacccgcccggatatgcgcccggaccggactgttggccgccttgagcatacggccagccgcccgcctgctgattgccgggccacggcgtctgctgaccgtacggctggccggcctgctgggattgtgccgcgcc

SEQ ID NO: 1975 - DNA, 32649 bp, Unknown
  R17_18m  MAG No. k141_20843
gcagctcatcgaaggtgccatcgaccgtatgcgactgcgggtccgttcgcgcgtggagaacgagattcgacttatcgagggatatgcgaaccggccaagcctgacccaaccgcataccatgctcgaaccgcatcagcggctaatcgacgattccctgcagcggcttgacatcggcctgcgacgcatcgtggacgatgcccagctcaccgtcgagcgagctcacgcctcactgaccgcactcagcccgcaatccacgttgaaccgaggctatgcggtggtgcagtcctccgatggccacgtactagacgatgcttcgcaggtaagccctggggatgacatcaccgtcaccttgaagaagggtgtcattaccgcaaccaccacatccgcaaccgcgtgacactccatacgcagccacgcatatataccgtatatacataaggagaacatcatgaccgaaaacgccacatccaccgacaagaacacccccgcctcgtccctggcggacaaggaacgcgagctcatcgcccagatgccatatgaagaggcgcgcgacaagctgattcaggccgtccaggcactggaaaccggcggcctcaatcttgaccagtcgatgcgtcaatgggaaatcggcgaggccttggccaagcgcgcccagggtctgctcaacgacgtccgcgccaagctcgaccaagcacaagccgagcaagccgccaacgaagccaccgcaggcacgcagtccaacctcgactgagttgcctcccggcgcggcatcatcgtgcaagcttgcggatgatgccgatgcgctcctgcatgacggagcagatggcgtcaatcacatcagcggacagccggcggttggtggcgagctgtgcccgtatcagttcaggcacctcgtcgagcatccccaaatcataacggtcccaatcgtcgataagtcccaactgccagtaggcgttgtccgcatcgccgtagtcgtcgagccagaacggcttcgccgggtagtcttcgttggtgatggcttcggggtccatgccgttccacaggctggcgccgctgtcaaaaatcggggccgggcgaatctcgaatgattcgacgtcacggatgagaccgaagttgttgtaatgccggtcggtgttgcgcagaagaaaatcaaggaacagaaaatcgttggtcgccgcatttgccgtatcacgacttacgccgagttgctgacatgcgtccagccatatcatcttgcgttcggtgttgtcgccgcgtcggaagatgcgcataacctgccctgcgggaatcagctcttgcgtgtcttcgagcatttcatcgcagacggagacccggatgcccttggcgcggccgatgcggtattcgacatggtcgatgccgaacagtcgtgccgtctgccaggcgatgcgctcgttgtccggctcctgaccggtgcgccctcccttgatcaggctgcggacgccatcgggaccgataatccaacgtttcggcaggtcaccggcactggtgacatccggggtgttcacgttgccgatgcgcgacgaattaccgaagaataaggcctgcccaagtcgttcgtcaaaatcgttgtggaaaaagttcagtttttcccacgtcagatcgggccggtcgagaggccgcacccaatactggtccgacaggctgagtcccaaggaacggtccagcagatcgttcgtcgaagcgatacccgaaccggcaaatacggaacgcataccgtcacgggtcatgggaatgccgcgagaacgccaccacccggtaatcgactcaccggtgggctcaggtttgccgtccacatacatgccgatcgggattcgggactcgtcgtagatctcccctgccctcagggcgtatccgccgcgttcgaaatactcgaactccattaccggatgggtacggcacatcagcatgcggttcatggtcatgtgcgcctcccgttattcagtccaccgacgatatccgcgtcatatcccatcctatccgctttaggactcgtatatgcggcccactgaagcttcagcgccaaatcatcagtcagcatcctttcccgcgtcaattactcatccgcggcatcccgcggctcgcacctgaatccggactggactgagttctgcttcccggcatacgatagtggtgattaggccacattggtagcagttatagaagggaaatcccatgtcaacgctgattcttgtattccatccgcacctgaaggacggctcgcgagtgaacgcccgtctgcttgccgaactcgccgcacaaggcgaggacgacatcatcgtacgcgacgaatacgccgaatatccgaacttctccgtcaacgccgacaaggagcacgagctactggaggccgccgaccgcgtaatcctccagttcccgttctactggtactcctcccccgcgctgctcaaggaatgggaagacgaggtcatcaccgcaggctgggcctacggtggaggccacgcactcaagggcaaggagctcaagctggtggtcaccactggttccgacgcctccaagtaccgcaaggatggcgagtacaaccacaccatggaggagctgctaagcccattcgcagtcgtggcctacaaggtaggcatgaactatgccgaaccattcctggtgcagggcaccgccaccatcagcgatgcggagctggatcaggccgccgccgattatgtttcggcgattttggactgaataagctgaggccgggtgcaagtcgcacccggccttgttgtttcgcgggctagccgcggtctctcccagtcagcctgcggctgacagctccctcgtcagagagagcttattttttggatcagagggagttgatagctacttcttcaacggcacgtagatcacgtcgtcaatgagctcgcgatagtgctcaacgatttgcgcgcgacgggtcttcaggctcggggtcagcatgccgttggcctcggtgaattcgtctggcagaatctcgaacttacgaatcgactcggcgcgggaaacgccctcgttggcggcgttcaccgcacgctctacctcggcatgaacgatggcgttcttggccagcgaggccagatcgggttccggtttggcgccttgggattccaaccagttgttggcatccgccagatccagcgtgaccagagcggccacgaacggcttcttatcgccaataaccaagcactggttgaccacgggcgaggtcatcacggaagcctcaagcagacccggcgacacgttcttgccgccggcggtgatgatgaggtccttcttacggccagtgatggaaatgaatccgtcttcggagatatcgcccaaatcaccggtgtgcagccagccatcggtgatctgctgggtggtgacctcagggttgttgtggtaccccttgcacaccagcggtcccttgatcaccagctcgccatcctcggcgatgccggcggtgatgccgcacatcggcatgccgatggtgccgatgcgattgtcttccggcaagctcacgcacaccggaccacaggtttccgtcatgccgtagccttccagcaccggcatgccgatgccgttgaagaagtgggagagctcggaatccatcggggctccaccggtgacggcaaagtcggcgttcgggccaaagatggtacgaatcttcttgtacaccacctgctcgtagaaagcgtgagcaatacgaccgggaagcggcagcttctcgcccttctgctcggccttggaccattcgcgcgcgttttcggcggcgcgcatgaacatcttgcccgcaaaaccgctgccggcacgctgggaggcggcgttgtagaccttttcgtacacacgcggcacggcaagcagcagcgtggggccgaaggtctcgaagtccttgaccatggtcttcatattggagctcagggccagagaaatggtgccgccaaaactgaagaattccaggaatcgggcgaacacatggctcaggggcaggaacagcagcagacggcggttgggccatgcgccggcacgaggcatgtactgcaggccggagcgcaccaggaacgcgaagttgcggtgggtgagctccacgcctttcggggtgccggtggagccggacgtgtaaacgatggtggcgcggtcgtcgccgtgggaggcgctcttgtattcccagaattcggcatcggtgacgctttcgccataggtcttgatggcgttcaggccgcctgcttcgatgacgaacacgttgcgcagggtgggcacctcgctgcgcacggattcaatcttgtcgcgctgaccgtcatcctcggcgatggcgagcgtgaccttggaatcgttgaaaatccagctgacctggctggcggagttggtctcatataccggcacggtgagtgcgccgatggacatgatcgccatatccagagcggtccactcccaacgcgtgcgagacacgatggccacggagtcgcccttgttgacgcccagaccaatcaggcctttggccagatcgatgaccatgtcgcggaagacctgggcgctgtacggctgccaggtgccatcctcagttttatattcgatcatggcgccatcgggatcgcgcttggctcgctcatcgagcaaatcgaacaggttgatgtcgctgtcaatcggctccttgacgggattggtgaactgcttgacgatacgagtatcgtttatggccttatcagcgatgttttcagtcatactccccatgtaactccacggatgctacaaaacacgcgcgaaacaacggattgtccagaccaaatggccccggcaatccgttatttcgggcaaaccaggtaaatctgtcgcaccgtacattcagcagattactcggcggagtcattggcctttttcagctcgtcgcgaatctcctgcagcgtggcgagagtctgctcttcaacgctaggcccctgttcttcagcgtcagcctcatcctgggcagcagtgagatcacgaagcttattaatcggcaaaatcacacagaaatacaccgccacgccaacaagcaggaagctaatcagcgcgttaagaatcgcaccaaatgaaacagtcgagttgttgaacgtgatggtcagcagtccggaaagatccggtacgccgccaatcatgccgattaatggactgatgagattgtcgacgatggaattgaccacagcggtaacggcagagcccatcaccacacctaccgccatatcaatcatcgatccgcgcgacaggaatttcttaaagccattcaacggacctttatcggtcaaagcaacaactttgcgagcggttcctcccgtggccttggcaaagtcggtggcaatattcatgggattgtggttactcataacggcactccttacgaaattcagacacttcacttgtatccgactggttttcccacgactccattatgccgcttgttggaatatccctataccactgcggcgtcccgtacgtgactatgtacgagaacgccgccacccctgtttgctgagaacctgttagagctgcttagaactgaatgtaatcgacttccgtatgttcgccggtttccaagtatttcgccacatcatcaggaccgacgaacaccagttcgaccgcttgcgcaatcatcagattgacacgatccattggtgtaaggttctcgaaatagccgtacaccggaattcccagcgcatgcgcatatccgatttcgaacatcgtgcccgggtcctcgtccataagattggcgaccacggctttagcagcattaatgccatggatatcgtccgcaaaacatccttcagggccgacttcttcgatctggctgacaaaccgcggcttgaacagtaccttgccatggtcttccaatatcttttccaaacgttccatacttgacgtttgttcaggatcaaagaacggaccggccacatagaagtcatactgtttgtcttcactcatggtctctagtcatagcgcagccgcgtcggacgccagccgttattttcactgtatggacaaggggtcgtatcgtgaacattactacgggataaccgtcaatgactacgtacgttgcccccgatcagcacactccgccactttcgccccctcccgtatcgtcgagcacgcgaaccaagccgaccaaatagccgccatcccatgcgctgattaccgtatccgaatgctgcaatgccttgaacaaccgttcgggccactgcgccgattcccaaccaaccgacttgaacagcgcctcaacctgttcgacagtaaaccgcttctcttccgtgtattcgatagccatggaccctcacgataaccgtgaagccccacatgtctttgcatagtttcacatgacgggatgatggatggtggaacctatacgtttacacatgcctaatgcctatggctcatcaccgatgaatagaggctgagataccgtcatgtttccgaagccaagtgcccgagatcggattcgaaccgacgacacccgctttaggagagcggtgctctatccactgagctactcgggcaacgacgtttcattgtacacggccgcacgcccagtcgcatcatgttcgcgtggcagcctacataagacgcatggcagtctgtgtaagctacctggcagaacccgccaccaaggcatggccggttttcgtgctggtttggtgcgaactgctcttgcgcacggcgaaaagacactgaaagacaagccgcacacggtacagtggcaaatcgcacgaaaagcaaggtaacagtaaacaagccggaggaaagggcagcatggcaaaggcacgaagtactaccacaggtgcaagcgtacgagctcgcgccgctgccaagccacgctctgccaaagccacggcacgcccagtatccaagtctgccgtgaagccacacaaacggcatcgtctgcttggttttctcgccacgatgttcgcgcttcttgcccttgccggcactgccgcccgcgcgctgcctgccgatttacaggaactgccatttgtgccgattgtggtatcggcaacgccctggttcacgttgcttggcctgattgccctactgttggccatcgtgtcgcggcgtatccttgccgcactaatcgccatcgccgcaatcgcatgcaatggctattggcaatatccgttcttctactcgaccgacccgctcccccaagccgcgcagaacgccgtggctgcggcctcccccaacaccagcgatgcctacgcgcgcgtcatgaccttcaatgtatacaaggggcaggccgacccacaagccatcgtcgaactagtccgcgatcagcgcgtcgaagtgctcgctttgcaggagaccaccgaggatttcgtcaaaaaactcaacgaggctggcattgagcactatctgccgtatgcgcaggtctcatcgtctgacggcgtattcggtaacggcctctggtcggccacgccacttgccgatccggccgacgatgacgtgaattccagcgcctcattcatgcccggcggcacggtggatatgggtggtcagcagattcgattcgtatccgtgcacaccaccgctcccgtacccggctattggcggcagtggaagcgatcgctggatgagttgggtccgatgcgcgggcatacggatacacggtatattttcatgggcgatttcaatgccacttacgatcacacgccattccgtgattttcttggcgaccggttcgtggatgccgcacgtgaatccggacatgggtttacgttttcgtggcctacgaaccgcgtgtatatgccgatgttcgccggtattgaccacgtggtgcttgatcagggcatgaaggccgggcaatgcaaggtggtcaaagtcgagggctccgatcatgcggcgttgttggctaccgtggcggttgggtgatttcgtattcctcggccagccgcatacactgggacacggcttccagaatcgcctcgatgccggacttcttgattgagccgtcatcctttaaatacttcatcaggcgcactgtggatttggtgctggcctcggggtcagggcgagcgccgggagcggcgtcgacgataagcatgtggatagtgttcgaaccgatatcaagcacaccaagtcgcgtggtgcgcgaacgcagattgaccatgatccctattcctgaccttacccaacccgtgatggccgaacaacgggccgaccatcgcaatcagccagccgtgcgccaccatggcgagtcgttcggccggcaaccaacaccgcgaggccagccgaacatcacacaaactcgactaccgtacaacaatcacaccggatgccgcgccgttcacaacgattcgacgaacgttccgagacgttccagcccctcggtcagggcctcacgtgaggcggcatagctcaggcgcacatgcgtatccgctgtggccgcaccgaagtcgcggccaggagtcagagccacatgggcttcatccagcgcgcgttcgcagaacgtccaggcatccagaccagtacgggagatgttgaagtaggcgtagaacgcgccattcggctccacctcaaccggcaaaccgatgcgcttgagcccgtcaatcacaatgcggcgacgggcaagcaattcctgacgacgagcttcacattcggccaaactctccggcgtaaaacaggcgagcgccgcatgctgggtgggcgtgtgggcgcacaggtagtagttggtggccaggtcgtcgaccgcttccagcacggtggggtcgtcgggcagaatagcccagccgagacgccagccggtcatgccgaagaacttggagaagctgttgcacacgatggcaccgggatcgcaggccagtacggacttgacttcggtgccgtccggctcacggtcggccaaatcaaggtaggtttcgtccacgatgcgccatgcgccgcggctggcggccagcttgcacacctcgtccaatacgttgaagtcgatggtggtgccggtggggttggacggcgacgtgatcattacggccttggtcttgcttgtccagtactggctgcacaggtcggcggtcaggtggaagcgggtggcggccgaggtcggaacgtcgatgacccgcccctcaaaggagcgcacaagttcgcggttgcacgggtaggaggggtcggccacaatcacatcgtcaccggggtccacggtcagcgcggtggccaacagcagggcggccgaaccgccggcggtcacgcagatacgcttggggtcgatgtcaaggtcatgacgctcgcggtagaagtcggcgatggcttggcgcagttcaggtaggcccatggcggcggtgtacggcagggcccggccatcgtactgttcgcgcatggcgtcgcgtacggcgggcggcgcgccgaaatcgggctcgccaaggcttaatttgatgacgctgataccttgggcgatcatcttgtctgcttgttcgccgaataccatggcacggaagggattggcctcacgcgctcggcgggacatgactggagacgcggccggagattggggctgctgcgctgcttcgttttccatatttcggttctatccgcctcacgggacaaggtttcttcttctataatcactgtaggtcgattgagtgtccaacccgtattcaaggaggaataatgagtcgattcaatggcaaacgcgccgagttcgaggccagcggcgaaaagatcaacgtcgcgattctgggtgcgggccgcatagctcacaccatggccgacaccctgacccagatggctgaaggttcactgtattcctcatggattcacccgtatgcggtagcggcccgtgatattacgcgcgcgcaggcttttgccgaccaatggcattttgacaaggcttatggatcgtatgaggagttgacggcggacccggatgtggatctggtgtatatcgccaccccgcacagtctgcacgccgaacaggcgatcctgtgtatgaaagccggcaagaacgtgctggtggagaagtcgttcaccgcgaacgccgggcaggcacgtgaggcgctggccgtggccgaggaaaccggcatgctgtgcacggaggccatctggacgcgctacatgcccagccgcaagctcatcaacgaagttatcgagtccggcgagatcggcgaggtgaaagcggcgagcgccaacctgtgctatccggtgtccggcaaggcacgtatgaccgatccggcctgtgccggtggcgcgctgctcgatgtgggcgtgtatccgctgaacttcctggatatggcgatcggtgccgaccatggccgcacgctggatcatttcgatacgtcgatgatggccgccgaaaccggtgtggatgcacagaattccaccacgttgtattacgatgatggcacgatggccgtgtccaccagttcgatgctggtttcctccgatcgcggcggctacgtgtggggcaccgaagggtatttggtggtcaccaatatcaacaatcccgagtccatcgatatctacaacaacgatcacaagcccgtgcgcagtgttgcggtgccgtcgcagttgaccggttatgagtatgaggtggccgatgcagccaacgcgctgctggatggcaagatcgaatgcgaggcgatgccgcacgccgacaccatccgcatcatggagctgatggatgcgattcgcgaccgttggggcctgaagttcccgtttgaggtctgatttcagctcccctccagaggggagctgaaattattccgctgaatctgcatctccttcaacaatctgctcatacagccgtgcgaggcgttcgtcacgcacggctttcgttaattcgcactcccatacggtaattacacgccagccggcggcctccagttcagcccgctgcgcgatgtctcgattgtgattgcgcagtagcttcgtctgccagaattccacattcgatttcggcatcgaatgtttggaacagccttcatgcatgtgccagaaacagccgttgatgaacacgatggtgtggtatttcggcagtactacatccgggtggccggggtaacgcttgtcgttcttgcggaatcgcaaacccttgcgaaacagatagctgcgtaccagcacctcgattttggtgtctttgccacgaatatgcgacatcgtgtacgaacgggtgccccgctcatacttctccactggctgtttcttgcgattcacgcactccagactaccgtgacgttgcggcgaggatgaaagcctgaacgaacaatcacccatcttgcccgtccgtgtctcttatcgcgggcaatgatcatctgccggtcgagactgcacgattagaccgaatcaaatggatgacatgatgattcgtagggccacggcggccgatattccccaaatcgacgaactgctgcggcaggtgctcgaagtgcatcatgccggccgaccggatctgttcaaaggcggtgtcaagaaatacacggacgaggaattgaaggcgattctggccaacgatcagacccctgtgttcgtggcggttgcaccatctgccaatgacggcactgacgtcgaacataacgccgactcccccgccaccgaccaagtgcaatggcatagcgccaagcgacgtctgctttgcgagatttgcgagagatgaatgcgataccagcgttcatggctatgctccttaatccaatatcaatggatgaacctgcactgccccgtatgtcaccatcataatatatcgaatatcaatataaagatatcgaaaatcactttcaccattcacccacacacatcgcgacgtgatcgaccgttcttgccttgctcgcagcatccacgaccaacacgggaaagtcactttaaaaaagcactttatcaatgtggataactcggaagctagaaccacatacccccgttcagcttgccaatcagaaacctcatcccataccgtcagatgcacccgcacgcaacgacgcgtcagacaacagaaagaaggaccaatgaacatctctacgtttacccacaactcccacccggcaattcggcatacgcattttgtctagtgcgagattgagagttatgatgacacgaagaaaactcatcatcaagaaacttcggcaagcggcaaagcagcgagggctcgatttctatttgttacggcaaggcagcagacatgaggtttactgcctggacgggttgaggatacccatcccccgccataatgaagtctcagaacgaaccacgctggatatcatcaacgagagcgagcagaaactcggaaaggggtggtggcaatgagcaactatgacgtgcttgtgcaacccgatggccgatattggtacgttcaggtaccagctatcgaacggtcgacccaggccaaaggacttgacgatatcgagccaatggctaaagatctcatcactgtcatgaacgacgacgacaatccggagctcaaggtgacgtttgtgttgccgaaacaagccaaacaacacgtaacagaaatgttccggcagcgcgaaatagcaaaaaaagccaacgcacaagcggctgccgaatcccgactcgccgcacgggccctacgcaacgagggactcacgtatcgacaaatcggagctttattgggggtctcctaccaacgagcatttcaattggtcaacggcaaaacaaagcacaaaacgacagcgtccgaatcgcctcagccaacaactgaatcacgctccccacgcacgcaccatgccacaccgctatcgactccggtctcggcttagcgaacgggtccacaaagcctagactgtttccgcctcccaagctcaagagcaccgagcaggatcttctcatcccagcagattgaggagatcgtccttggtgagggtggcgatggaggcgggagcttcggtgagggcgctggcgccggtgccggcttcgtcggcaagcaaggaagcatcggtgaactggcgggcgagctcgctcttggtatgctgaagctccaagatgcgttcttcgatggtgtccttggccaccacctgatacacgttgacgtcttcggtctggccgatacgatgtgctcggtcggtggcctgatcctgcgcggcagcgttccaccatggatcggcgtggatgaccacgctggcaccggtcaggttcagtccggtgttgccggccttcaatgaaatcaggaaggcgggcgtatcgtccgcattgaactggtcgacgagttcgagacgcttctttttaggcgtggatccggtgatggtgtagtagcgtagtccttgcgcgtcgaaacgttcggcgatcagatcaaggaagctggtgaactgggagaagatcagcgccttcttgccttcattcacgcaggtttccaccagttcggtgatggcggcaagcttggccgactgatccttggcatcggcatacagcagccttggatcacagcagatctggcgcaacttggtcagctcggcgaggatgcgaatcttcgacgtgttgaaatcggcttcttcgctgtgttcgagctgcattctgagccgctgctcgtgggccgcatacagtttgcgctgttcgccggcaagctgcacggtcagcgtggtctccaacttgtccggcaaatcggtcagcacttgggacttcaacctgcgcttgatgaacacgcccaccaacgactgcaattggcgagacacccgggcggcctcaggattgacctgtgcggcggcccgaccttcggccgtgctgccatctgcagcccgggcgttggagatgggcaactcgtagcgctcatggaatcgcttgtatgagcccaatagtcccggcatcaggaagtcgaagatgctccacagttcggagagtcggttctcgatcggcgtgccggtcaaggcgaaacgatggtcggcggccacggccttgaccgctttggctatcttcgtggtgtgattcttgatgtactgggcttcatccagcgccatgacattgaaacgttgctcattggcggtgtaatcatcgacatcccggcgcagcaggtcgtatgaggtgatgagcacggtggggtcatccgcccggaacgcgcggccgatggcggtgcggcgctcggctttggtaccggccaccaccacggcgttgaagctcggggcgaacttggcgaattcggcaccccagttgtacaccaaggacgccgggcacacgatcaatgatggatgcggcccgccatcttcggaatcgaaagtaatatgaccggttacggctgattcactattaacagcattaccggcatccatgccttgagcggtcggcatgccactagattcgttgtggtatcgcgacagcaacagggcgataagctgcacggatttgcccaaacccatctcgtcggccaaaatgccgccaaaacccttgtcgcacaacgtgttcagccattggaagccttcgacctgataagggcgcagaatatgcttgagactatccggcacttcatacgacttagggtcgatgatcttgagatcgtcgatgtattcggtgaacgaagcgtccttgactacatcggagccgtcatccggcagctcaccatccagtaggaatgctcgaccgcccggcaactcgatcagcccggagttgagctgctgctcgctcagatcaaggtcgctggccaatcggtccaacgtgctgagattcgcgccgctgagtttgaccagcgtgccgtccttcaactgatggaatcgttgacgccgacgatacgaagacagcaaggcacccacttcgtccggcggtacttcatcagcgaggggtgatatctccaccaaattgcctttgatggacaatccgactttgacgcttggcggcttgggcgcgatcagccggtcaaaagccggtgtggtgaagacctcccctacttccttcagtgcgggcaatccctcgtcaaaaagacgaacaatctgcgtggtgtcatcgcgatcgatagtggccgcatcagacacgaattgtttggcggtctttcgcgcggccggcgttcggaacccattcaccgtctgatgagtggcggccgcaacgcgcttgcgctggtcaggcatggtaaagaattcacgcactacatcaatcgcaagatgctcagcgtcgaaatcacgcccaatcacgccccgagacaaggggatggaacgctcatccctagcatgcaccgtcgggccatcgggcagcaacgggacaatggcatcgccgtagtgtgccttgacctcgcattgcacaccatgctcatcacgatccagataaaactggaggctgcattccgtaggacttaattcagccagctcgcgaggaatctcactggcctccaacagtccggcaccaaccagctgaggcaatagcgtgcgtgcgaacagggcgatgtcatcaccggcaatgacctgcccctcgccatcgggttcaaacaggtctcccaatagtcctcgcaacggaatcaatcgtttcgggcaacggacgaatcggcatcccgctgcgcttttacgctgagagcccgccatcatggcggataccgcaccggccggattagtggaggcgagcaacagccatacatccttgccaccatcaatcacggtttccaccgccggcactccggcaagcaggtatccggcatccggaccatacgtattgaaatcacgccgcgcaatgcgcataagaaaatctggctcgccaccatcaaccggcaccgatgcaggctgcccggagaaccatgtgttcaacacgagctgtacgcctctgccctcacgtacggacagcaaccgggccacttccggtgctgaaagtgtcaggtgacgatcgatggcgatatgcccgtaataccggtcctgctgctcggccgcacgacgcacggccatcgcgtcgtcaaggaagcccagcagtgggcgcgaatcatcgtcgaacatatccggcgtatgggtaaaggcaagcttctgcccataatccgtatagtcgccgttcgccatggtaagcacaaattgcggaatcgatttcagtacatagctggacccattggaagtcgatccgatcttgaactccacgctccacacgccatcgatgaaactcaatatcggaacaagctgcacctgccccaagcccacagtctcactatcgccctgatacccgccgcctcgggtgccggcacgagagccgtatccgctattcgtacgtcgtccacctgcgccatttcgtctttttgcagtatcgaatcggcgcatgagcgcattgcggcgacgcgctttggcttgagcatcttgcctatcgacgtgctccatatagtcgatcagcgtccgagacggcctcacagccccggcacggtacccttcaaaacgctgcggatcatcgcagaatatgaaggcgagcgcaatcatgtgcttgcacatgccatagccacggccgtaagccgggcatgagcacttgccaccgacggcttctcccgtgtcgaggtcgaattgcacgctggtacgatacctactcgatgggctggtggtgccacgtagaataccgtcaagctcggcatacccggttcgatgattttcgctgtataccggattgataaccatggtggccgctttgcgcgcaatgctacgggcacgagcgagcacggcattcgacgatgacgattccacatcgttgcgtaacgcaaggatagggacggcatgggcttcggcacgcttcgcagccccggcgaaatggccttcgtcctcatcttcgaaccatacggaacgtccttgcctgaaacgatagggcataaccgcatcggcggcggacaaactgtccgttccaccaaacgttacggctctactgccggcagcgcctgcgccaccaagcattccatctgcctcgccagagataccgcctataccgctgctcttgccggcaaagagacccctgtcctcattagtgtcatctgtgtcatctgcgccataccgatcatcgtcgtaatcggcaccttcgtcgcctccccttttccaaggattgcgacggcgcaacgcatggccccaggaaacgccggaatcatcatcctcataaggcaggaggtcatcgtcatccgcattatcgggaacatggccaaatacaccataccctttgctcatgggcgagcctcctttccagcgaatgcatttcagcccaacacttccatcctagacgaagcgcgcggtagccttaatgtatggatgcagacaagccggcgcaacgcaaatcctatgcagggaacaccaccctcgaaatcttcgaggtgctgtggcgtcacagctactttggacatggcctgaccgtgcggcaaatactcgatgaacttgcccgtaaacaccagctggaagatccaagcgagctgccgaccgagaaaaccatacgaaatcagctcaaaaagcttaccgccacggaatttctcggcaggcatatcgggcatctcaccgaaagcgaccttgccggcatcgaatgcaagaatccacaacccggctggtatcttgacgcattcctatccaccgccgaaatgcgactgctgctcgacagcctcactttgtctcgcatcagcctcgacaccatggacgatctcatcggtaaaatccgcgaactcgcaggtgccgctgggcaagcagtaggttaccttgagcacgtggccacctacacgcatatcaacggcgagttcctatccaccatcgaccaactgaatcaggccattgaagaaggccacggcgtaaccttccaataccgtgattacggcccggacggcaccctgataccgcataaaagccgtacgggcgcaggtcgaattacctacaccgccgacccttaccagatggtgtacaagaacggacggtattacctcatctgccatctacatggcgaggataatctccgcattttcgtggtcaaccgaatcgccaacgtcagcgccaaaggcaggaacggcacagttccactggaaaaaccagcgccggctgattttgacgcagtgaacttcatgcgtcaccgcccgtatcccgtagccgatgccccgattcgcatccgcatggccgtacgagacgaatccatgctcaacaatgtgttcgaatggttcgacgaccctcagatcaaacattcgccggacggcacacagttcgaagtcatcgtcgatgctcccgaacgcgccgtgttctggtgggcattgcagtattcctgggatggccgcgtagtgattcttgagcccgattcgctcaagcgcaaactctatgatgccgggcgtcgcatggccacagcctatgctcccgaatgatgcagcatcacatcgcacacctccttgccgagttgttcaccagcgaatttcaccggagaacctatcatcccatcgccaatcacgttcggtaattttttaccgaacaactcgatttcaagccattccacgaactatggcccccgcctagccgtacttgacgctaaggtggaaccatcacatgccgcgatgcacatgcaacgcaaacgcaacgatatgtaaggagcaactatgagcgaagagcgtaccgcatggggatggggtctggccagcgtagacgccgccggcaccaccctagacgtctggtaccccgaactgaatctcggtgaggcaccggccgaggccgatcgtccaaaccacaatttcggcactctggctcacgatgaagccgacgcccgtggcatccgccgcgtgccggtattcgtcgtcagccagttggacgagccgatcagcaacgccgcggacgcttacctgaaactccatctgatgagcatgcgcatggccaagccgaacacgctgaaccttgacggcatcttcgcccaactcgccaatgtggtgtggaccaactacggtcctttcgccgttgaggacttcacactacgcaaggccgatgtcgaacgcgcctccaccgaagccgctctcgctttcgctgctcaggccggactgcctgccgcagctcctgccaccaccgtcaacgtgttcggtgtggataaattcccgcgcatgatcgattacgtagtgcccaccggcgtgcgtatcggcgacgccgaccgtgtgcgcctcggtgcttacctatcttccggcaccaccgtgatgcacgccggattcgtgaacttcaatgccggcacgctcggcgtctccatggtcgaaggccgcgtttcgcaaggtgtggtcgtgggcgacggttccgatatcggcggcggtgcctccatcatgggcaccctctccggcggcggcaagctgcgcaactccatcggcgagcactcgctgctcggcgccaacgccggtatcggcatctccctcggcgataactgcaccgtcgaagccggtctgtacatcaccgccggcaccaagatcagcatctgggacaaggccaaggccgccgctggcgaaccgctggaagtggtcaagggtgctgagctctccggcaaagacaacatcctgttcatccgcaactcggtgaatggacgtatcgaagcccgctaccgcaaggtgggaattgagctcaacgccaagctgcacaagaactgaaattgaaataatggagcgttatcttcgttgctcctcggtcgacgtacttccgtacgccttccctcggtacgcttcgataccgcacacattatttcaatttcagaactagccctgctcgttcttatgcagccgtcgcagcatagccggtttgcgctgtacatatagaaagcgcctcactggatctccagcgaggcgctttctcaaaccaacaatcaccgctcgtccatcggcacgaaatcgcgctcgaccggaccggtgtagacctggcgtgggcggccgatcttggtgttcgggtcggccagcatctcacggtactgcgcaatccaaccgggaatgcggcccagtgcgaacagcgtggtgaacatggccggatcgaagccgatcgcccgataaatcaagcccgtgtagaaatcgacgttcggatacaggttgcgcgatacgaaatactcgtcgttcaacgcaatatcctcaagctcggtggccacatcgaacaacgcacgctcgtcggacggcagtttctgcgtatcctcgcgctccatgatcttctcaagatacttcttggcaatcgccgcacgcggatcatacgacttgtatacacggtggccaaggccggaaatcttctggccatcctccttggcatcacgcacgaactcggccacagacttaccggaatcacgaatcgccttcaattggcgtagtacggcctcattcgcgccaccgtgcaacggtccggacagggcattgacgccagcggccaccgccgaatacaggttagcgtgggcggaaccggcgatacgcaccaccgaggtcgagcagttctgctcgtgatcggcatgaataatcagcaaacgacccaaagcatgcacatacaacgggtcagattcgaacggctcgtacggcacagcgaagcacatgcgcaggaagtcgtccacatagccacgcgcgtaatcggggtacagcatcggctcatcgcgacgacggcggaagatgtacgacacaatcgtgcgggccttggccatgatgatcttggcggcctcatcgagctggtcggtgtcggagatatcggtggtgtccggatagaacgtggccagcgcattgatggcggaggcaagcacgctcatcggatgagcggagcgcgggaacgaacccatgaaggtacggaagtcttcgccaaccatcgtcttgtggttgatgtccgcgcagaactgctcatactcagccctgctcggcagctcgccgtggcgcagcagccacgccacttccagaaaatcggagttctcgcacaactgctcgatggggtagccacggtagcgcaggatcgaatgcttgccgtcgatgtaggtgattttcgattcgcactgtgcggtggtgaggaatccggggtcgagcgttacccagccgtcattgcgcagcttggaaacgacgatgccatccggccctgcactagccttcaccacgggcaggttgaacttgttcgaatcgacatcaagttgtgccgttgccattcgcgcaccttcctcttcatgaaccacttaccccaaacattaacgttcacgcgttcgcgaacgctagtgttcggtactttatgtcttctgtgttaccgccggcagacaccggtcgatacacgaaagccgaagtgcgctcatgctatcaaagcaaacgcacttcggcttgttacgtctcgaattcacgggaattcgacactttctataggatatttggctatttcatagcaaacgactgtttggccgcgtcacgtatatgctcgacggtcagcccgtacctttccaagcaggcttcagcactgcccgaatgaccgaacacatcttcgactccgaccttgaccaccggcacgcgcagatccgaggcttgttcacctactacctcagacacggcagccccaagacctcctatcacgttgtgttcctcggcagtaacgattgctccggtctctcgtgcagcggcaatcacggcatctcggtcaatcggcttaatggtgtgcatgtcaagcacgcgtgcgctgatgtcttcattctccagcgtcttagcggcctcaagcgcctttcccaccattaatccgcaggcgatgatggttacgtccgaaccatcgcgcagtgtcgccgccttaccaagttcgaatcggtaaccgggtatatctcgtgtaacggtaggtaccggagagcgacccaaacgcaggtagcatggtccctcatatgtcgccatcgcgaaagtggcatgtcgagcctcttcagcatcggccggcacaatcacggtcatgccgggaatcgtacgcatcagggagatgtcttcgatgcactggtgcgtcgcgccatcttcaccaaccgaaagtccggcatgggtgccgaccactttgacgtttaaatgggggtagcacaccgagttacgaacctgatcataggctcgaccggcagagaacatcgcaaaagaattgacgaacacagtcttgccagtggatgccaagccggcacccacacccaccatattggattcggcgatgccaccattgaagaaacgctcagggaactgctgtgcaaaatagcaagtcatcgtgcaggtagtcaaatcggcgtcaactaccaccacatcaggattgttctttcccaattcacacagtgcgtgcccataggacacacgggtagatactgggttcgtgtttggctggctcatcagtttgctcccttcgatacggcggtcttgtatgcaacagattgcttcagaccttccagatggctgatgcgcgcgtcaatctgagcaaaggcagaggcgaattcctcgtcgttcggtgtgccgccgtgccacttgggattattttccataaagtccacaccgcggcccttgaccgtgttagcaatgattgcggtgggcacggtgcgtacgccagcagctgcatcaatggccgcagcaatctcaccaacgtcatgaccatcaatttcgatggcattccagccaaaggcgcggaacttgtccaccgtcttggaggggccaccgatacggtcggtgaagccatcaagctggatgcgattgttatccacaaaagccgtcaagttacttacgccgtagtgtgcggccatttgtacggcttcccaaatctggccttcttgaatttcaccgtcgccgcagatagcgtatacgcggtagtcgaggccatcgatacgggctgcgagcgccatgccgagtgccgcggataatccttggccaagggaaccagcggacatatctacaccgggcactttcgtcatttcaacatgacccgacaagtaggaatcgatgttgcggaaggtggagagatcctcaactgggaagaaaccacgcatggccagtatcgagtacatggccggagtgcaatgtcccttagacagaacgcaacggtcacgatttgcatcatgcggattagcgggatcaacgcgcattttgtcgaaatacaggaccgtaaggatatccatgacggacagcgagccgcccagatggccggaacgtactgcctgaaccatgccgagggcactgcggcggcccttggccgcaacgagttccagctcgattcgtgtgttgtagttcattgttgctctttcatgagaagaaaataaggtgcggaatcggccgtctagttggaaggaaaccagacggccggttacctgtggcatgtctggcatgccgctaattgatcggaggctagaagccggtacgcacattgcccttgttcttgcgcatatcgaagtacacggccacgatgatgatgacgcccttaatcacgtattgccagaaggagttaacgtgcataaggttcaggccattggaaatcatgccaatgatgagcacaccgatgaacacaccagaggtgcgacctacaccgccatacattgaggtaccaccaatgacggcagcggcgatagcatcggtttcataaccaacaccggcagtgggctgaccggaggacatgcgggaggccagcacgacaccggcgaaggaagcaagcagaccggagacggcccacacaaagatcttgacgcgggtgacattgataccggagtacttggctgcggtcgggttgccgccaagtgcgtagatatgacggccgagacgggtcttgttcagtagcaggtacagcaggaagaacagtacaagcatgtagatgaccggcaacggaattgggccaaggtagccattgcccagcgtggtaaaggcctcagaacgcacggtaacgggcttgccaccggcagccagatacgcggcaccacggcaaatactctgcatggccagggtaacgacgaatggatgaatgccggtgtaggcgatgatcacgccgttggccagaccgacaatcacaccaattagagtgccggcaaccagcgccactggaagtggtagaccgaactgagtcatggataatacggccaccacaccggacaatgccaccaaagcgccgcaggtcaaatcaatgccggccagcatgatggatagcatcacgccgatggcgaggattgcgttggtggataccgaacgcatgagattaacaatgtttgcccaagacaggaaattctcggcgaagatgctcaggaacaccagcagcacaacgaagccgatgagaatgcccatattcgccttgatgaccttagcgattgatccgatgacgggagcgtcctccagcttatcgaggacttttgtttgcgttttcatgtttctttccttgtaagtaccgtatttgggtcactgtttgcgccaggctcatcagccgagcgcgtgcttgaggattgcatcctgttcgaattcgtcgcgctgcaagatggcgctgatctcaccacctcgcatgacggccatgcgatcggacatattcatcacctcattgagctcagaggaaatcatgatcacggcaacgccgctggcggccaaggagttgataatcttgtagatttctgccttggcacccacgtcgatgccacgggtgggctcatcgagaatgagaatcttgggatcggtagccagccatttacccagcacaaccttttgctggttgccgccagaaagattaccgaccttggattccagtgaaggcaccttgatgttcagggtcttgaccgcattttcagcgatttctcgctctttacgcccattgacgcgtagcttggagataaattcggataaggatgcgatcgaggagttgaacttgatatcgctgaacagaaacagaccttcagtttttcggtcctcgggcaccaaggcaaggcctttatccatcatctgcaacgggttcgtcttaccttcaatcttctcgtcgaagactgtcacagtgcctttgccgccgacacggaagcccataatggattcgaacaattccgaacggccagagccgatcagaccatagaatcccagcacttcgccgccgcgtacttcaaagctgaccggtttgtaccaaggagcgcatgagtagtcggatacagacaatgcgacggcaccgggcttgttgtaagtacggtaatagtagttctctacatcgcggccgaccatcatacgcaccagctggtcctcatcggtttcagcggtgacaaccgtgtctatgtatgtgccatctcgcataatcatgacgttatcggtcaaatcgaaaatctcactcatcttgtgggaaatgtaaatgatgcccatgccgcgcgctttaagtttgcgtaccacgcggaacaagtcatctacttctttctccgaaagcgacgaagttggctcgtcaagcacgatgaccttggagttcagggatagcgccttcgctatctcaatcatttgctgttgacccatgcttagcgagttgacaagcgtgttcgggttgatgtcaagaccgaccatttccagatactggcgtgactgttcggccatctcgcgctgtgagaccaaaccagccccgttcttgagctcacggccgatgaacacgttctccgccacggtcaggaatggctctagtgccaattcctgatggacgaaggccacgcccttagcctgcgcgtcgagtacgccactcagctgtacatcctcaccatcgatgcgaatgctaccgctgtcaggcttgaaaatgccgccaagcacgttcatcaacgtggactttccggcgccgttctcacccagcaggcctagtacctcacccgaatgcagagtgagatgcacatccgtcagcgccttgacgccggggaaggttttaacgatgtccgtcatatcgatgaagaccttgcccattgcggtcggggcggatgtggcaccggcatcgggggcggtatcgacgcaaggggcgtctactaccatctgatctaccattgcgtaatcctttgcgaaagaaaaaaatgaaaaacgggacggaagtgatgaagctgctccaaggaagaggaaagtggacgtgtttctgtagcttccgtcccgtgtgatggctaaccgcgaccggagaagacatcgcgatcagccgctgacgatgacactatttacgcgtcactgccagccgtctgtgccgtactcgtccacgttatccttggtaatcaagaacgtgtcgaccacgatgttcttttcgatctccttgccatcaatcacgtcaagcgcggctttcgcagccttgtgcccgatttcgtccggagactgtgcgccggtgcccgtcatggtaccgtccttgatggcttgcttaccatcaggagaaccgtcgacaccatagacgagtacatcgctcatctcgggatgagcggctaaggcttgaactgcgcccaatgccatcggatcgttgatgcccagaatcgccttgacgttggggttggactggagaatatcctcagcgagagtcagcgaagtggcgagttcgcccttgccatccagctcttgcacgatgttaaagtagtcaccggccttttctttgaagccttcaaggcgctggatgcatgcctggccagcaggacaattgatgacggcgatttcagaacccttgtcaatctttttcatcatgtcttcagccaccagttcgccggctttggggttatcagaggccacaacggtcttgactaaatctagatcatcgacaggggtatcaatgttgatgaccgggatgttcgcatcggcagcggcctgcaatgcgggctgaacaccggtggtatcatacgggccaagaatgattgcatcgacaccggaggcaatgagatcacccaccatgtcgttcatcttggactggtcggcctgaggatcgacgctttgtacggacacgctcttgccctcaacctcggcgttcacgccatcaagaatggcttgccagaagggattgttcatcgtggaaggcacataaccaatcttgatcttcgcgttcgagtcgcctgaggtggcgacgccagatccatcagaagagtttccgcatccagccaagcccgctacggcgagggcggcaatggagaaaacagctgcggctttatggagaaccttcatcttcactcaccttttcaatttgtgtctcttatctattaccagacgaaatccgaaagtattgccatcttcagaggttcgccaagaacaccgaattaaccagagttacaggcttcctttacgctcatcactgagtggttggaggacatcaccgttgattgatttgttgttcttgaatttagaatacatattcaagggattcttggcaaaccagcgacacgccgaccaaaaccatgaaattgcaacgtcttaacaaaaattcgatgaatttattatcgtaaatttatatcagaaaatcatatccatgaattcagatacgaaaacaatacaaaaccagccagcggtatgaaaccgcaacaagaagccagaacgagtggattcacagtctgaatccaacgacaatgacctcgacctatatcaggctcgctgcggaacccctgccatatacccgaccaccgcttcataggtggtctctcgcgtattcagcgtagctacaacctttccatgcctcatcacacagatgcgatcggaaatcgcaaacacatcagtcaggttatggcacaccgtaatcaacgatttacctgcctcacgcatgctgagcatctggctgagcacctcgccggtttgaatcaccgacaaagagctcgtcggttcgtccaagatcagcacatctgggtcttctaatagtgcttgggcgaatgtcaacgttttgcgttcgccctctgatagaccgcgaaccattcttgtgggagacagtggggagcccagttgtttgagtactccacgagtgtcttccaccatgcgctttttgtctataaacaggcctcgcatacgttcacggcccataaacacattgtcagccacatccatcgccggcgccatagcaggattctgaaagatggtacatacgccagcggcgttggcatccttgacaccagaaaacgaaatttcctcaccgttgcacaatacacaaccatcatcgggatactccaagccgctcagcacacggaccagcgtagatttaccggcaccgttgtctcctacgaccgcaacaatctcccgctcgtagacgtcaatatccacgtcatcaagcgcggtaacagatccgtaggttttgcaaaggcctctgcccccgaacacaaccttgcgcataccacggtaggaatcgatcattgcgatacctgctgcttgtaccaccatcagtttccctcactgttcatctcgtcttctacgactcatcacaatgcatatacggaaagaatcaatcactacccataataatccgattggcggcggaatacatagcccccaatgagaccgcatcgtcgccacactgaccaagaatgatgcgacgatccgaaagcaccgggaacatcaccttgttcaatgcttgactgagcgccaccagaaaaccgtcgcccgcttgtgtcaactcgccacccacaatgaccacgccgggatcgaaagcagtgataaccggctcaatagccagagcaatctgtgtcgccacatcctcaatcagccgcatacacaccaaatcgccgcgcttagcatcagagaccacgtcacgaaggctcatttcaccgcgcgaaggacgcagcagagagataatatgcgcagcagaagccactgtgttcagacagccgcgacgcccacaggtacatacggcaccattaggatcgacctgaatatggccaaattcgccagccaacccatcatggccacggtaaagcctgccattgatgtacagagcaccccccacttcatatccagcgttgacgtaaactacatcctgtctgcgcagccctggatcgtgcacctgagctaggcatgccatcttagcgtcattctcgatgaccgggtgtacccctgtcccacgctcgaagcgatcagcaatctccttgccactccatccgtgcattatttccggtacgcgcacctcactgttcagatcaatgggtgccggcaatgcaatggtaacctgcttgagatccgtgatttcagagcccaccagttcaaccatctctcgcagtagttccagagcgcaaatcaccgtactgtctggctgatgtcggacgggtaacggcatcatcttttcgcacaatacctcaccggagctatcaccaagcacaatgcgcaagtccaaggtgccgatggatacacctgccgcaataccaccctcctgagcaagcgtcacatacagcgcgtgtcgattattacgactaacggatttagtaacgaccttatttttttcggtcagctcgcgcacaatgctggatatggtggcggcggaaaggttcgtagcgtcggcaagttcaatctgggtcataccaccgaaacgctgcaacaccttcaatacttggttgacattggcttgacgcaacgatgataaagaccccgatcgggccgaaccactcatgtcctccacctttcacacccggattaaccccatgaatacgtacgcattagaacaatccggcatcggccccacttcggaacgatacccactgattgtatcccatcattccacacggacccccttgcctcatcatgatagtcgcattacggttacagaaaagaccaggccacatgggaaaagtggcctggccaaacagagataaaccgatcagaggttggtgcgatcggtgaagatgatcgggccgttctcggtgatggcgatggtgtgctcggagtgggcaccgcgcgagccgtcggaggcacgcagggtccagccgtccttcggatcctggaagatctcgtcggtggtcttgaggaaccatggttcgatggcgatgaccaggccttcgcgcagcttgtagccgtggtgggcgcggccgtcgttcggtacgtgcgggtcgccgtgcatgatgtggcccacgccgtgaccgccgaactcgaggttgatcgggtagccgtattcgcgcgcgatgtcgccaatggtgttggagatgtcgccgagacggttgccgggcttggccacgtcgatggcggcggcgagcgcttcctcagtgcacttgatgatgcgcaggtcttcggggtccgggtctttgccgaccacgaagctgacggcggaatcggccacccagccatccacggagatggcgagatcgagggagacgaggtcgccgtccttcaggctgtaatcgtacggcacaccgtgcagcacggcgtcgttgacggaggtgcagatgtagtgggcgaacgggccggtgccgaagtcaggagcgtagtcaacatagcaggattcggcgcccttgcggtccacgatcttcttgtggacgaactcgtcgatttcgagcagattggtgcccaccttggtggtctcctgcagttccttcagaatgccgccgacgaaacggccggccggcttcatttcctcgatttcacgaggggtcttcaattcgatcatgaggttctttctaccttgttgagacttgttctcaactctagcccagcccggggtcaaccgccagcgatccccaacggcggcggccataagaaagcgcccggcaggttcacaacctgcacgggcgctttggattgattgtccggagattgattgtctggagcgcgagattacttgcgacgcttgccaaaagtgaacgcgcgaatcactgaagtaatccccatcaccaccatggcacatccgccgaagataatcatgaatacggcggagctcagcgggctcatcagcaccacgaagccggcgataatcgagatgatggcataggcgatggcccagccggagcgcgggatgcgccatgattcgactagagccatcacgccttccataatccaaccgaaaccgaccatcagggtgatgagtaatgccaaggtctgaccggtcataccgtagtttcgtacgactacgacgcctccgaaggtcagcagaatgccgacgaacacgtccagcacacgccagccgcccggcagacccggctccacgagagcgctgacgatgcgcaccacgccggaaatcacgaaatacacgccgagcaacaatgcggccaaagccagcgtcttgttcggcaccaacaacagcgcagcgcccaaggcgatggcagccacgcccaccacgccgtaaatgatgcgaatcttggtcttggccttttccggcagccattcctcgatcaggtggaatggactgaaattgccgacataccagttggtctgctgccagccgggttgactttgatcgccccatgaaccattcggctgcccgtccgcttggctattcgattggccgtccgcctgataccgccgaccgtccggaccccatgctggctggccgttcgggccatagttcggattgtaggcgtacgggccgtagtacgggttctggttcggtccgccttgtggctggccgttctgcgcctgctgattctgagtgtcttgcgctcccggcgcaccttgcggaggatattggccgccatgattgctgtcatacgcgccatactgcggttggccaggtcggcccgccggattcggctggctcggctggctctggttgggctggcccgtctggccattccactgaccctcgtttggattgctcatcgtaactccttaactcaaggtccatattcaggttccacataccatgttaggcaagttacctaatttgaaccatcactacagttaggcaatccgtctagttcactgacagcgcaatacccataacgcaatatctgcatcaccaacgcttctcccccgccgcgattaggcttagggccatgaccaacgaaaccgaaacgctgacgtcgggcatcgacccggcatcgttctcctccgtcatcaagccgaccaatgacctgttccgctacgtgaatggtccatggatcgacacctaccgcctacccgacgatcgttcgcgctacggctccttcgacaagctcgccgaagacgccgaaaaccaagtgcgcgacatcctcgacgccgacgactgcccggccaccaaatcgcaggctctgtatcattcgttcctgaacaccgacgccatcgaggccgccggccttgacccgatccgcgatgagcttgacctcatcgattccgccatcgacaaggccgctctcacgcgcgtgctcggcaccatcaacccagccggcggccccgacctgttcggcttggccgtttacggcgaccccggcgacccggaccgcaatatcgcccaccttgagcaggccggcctttgtctgccggatgaagcctactatcgcgaggatcactacgctcccgtgcgcgaagcgtacgtggcgatggtcgccacccagctggtgaacgccgggtacgcgcccgccgccgagtccaacggtggcgatgaactgccggccaacaccggcgatgacgagagcaacgctcccgccacggttcccagcgaagccgcgcttgatatggcccgccacttccttggcgtggaaacgaaaatcgccgccaaccattgggacaatgtagccacgcgcgattcggtgaagacctacaaccccaccgattacgccgatttggccgccacgctgaagaacttcgatctcggttcctggatcgacgcctggcagaccgcctatgacgccaccgaggccgccaaggctcagtcgatcgatttcaagtctgtgttcgcgcgcatcattgtgcacgagccgagcttcctcactggtcttgatgcgttctgggccgaggccgatctggccgaccttaagctgtgggcccgtgttcacatgattctgggcttcgcctcctccctgtctcgcgacttcgacaccacc

SEQ ID NO: 1976 - DNA, 37441 bp, Unknown
  R17_18m  MAG No. k141_20939
ggccgtcatcgtccgcccctggcagcaacagaacaacgaccgcgaccggacgtcctcgatgagcagcaggtcgtagaagaccatgctcgcctccggtgtggccgcgacgggatcgtgcctggtcggcacgccgcacgattcgcggccgaaatcgtatcccagatacccgatcgcgcctcccgtgaggggcagacgcggatcgcgcgcgccatcgcagggtccaagccgcttcttcacgacatcgaggaaatcaccctccacggcaacgccgtcgacgaggcatccgccccgcccatgttcgatcacaagataggggaagagtcccaggatcgagtagcgcccctgcgcccccggcatcgaggagtccaggaacgcgaagcgttcctcgccgcgcacgcactccacgatgtcggcaagcggtcggaacgtcctgagcttgaacacctgcgcgctcaccggaactccttcgtctgcgcccgggcccgcgtccgcgccaccatgcgggcgtaggtgtcgttcacgtcgcgcgacacgctccccggttcgaattccacgccgccgataccggccacgggcatggcacccatcagggagttggtgaggaacacctcgtcggcccgaagcagctcgtcgggcatgatcgggcgttcgacggcccccgtgaacccgatcacggcatggcgcatgaccccgggcagcagaccgcaggagacgggaggcgtcacgacgtctcccctgatgacggcgaagatattggagacggccccttcggcgacctcgccccgcgtattgaggaacaacggctcgtcgacggcgcggtcacgggcgcgacgcttctccatgatgttttcggcatacgccagcgtcttcatgcgcgcgaggggggaggattcgttcctgcgcacatcggcgaagtcgcagcggaagacgcgcttcgcccccggcgcggcatacgggttgcgtctcaacgagacgacgcggttgcgctcggtgaccgtgagcttgagggccgaatcgtccgatgcgccgagtccggcgcatgcgcggagaaccatcgtctccagatcggcgcgacgcgcctcgatgccgaggtatcgcaacgtctcacccaaacgcgtcagatggtcgtccaacaacaagggcgcgccgccggataccgcgatggtctcgaaggcccccatgccgaagaagaatccgtcatccgcatccacacgcgcccgggcaccggggccgatcacgcactcacccatcgatcagcgccccctttcccgtctcgcactgccatcaatcaggctatcattgacttcctcccctcggctgaagccgggggattcctgtcgcgtatgagacacgttcctcactcattggaggggtcttcccgtacgcgtggcaggggttggcgtttcaacggaaccttcccgtgaaacacgggtttcacgggaagcgtgtccctccacgccctcggcatcgtccatgccggttgtgtgtatcgcgcggccgaggatgttcttggccgcgttgatgtccgcattgtccttgttgccgcagttgacgcagtggaagaccgcttggctctcgcggttctcctttgcgacatggccgcaacggttgcaggtctgggacgtgtacgccgggttgaccagtatgagccgggttccggcgagacgggtcttgtattcgagtttgttctggatgtccgtccaacggttgccgaggatgctgcggttcaatcccgctttggacgccgaaccgttgcgcaggtagcgtcccctatggttggggtcctgtttcggtttcggcttgcgggtcatctgccgggtgttcaacgcttccaaggcaatgaggtcgtagtcttcgaccagtcgggtcgtgatcttcgcgacccaatcgtccttgcggttgttgacgcgacggcgtatcgaactcatgcgcttcaatgtgagtttgcgtcgtttcgactggaatttcgcggttttcccaccacgttggccgttggtcatgtcttgtcgggcgagcttgcgttgcaggcgcagatactcgcgcttctcccgttcggacggttgcggcatgtccagcatggttccattcgacaaggccaatgtgtggacgcagccacggtcgatgccggtctgcttgccagtggcattccgtcggatgggcgacggttcgttggtgaacgccagagtgcgttccgtccaattcaccgccacgctcgtgtaatccctgacgggttggctgacgcgcacgtggatggagagcatccaacggcatcccgtttcgcccggcttgcggaattcctttttcacgcttccggtgattacgaccacgccacgcttgcgtgacacctgatggtagacggcgttgccggtcttgttctggttgcgccagcatacgaaatactggggggtgcgtttgcgggatttgaaccccggaacacgaccgccattaatcttcttgcgcttcaacgcggcataccattccgaattctccacgcgcatggggctggcgaggacggcggaggggatgcatgcgagccaagaacaccggattcgagcctcgctgtccttgaacggctccccgacggtcgctccacccaagggaacgtccacccacatgcgctcacgggattccacgtcctccatgtagcggcggattgtccgatgctcccgatgctggttgaaacgggtgcgccaaccatcgcacagccagtccatgatacgttcgggattgcgcgtccaacgatggttgcggcatgaatcgtcgccaaggtacacggacgcgcccgcatgcttgactttgatgattcgtaccttctggctcatgctataaaccttgccacggaaacagtgattaatcaaagaagtggcggctcaccccagtcttaaaagacggggcttgcgccgccaaaccggtcatgaagacggcaggcgcgccgccgacacgccgtccgtccggcgattccgtgcgtcacgaccggaccgatgcgcaatatccggcttccgcgttacactagtacggttattcgcgcgcgcgtggcgccctctacaccccgagccgcgaggacacgtggattccggccggtcatgccccacatggcaaaccgagaacccgcacacctagcattacaaggagagccattttggcaaccaagattcgtctgaagcgacagggcaagaagttctacgccttctaccgtgtggtggtcgtcgattcccgcaagaagcgtgacggcaaggtcatcgaggagatcggtacctacaaccccaacacccagccctcgaccatccagatcaagtctgaccgcgctcagtactggctcggcgtcggcgctcagccgtccgagcccgtcttcaagctgctgaacatcaccggcgactggcagaagtacaagggccttgaaggtgccgaaggcaccctgaagaccgttgaggctggcccggacgccgaggcccgcatcgcggccgttgagaaccaggctcagaagctgaaggccgccaaggccgaagctgccgccaaggccaaggctgaagccgaagccgctgccgccgctgaggaagccccggctgaagaggccgccgaagaagctccggccgaggcctgagcggaaacgaaaggctagctatgcttgcacaggctgtggaacacctcatcaagaacatcgttgattttcccgacgatgtttccgtcaagtcccatgagaacgcgcgcggcgaactgcttcgtgtacgcgtgaacccggaagacatcggccgtgtgatcggccgtggcggccgcaccgccaacgcgattcgcaccgtgatccaggcactgtctgatcacaaggtccgcgttgacatcatggacgtccgtcgataaccgataaggaacgattcacagcatggcacagcaagacatgcacgacgaccctcagcagctcgagttgctgagggtcgctcgtattggccgcgcacagggcctgaagggcgaagtcaccgtgcgcctgtacaccgatgatcccgagtggcgcttcgagccggactccgtgctctacagccaggatggcgagaccgagtacatcgtcgagggctcgcgcacgttcaaggatcgttggattctcaagcttgagggcgtcgacgaccgcaatgccgccgaggccctaaacggtgtcgaactctacggcgaggccgacgacgcagaagatatgctcgaagccgacgaatggtatcccaaggatcttattggccttgaggcccgtctagtcgagggcaacggtctgggactgcccgccggccaagtggtcggcaaagtggtggatgtggtcgactcccccgctcagtccctgctcaagattcgtttgaccgagccggtggtaaccggccagaattccaagggcgaggatgtggtcgaaaagaccgcattggtcccgttcgtggaggccttggtccccgacatcgatctggaggagcaatacctcacgctcgatccgcccggcggtctgattcccgggctgtaaacagtctttcaaaccaataccgagttccacactcaatttattccatcgcaaagggcggtctttctgagattagtctcagaaagaccgccctttgattgctccttaacgtttataccgcgtaagatggctgagcctcacagataaccaaataggatgccgaagcgatcaagacccgtaccgatcggctggtatccgttgcgctagaactactgcgactgcaataaactataaaaaatgtgtgatgcttacacatttatgatatgataaatgtgtaagcatcgcacatttatcataggatattcgtcatgaggctccagcgaaaagcactgaaaacgctcaagcagtggaagaccacacctgaccataagcctctcctgatccgtggcgcacggcagacaggcaagacatggcttgtcaacgagttcgcgaatggacaatacgacaacatcgtctcggttgatttcatgcagcggccatccctatccgggatattcgagcaggatcttgacccgcaacgaataatccgtcagctcgaactcgccgccaatcaacggatactccccggcagaacactgctcttctttgacgagatacaggaaagtccgctcgcgttgacctctctcaaatacttcaccgagcaggcacctgactatgacatcatcgccaccggctcctacatgggaatatccaagcacggcaaaacctcttttcctgtaggaaaagtcaccatgatgaacctacatccgctctccttcgccgagtatctggacagcatcggacaagacatgatcgccgacaccatacgtgaaggccggttcgaggacattccacaagctctcgaacctcagatgaatgacctactcaaaacatatatgtgggtcggcggcatgccagcagcattaagcgctcacctggataacgggattccgcaggatgtgcgaactgtccaacaagatattctcaacgcctacgatcttgatttttccaagcatgccgcatatacgctgggcgagcgtatccggcttgtatggaacacactgccatcacaactcgccaaggagaaccgcaaattcgtttacggtgttgtcaggcaaggagcccgcgcccgcgaatatgaggaagcgctcacttggctgacggactacgggatcattaccaaagtcccccgcctcgatgctctgcatattcctctgcccggatatgagagtcttaacacgttcaagatctatctggaagacacgggcatactgggcgcactgtccggtctcgacgtgaatactctggtgaacaagtcgaagctcttttccgaattcaagggcgcgttcgtagaacaatacgtatgtcagcagctggtagctcaaggaatcagaccccgctattgggctaacccaaatcctcaaggaaatgcggaaatagatttcgtaatggaacagggagacgaggtttttcccatcgaagtgaagtcctcttccaatattcgtgcgagaagtctctcgtatgtctgcaacagatacgggctccacggtatccgtataggagaaataggctataggaagcaatcttggctgacgaacatcccactttggtgcgtggatgggctgggcgaatatctcaaacgtcagatcgaaaagagcagggaaaatccagcgaccatctgattctttttctgttttttcgggtatgtgaaataggtggttgagttttggtgattctcatacatcaattcggacgaggatgccatcgcatatctcaatggcgcactcgaagaggatgatcccgcatttgtgcaagatgcgttcggtgtggtcgcacgcgcacgaggcatgaccaatgtggcccgaaaatccggcctcggccgcgaatccttatataaggcgcttcgcccgaattcgcagccctcgttcaacaccatcatgcgagtcgcagacgcacttgacgcagaaccctattccctgccgaagcgtaatcgttcacccgcgcgcggcggcggtgacgcgggtcatgaaacggtcgaggaattccggcacgttgacgcccaatgcgacttgggtgtgtttgtcggggtcctggagccgtgaacgatcgccgatggtacggcctcggaacgggccctcgagatcgacctgtaagttgaacccgaaggtcgtgaccagcgatgggtcgagcgcggcggccacggccagcgggtcgtgcagtccacatccgcgaatctccggctggttcttcaggtagaagtcgatgtagtagtcggtcatggtgacgaggaagtcgccggccggtgtccccagagacgcccattcatgggctttctcacgggtgagcgcggtctggtgggtcacgtcgaggccgatcatggtggtgcgtgcgccacacttgaacagatagtctgctgactctgggtcttgggagatgttcgcttcggcggccgggcttacattgccgggcagcgtcaacgcaccgcccatcaacgtcacgttcacgccggaatccttcaggtccggagcgttgcggaatacggtggccatggtggtcatcgcgcccgtaggtacgatggtcaggtccgggccgtattcgcgcgcggcggcgatgatgaaatcgaccgccgagcctggtgcttccggagcgcgcggggagtcggggatgattgcgccgccgatgccgttgggatggtggaccgccaccgagccgggagttggtgcccacgaagcgtccgtttgccagccgtccgcgccgccgttctgccagcgcgcgtaggcctgggtccgctcgtctggtgtggtgccacgcattttcggcaatgttgccggggcgatgggatggtcgactccgggatagaccggaacgtcgtcacggccgaacaagtgcaccaccgccagcgcgttgcgcgcggccagcggcaccgcgacattgccgtaggtggccgtgataccgatcagatcgatctcgtcggcactgcctagggcatatgcgatggcgagcgcgtcatcgatgccggtatcgaggtcgaggatgagttttttgcgcatggcggttccttcaagacgaatcaatcctcccgaatttgtgacgttaagccaacgtcagcggcacaaattcgggaggatggggaatgggcaatcagccgagcttggcgagttcttccggggtgagttcgagctggtcggccttgagggagtcaaggatggtctcggggtggtgggcgccgggaatcacgaacatgtggtcgcccttggcgagctcccatgccagcacgacctgctggtagctcacgccgtgggccgccgcgacctcgcggaacgggtcgaacttggtctcatcataggggtgacggtagccgccgagcgggctccagcacacgaaggccagaccgaccttggcgcagtagtcgagcgtgtcctgggtctccaggtgaatcggcgagtactggttctgcacggccacgagcttgtcgcccagaatgccgcgcgcaatgtcgatttgctcgatggaggcgttggagataccggcctcctgcgccacgccctcgtccaccagctgcttgatggcttcgacggactcgttgtacggcaccttcgggtccgggcggtggaagtacagcaggtcgatggtgtccacgccgagcgccagtgcgctctccttgccgcgccgaatcaggttctccgggcgaccgtccacatcccacgtggggcggccgtcggtgaagttgcggaagtggcccaccttggtggccaccagcacctcgtccttcggccccttccaggtctcaagggcctcgcgcaccagcttttcaccggtctgctcctcgccgccggagcagtagtaggcccaagcggtgtcgatgtggcggcagccggcgtccagcgaggcatgcagggtttcgatgccgacctcatggccgcggttgttttcgatggtcagcggcatttcgccgtggccgatggcggtggtggagaacggtccgaggttacggaacaatgccatggtgattcccttcgtgaaacttatggaaactcgatatccacgatcaagcctaagcatcccgttggatttcacactctcggcctgcccgcacaatcaatctatgaaatttccgcaacttcacggaatagaaaacgcaacttactcatacccagttcagcgaaaacgaggagccggaaccccatggattccggctgttccgctgataaatcagtggcctcgtctgagactcattcccagcaataccagtgcggcaatgatgatggccgtcgaccaccactgtccaacttgattggccagggcgatcaacaggccggtcatcagaccttcccggtattgccggtcttgtctcggacggttgtcatggtcgttgcctaccatgagaacctcctcttgaattttgagacgtcattatgccggttgacacaacgacaccgcgccaaagtggcacgctagtagaccttggtttggtcagtccagtgtactggtgagcttcggtggaggctggtatgctgtgttgtagcagaaaggtcacgctagcttcgaggcaatcttctcggcggcgccacagactttcgccccgttggacctgactgttgaggtctcctcacctcgattttgagagaaaggcccgatgtcttatgacaccgggccttttactttcaaagctatagggactttcagaagcacatcgcttaccgcccaccgaacgaaccgccgccggaaccgccgctgctaccgccaaagccgcctgagccaccggatggcgaggccgcattgattgtcgcggtgatatccgcaaatccgtacgacaattgcgtgccgaggtcagagaacccagccgcgaacgacgtgcccccgaacgctggcaccgctccggccaatccgctgtcagccacggaatccgcgaacgccgagccattgtagaaacgcaacccataccagtcgtacggacgataattccaatagaacaccgtgtcggaggcattggcatcaagccattccggatcggatacttgcggataggccatggccagctcccgcatcacccggtcggatatgccaaatgcggcagcgtagaccatataccaatcccacagcgtcgaatccgcgactccacggtacttgaagttcgagaagccttgcatatatcgtttgagacccaagcattgcccggccatctgctgaccatgatcggtcagcacgtaggaattccccatcaggaagcagaatatgccgaccgtcatcaggggaatgccgatgagggccccggccaccagatatccggccaaaccgttgatgaatatgctggcgccaccgatcagcacggtgattgccccgggaatgagccatccgttctcggttttcggcgcgatatccgccgccgcgaattcggtcttgcacgcattggtgaacttttcgagttccttgtagccgtctttccaatccttgcaggcgtctttgatgtcatccatgtcaaatgccgtacgacctacgcgctcggaaatcacggtgagcagatagagcaatgcccgctcagaagcactgagatcgggctggtgtgcatcggacacgctagatgcggcagatccagatccgccagatccagatccatcaaatacggattcgacgaatactgattcatcaaatccctcagatacgccgtaatcggactgccacagcatcacaatcgtgctattggtacgcgcattattgcgcttgtatggatcggacccgattcgctgactgagctccaccggagaaacttgtttcagatccacgccgatatacaggtccgccgaaccggggaacacagcaatgactttcttcacggccagagaaagcaaggtcgcgacgagttggcgctcgggaatgtcgggtttgtcgccggaagtcacgatatcgatgagtttggccgccgatgcggggctcagctcggggcgatcgcgccaatattcgatggagccacggtaacgtgaacgtccggaggagcgtaaggctgcaacaacaccaataatcccgaatatcaggccggccgatatggtggtcatccagttgttcaggcgccttgtggcgcgttggcgttccagattgcgccagaaccgttcgtcgtcggcttcgtcttccttcaactcctgcagatgatcgtcggtctcgacacgagccatatctcccgccttggccgcgtcgaaagcggccaccacgtctaggtactcgccgcttttcacatcatttacggtgaaggtgaagctgccatccttggttcggccggtttccgaggtttgttcagtgtgcagccaagtccacgagttgctcgcggtcacacctttggggaaatgcaccgtgccggtgaccgtaccaatcggcacctgattgttctcaccgaatggctcccattggaaggtcgccacgtccttccacttggtggccacgtcatgcatggtgaagctcaccgtgaacttgatgctgttggtttttacggtggtgggaatattccagccgatctccacggtttggtcttgccatcgtcatccttgcgtttgcgcaacttgatatcgatatgctccgtgctttaagatcgccgtcggcggtggcggtcacatcgtaatcaagcgtgcggtagctcaggtcggcaccatctgtgccgagaatcaaggcaccggcacagagtgcggcaagaatcagcgcaccgacaaggcttaagcccagggcacgaacaatgcgtttcgacataggcatgcgctaccgcccgccgaacgagccgccacctgagccaccgaacgagccgccgaaaccggagccgccgcccgaaccgaagctggagaaatcgccaccggaatcggcggatggtgctgccgcgctgatggtcgagctgatgtccgccagaccggagttcagctgcgagccgaggtcggagaatccgccggcaaacgacgtgcctccgtaagccggagctgggccgccaacgcctaggtccatctgcccggcagcatcgtggtcgaatggaccattatgacggtggctgtaccagccatacgggcggtagttccagtagaacaacgagttggaggcgttggcatccagccaagccgggtcgttgacctgaggatatgctttggccagttcacgcatcacgcgatcggaaatgccaaacgcggcggcgtagaccatataccaatcccacaaggccaaatcggcggtaccccggtcggtgaagttggagaagtcttccatataacgcttaaggcccagagtccggccggcgatatcctgcccttgatcagtgagcacggtcatcgcgccggccatcgagcagaacagtccgaccaggaatatcggcagcccgataagaccagccaccgggtatccgataaagctgttggccagcagcgaaccaaatcccagcacggcggccaatacgccgggtaggatccattgccagcccacagagcgcgtggcacccagccgctggtattccatgctgcatgcaccggtgaatttgccgagctcaatatagccgtcttgccagttctggcaggtcgccttcatctggttcaggtcgaataccgggctgcccacgcgctgagaaatgacgatgagcaggttcagcagcgcatcttccgattcgctcaatcccaactgttgcgcgttgggtgcctcatcaatggcgagcggcagaatcacgatggtgctggtgatgcctgccgcatactgcttgccttggtcggcggcaatcatttggctcaagcccaccggcgtggcctggctcatgtcgatgccgcgatacatgtccgacggccccggataaatggcgatggccttcttgacggcgagcgacagcatggtggcggtcagctggcggtcttcatcggattggcgcgtcgacggatcgaccacgcgaatcagacgggctgcggaagccggactgatgccgggctggtcgcgccagtattcgacgctgccactgtattgcgcacgccggttgctggagatcacagcccagataccccacgcgcacaacgcgatgccgagcacgatgctgacaatccagaacacgagacgagctctggcagcgaatcgttgcttgtcgagccagcgctgctgttgcttatattcgtcctgtttcaggtccttgagatgattgccggttcccttgcgggcgatgcccttggctttggcggcatcgaacgccgcgaccacatcgaggtagtcgccattgtggatgttgtaggccgtgaacgtgtagctgccgtcgctgttgcgcttggtttccgaggtgcgctcggtgtgcagccatgtccatgaggttttgccggtgatgccgttggggaaatggacggtgccggtgaccgtgccgataggcacttggttcttcttgccgaacggctcccattggaaggaggccacgtctttccatttggtggccacatcgtgcatggtgaagcttacatcgaacttcatgctgtcggcctcggtggtgaccggaatattccagccgatctccacggttgtgtcatcttcggtggcggaggcgctgggcttgaggccatcggtaccgggcgtgtatgcctttggatggtcgctgccatcgctcacatcggcgacataccaatggttggcgtagtcgctgttccattccttgtcggaagagacgtcactgggcagcttgggctcgctctgttgtgcgtagtcgatgccgtcggtgacgttgcgcacgctgatatcgctgatatcagtcaaggtgccggagttcagcgtgtattgctggaacagctgcttccacggcttggtgttgtcgtcactgtcggtacgctcacgcatcttgacgtcgatatgctgcgtgaccttcaaatcaccgttcgcggtggcggtcacgtcatagtccagcgtgcggtagctgaggtcggccgaatcgccgaacgcggaagtcccgattatcgccaaggtgataactgccaacaccaccgtggcaacaatgctgatgattccggcgcgaatgaatcgtatccgcatatcttccctctcttaagacaatacgggcccggccggcggcttaccggacgggcctgaagcgggtcagaactggacctgtggcacctgacgggaagcgtcatcggcctcgaagtattgcgcctgctcaaagtggaacagaccggcgatgatgttcgtcggcacggtttcgatggcggtgttgagcttcaggaccacgtcgttgtagaactgacgggcgtaggcgatcttgttctccagttccttgagctggttctgcagatccatgaagttctggttggcttgcagctgcggatatgcctcagccgtggcttgcaggttgaacagggcgcgggacagctggttttcggcggcggcgcgctgagcagtggtcgtgctcgggttgctggccacagccactacgccggcgcgggcggcggtcacctgagtgaagacttcagactcgtgggatgcgtaccccttgacggtattcaccaggttcgggatgaggtcggcgcgctgcttcaactgcacgtcgatttgcgcccaaccgttcttcacacggttcttcagcgtcaccaggttgttataggcgctgacgccccaaccaatcaagacaacgataataacgacaacgacaatgccgacgatcagaccagtactcacctatgctcctttgctggaccttgctgtgaccattcttccacactcgcaccgtaaacagaagattcatcacagagtattcatcgtgcggacttgtcttgtaccgctttacccgccgttctcccgtcgatcgaccgaagcgggaagtcgccgcccagtccgacaaagtattccagctcgctccgttgcgagaacggtaatactcggcaatactcgccctcaatatgcgaaagcccgccttgcggcgggctttgccgtttctcctacgcacaaatcattacgctgcgcgcaggaaacgatcagccgaagcgaccggagatgtagcgctcggcttcttcgttttgcgggttgttgaacatcgtgatggtgtccgcgaagtactcgaggtgaccgggctggcccactgccttcaggttgaagaaggcggtgtagtcggcgatacgggcggcctgctgcatgttgtgggtcacgatcacgatggtgtagtcgctcttgagctcgttgatcagatcctcgacagccaaggtcgaaatcgggtccaaggcggagcagggctcatccatgagcagcacctgcgggtggacggccacggcgcgggcgatgcacagacgctgctgctgaccaccggacaagccgatgccggggttgtcgagacggtccttgacctcttcccagaggttggcaccgcgcagagcccactcgaccagatcgtcggcgtcggacttggccaggtggtggttgttcaggcgcacaccggccagcacgttctcacggatggacatggtcgggaacgggttcgggcgctggaagaccatgccgacgtcgcggcgcacggccaccggatccacgtccttgtcgtacaggttcttgccttcgagcagcacctcgccctcgacgtgagcgccggggatgatctcgtgcatacggtccaaggtgcgcagcacggtggacttgccgcagccggacgggccgatgaaggcggtgaccttgttcggctcgatgttgatgttcacatcttccacggccagaaagtcgccgtaatagatgttctcgtggttgacgtcaatacgttgtcccatgatgtttccttatatttccttgtgttcttaaggcttaggcttagcgactggcttagcgctcggtcttgacggcgaagaccttcgccacgattcggccaatgaggttcagcagcagcacgatgacgatcagcacgagagccgcagcccacgcacgttccatcggaatcgtggtcacgcaggtggcgtcggcgttgggcgggcagttcgcgctgagcttcgagtactcctggtagacgaacaccggcagggtggtcatctggccggagaacaggttcacgttggtgctggagatgtagccggcggtcatcagcaacggtgcggtctcaccaatcacgcgggcgatggccagaatggcaccggagacgatgcccggcagagcggtgcgcagcacgatcttggtaatcgtgcgctgcttggtaacgcccagagccaaggaagcctcacgcaaatcgttcggcacgatcttcagcatttcctcgctggacttgaccacggtgggcagcatcagcagggagagagccacggagccttcgaaaccgttgatggtaccggggcccagcagaatcgtgaacatcgagaaggcgaacaggccggccacgatggacgggatgccgctcatcacgtcgacgagcagggagatcgtggtggcgagcttgccgcggttcgagtattcgaccaggtacacggcgcacatcaaaccgatcgggatggagataaccatagcgccagcggtgatttcgagagtaccgatgatggcgtgcagcacaccgccgtaaccaccggacggggtctggctaccaccgaccacaccggtcatgttgtagctcaggaagttcaggttcaggcgcttgatgccgttgacgatagtggtccacagcagggagatcagcgggatgcaggcgatcacaaacgccaccgcgatcagggcccacatgaagcggtccatgatattacggcgctggatggcggaacgggtcgggcggaaacgatcgaagtcgatttcgggcgtgccgtccatcggagtcttttcagtgttctcagcagcagtcatcacgcagtcgctttctcggtaagcttacgggcgatgaagttgaccacgaacgtgatcaggaacagaatcagaccggttccaatcagcgtggagacgcccagatcgttggcttcagggtactgtgcggcaatattcgcggcgatggtctggttctgcgaggcctgcagcagcttgatggagtagttgaggcccggggacaggatcatcaacacggccatcgtctcaccaagcgcgcggccgagagccagcatggaggcggacacaataccggacttgccgaaaggcagcacggccagacgaatcatctcccacttggtggcgccgagcgccagcgcggcctcttcgtgcaggcgcggggtctgcatgaagatatcgcgggacatggaggtgataatcggcaaaatcataacggcgagcaccacagccacggtggcgacggtgcgcgacgggttggcggccgggccctcgaacagtggaatgaagcccaggtggttggcaacccagttccagaacgggtagatggccggcaccagaatcaggccgccccacaaaccgtagataacggacgggatggcagccagcagatcgaccacatagctcagcgcggtggcgagcttcttaggtgcatagtgcgaaatgaacagcgcaatgccgatggacacgaagaaggcaatcagcagtgccagcaaagacacgagcacagtaccgaacaacagcgggagcacgtagccccagaagctgctggccttgccgccggtaaagctggacacggtgtcgctgttggcggcctgatcgccaccgatgagtggccaggcgcggaaaaacaggaacaggaacacagcggcaagtacaaccaggatcaggatgccgcaggcgtatgccacaccgcgaaacaccttgtcggcggtcttgcctccaactggctgcacagccgttttgtcttgcgaactcacggattctccttatatagggtggttatcaagtattcaagtggtgcggttttcgtctgtgactttgccaaaccgttcgggtcctgacccgctttaagccgcagccgtatggtttacgactgcggcttaaagttggcggcgactgctcttactactacagtctatcgttcagttgtcaggtccagtccacacgacccttgcgggccgacgtcatcacttggtcttgatggcctcgatggacttggtgatcttagacttcagggaggagggcagcggagcggtgccggcggcatcctgagcggccttctggccctcgtcggaggtcacgtaggtcagccaagccttggcgaactcagcctgcttggtgtccttgtaggccgggcagacgatgtcgtaggagaccaagacgatcgggtaggcaccctcggcctcggtggcgtggttgatcttgatgacgatgcggttgtcgcccttaacggtgtcgtcctgcttggagtcctcgatgaccttggagccggcctcggcggaaatctcgttgtacttgtcgccgaccttgacggccacggtgcccaggtcgccgacctgggagaagtcagcgtagccgatggtgccgtcggcctgcttgacggtggagatcacgccggaagtgcccttggcgccctggccaacctcgttcggccagttctcggagaggtcgtaggtccagttgtcaggggtgacgtccttgaagtaggagacgaagttctgggtggtgccggacttatcggagcggtgcacgacggtgatggcggtgtcgggcagcttcaggtccttgttctgatcggcgatggccggatcgttccacttggtgatcttgccgtcgaagatcttggcgatggtggcagcgtccatgttgatgtgcttgccggcatcggaaacgcccttgaggttgaagaccacggcgatcggggagatgtagaccgggacatcgaaggcggtgccttcagtgcacacggacttggactgctcaacttcgtcatcggcaagggccttatcggagccggcccaagcggtggcaccggtcaggaaggtctgcacgccagcgccggaaccggacgggttgtaggcgatcttggcttcagggttggtgccctggaagccggcgatccaggcttcaacggcggcctgctgagaggaggcgccggcgcccgagaagttgccggagaccggggtggacttggaagtggaatcggaggaggagctgttgtcggtcgtggtggcggtgttatcgccgcaggcggccacggaagcgagcatcacaatgccggacagagcggcaatggagcgaatgaggatgttcttctgcatgattattacttaatccctctatcaactattcgcgggcggctcagcgctgcccggtcaattcatgacaactacaagcgtattggtggtttcaagggcccaaaaccgaaatcagtaaacagaagatgaacacttggatgtttgtgggctacgttgaggctacgtagtttttggagtggactcgcctgcggcgagcccacaatccacaacaaaaaaggcggcccgaaggccgccttccatttactccgcgggagtatcgatcttgtatccgagaccgcgcacggtagtcagatacttggggtgcgccggatcttcctcgatcttggagcgcacgcgcttgacatgcacgtcgagcgtcttggtgtcgcccacataatccgaaccccagatgcggtcgatcagctggtgacgcgtcatcacacggcccttgttctgcatcaggtattcgagcagttcgaattccttgagcgggaagaacacggtttcgccgcgtacggtgacctgatgctggcctacctgcatggcgatatcgccgcacaccagcggaatatcgtcatccacagtgccggaagcctgggccgtggcctgattgcgacgcatcacggcacggatgcgggccagcagctcacggaaagagtacggcttggtcacataatcgtccgcaccaatctcaaggccaacgaccttatcgatttcggcgctcttggcggtgagcataataatcggcacacggctctgctcacgaatgcgacggcacagtgcagtgccgtcaatgcccggcagcatcaaatcaagcagcaccaaatcgatgccgcccttggtgaacagttccagaccttcctcgccagtggcggcggcggacacgtcatacccctcgcgtgtgagctggtataccagcggctcgcgataggattcctcgtcttcgacgataagaatgcgtgccatagtagcctttcttgggtatgttcccgtgcgcataggcgcaaagttttccgatactatcgtaaccatttgttctccgttagcctgctgtttcctgaaagtacgtaattgcgtaattgtgctacgcacggtgtgcgcacctcgcccactgtgtgattgtgcggcaatggaatggcaccatatcgggcaccaaccaaggccctacgcttgtgtcgactcgtccggccgggcctcgtcgtcatcctcatccggggcggccggcagctcgatggtgaacgtcgacccctcccccgtacgcgaccagaccgaaatccgaccgccgttctcctgcacgcagtgcttggtgatggccaagccgagtcccgaaccgccggtctcgcgcgaacgggccgggtcgacccggtagaaccgctcgaaaatgcggtccagtgatttggcggggatgccgatgccctgatcgaccacgcgaatggtgactttgccatcgcgctcccccacgccgaccgccacagtggtgtgttcgggcgagtaatggatggcgttctctacgaggttcttgacggcggtttgcatggcctctttgtcggccttgatcatcggaccgctcgtggccgggctgcctgattcttccaaggaaccttcgccatcggccagctcctcgaccttcgtgggcactgactgtccgttgacactcagtcgaatatccacatggcgggagtcggcttgggtctgattggcggcgatggcagcgcgtgccacatccagcgcggaaatgcgccgcgcatcaatcacactttgcgggctttgggctttctgcaagtcgataagatgatgtaccagttcggtcaggcgcgcggattccttggagatacggccggaaaaataccgtacggcgtccggatcatcggcggcgtcggtcacggtttcggccagtagcgagatggcaccggccggagtcttgagttcgtgcgaaacgttggtcacaaagtcacggcgaacggcctcgaaacggcgctgctcggacatgtcgttgatgaagatggcgtacaggtcatcgccgatatcgccaatgcgcacacgcaaatacagcatgttggacgggcgtgactggccggcctccagtcctcggccattagaggacggataggaattgcgattgaccggcagctgaacctcacgctcacgcacgccaccgtcggcggcggcctgagtgaggatgtcctcgacttcgcgcgagttgagtcggtcgccggagaccaggccgaatggcactgagccggggcttgaatattggaccaagccgttgcggtcggtaacaatcagggcttcgggcaggacttcaatcaggcgacgctcggtggggcgcacgggcgcatcatcaccgaatagagaacgcgtatcctcgtcgccggacaggtcctgttcggcggcgagccgacctgaaacgcggcctttgttgtaggcgatgacggcaacccacgccagtatcagcgcggcgagcaccacaatcacgacgatctgccagatatccatgatttccagagtaaaacgtgcaaggcgtagtgagatgcccaaactacgtaagttcgtctattgttcatttttggtgggacgacataacaaaatgctcccgctggcgggagctgtcgaacgcagtgagactgagggtggtcaaagaaccgaaatcccattggccaccctcagtccgctttcgtggacagctcccgccagcgggagcataatatggggagctctatttacagctcgtagtccttgtccttgctttccttaatcaggaacagagcgagcagagcgagggcggccatgatggccatgtaccagcccacaccggcaacgccgaacttggaggcgaccagggcctgggcgatggtcggagcgaatgcgccaccgaagatggcggcgaggttgtagctcaggccggcgccggagtaacgcacgtgcaccgggaacagctcaggcaggtaggcgccgcaggggccgaacaaaccacccatgatcatgaagccgacgcacaggaagatcatgatatgggcggcggagtgcacgagcagcatcggcacgaagaagctgaacaccaaggcggcggcggtcacggcaatcatgaccttcttgcggcccaccttgtcggcgtacacgcaggagaccacgatgaagatggcgaagaacaccacggagcacatctgcatgagcaggtactcgccctgctggaagcccaagcccttgacgccgtaggccagcgaccaagtgccgagtacgtagaacagggtataggtgatacccatggctacggtgccgagcacgacttccttccagtacggcagcaggtcgcgcagcgggtgcttggaggtgcgcttctcttcagtggccttctggaacactggggtctcagacatgcgggcacgcacgtacaggccaatgatcaccagcacggcggagcacaggaacgggatacgccagccgaaggcaatcatctgttccttgctcaggttggattcgagtagcaggttcaggccgtaagcgcagaagaagccaatcggggcgccaaggttcgggaaggaaccgtacagggcgcgcttgtcggccggagcgttttcagtggcgaccagcgcggcaccggaccattcgccggcgaggcccacgccctggcaggcacggcagatgcacagaatcacgacggaccatgcgccaatctgctcataaccgggcaggcagccgaccaggaaggtggcgatacccatggtcatcagggcgataaccagcgtcttcttacggccgagcttgtcaccgaagtggccgaacagcatggagccgaacggacgggcgaggaacgaaacggcgaaggtcacgaaggccatcagcgtggcgagggtctggttggacttggcgacgtccgtgaagaagatcatgccgaagtagctagcagcggcaatggaatagcagtagttatcgtagaattcgatggccgtaccgaccatggaagcggcgatgatctcaggaaccgaatccttcttcaccggtttggtcacagccgcggttgcgcttgcagtcattttttctctcctcatgctgcagataaaccccagtgcagcgtgcgcattgtgtattcaatgcttcgcgacggtgttgtcgtcgcttaacgaattgagcacagcgaccggcatgcgggagaagaactggtacggcttgtggccccagcgatgaaccccgcacatcgctgtgccgaacaccgagtatggctcaggttataagcaatagtttgaaaacgctcatattgtggtcatcatacccaaaacgtggatggtgagatgggccagcccgccgactacaggcgcttgacgatgtcgacagccagacgggcggcggtatcggcgtactcggagatgtcgaactccttgaatacctcgtaatcggtgtcggcgttgtcggaaagggcacgaatcaccagtgccggcacgtcattgcgggcggcgacctgtgccacggcggcgccttccatctccacggcgtcagccccggtgagtcggatgacctcctcgaccttttggggcgtgtccacgaagtagttgccagaggcgatgatgccggtgatgtgggtaatgcccgcattggcaagcgcctcgtcggcaacttccagcagacggtcatcagagtggaattcctccaccggagcgtccgcagtgccgggcttccactggcctacgagccgcatgtcagtgtcgaggtagcgcagggtgccgccgagcaccacgtcgttgatgtgcaggtgggtgttgaggttgccggcgatgccgctgaaaatcacggcgtccggggcgaactcgtcaatcagcagctgcgtggtggcggccgcattgaccagtcccatgccgcctaccgttgcggcaaccttgatgacgtcagaaccgaaggagtcgaccgtgccggacacgatgtcaaggctgcccttggcggtgtgcgtcacatgcgtgagcgatttggcgatcagtgccacttcttcatccaatgcgccaataatagctacagttttcatacccatacgtaagttcctttcacaacactttcggttccccttgtcaggggagctggccgccgaatggcgggctgaggggtagtcagacgtttcgtcacattgctccccccgagagagccgatgacgcaactcagtgccaacgccgcgtggccacggcttccgcaagctcgcgcagcaaggcctcggtttcttcccagctgatgcacttgtcggtaatcgacttgccatagaccagctgatcaagcggcgcggccttctgattgcccccttcaataaagctttccatcatgatgccggtaataccctgttcgccagctgcaattctgctggcaatattgcgcacgacttcggcctgacgatgctcgtccttgccggagttaccgtgcgagcaatcaacaatcagaccgtgcgaggctgcggattcggcgggcatttcggcgcgtacgtcttccatggctttggccacggactcggcatcgtagttcgggccgtgaatcgagccgcgcaacaccacatggcagtccgggttgccaagggtctcgactgcgcaggcacgccccagatggtcaatgccgaagaacgtgtgctgctgggcggcggcgaagcaaccgttgaccgccgccttcaccgagccgtcagtggcgttcttgaagccgaccggcatggaaagcccgctggccaattggcggtggatctggctttccgtgttgcgcgcaccaatggcgccccaactcaccgcgtccgagatgaactgcgggctggtgggctccagaaattccgtggcggccgccaatccttccttcagcacaccaagcaaggttttgcgagcaagcaacaggcctttgcgaatattgtggctgccatcaatatccgggtcgttgatcaggcccttccagccgatggtggtgcgcggcttctcgaagtacacgcgcatgacgatgagcagctgctcaccgagctcgtccttcagcttggccaatcggtgcgcgtagtccagcgcggccttcgggtcatgaaccgaacaggggccgacgatgaccaacaacctgtcgtcttggccgtacaggcacgcgcgaatctcatcacgcgagtaggcgacgatttcctgagcctgatcggtcagcgggagttcagcgagcacttgcgcgggcgtgggcagcggctccagctccaatacgcggcggttgatgatgcgactgacacccacctgatcttcccagcgcggcacatcagtggcaacgagcgggttcttcccctcccccatcgcctgacgaatggcgcgaagctcttccggggtgttcaacggctgcggaccgacttgcaacggatgcagcgaatgtgctgcttcctcctgctgctgcataacatctctccttggatcagtatctttcccaaggataaggtgtcacgggaacaaactgacatgaccaccgttattggcaaaaaatgctcactgagtgggtctcagtgagcatttttacaaagacaaagctatttagccgcgcggcgagtggcgacggcgtcggctagggtgtgcagcagctcgttggtgcgttcccacggcacgcaggcatcggtgacggactgaccgtagaccaactggtcgagcggggccggcttttggtgaccgccgaccaagaagctttccatcattacgccggtgatgccttgttcgccgtgcgccagacgctcagcgatctcttcgatgacttcggcttcgcggttttcgtctttgccgcagttgccgtgggcggcatcgatgacgaggccatgctggctcgggccggacgctttggaaaccttgaggtcttccagagcttgacgcacggattcggcatcgtagttcgggccgtggctggaaccgcgcagaaccagatggcaatccgggttgcctttggtttcggcggaaatcacgcgaccgtccaagttaatggacaggaagtgatgctcgaagccggccgcgaagcaggaatcggcggcggccttgatggagccgtcagtggagttcttgaagcccaccggcatggacaggccactggccagttcgcggtggacttgggattcggtgttacgcgcgccgatggcaccccagctgatcgcgtcgcagatgtactgcggggtgatggggtcaagccattcggtggcggcgggcaggccgaggctcagcacgtcggtgagcaccttgcgggccagccacatgcccttacggatattgaagcgaccgtccagatcggggtcgttgatcaaccctttccaaccgatcgtggtgcgcggcttctcgaaatacacgcgcatcacgatcacgagacggtcttcaagctcacgcttgacggcggccagtttctcggcgtattcgtgcgcggccttcggatcatggatcgagcacggacccacgatgacgagcaatcgatcgtcacggccattgagcacgtcgcggatttcctgccgcgagtggagcacgagctcgctcatctcatcggtgagcggctgctccctgaggaaggcacgcggcgcgggaatggggtcaagctgacgaatgttgacatcgacggtctcgggaaagacggcctgctcccccaaacgacgttcatcctcggaactatccggaccacgtagtgctgccattgctcgactcctttccttgtatacgtaccgtcggtatggcgctatagacgcaaaagcccaactatagcagtctgttacggggactgcttgttgggccggcggttatggactttgggtgaactcgcctgcgtggactcgcctgcgtggactcgcctgcggcgatgctgtgttgttgtgcggcctgcgaccgcggcctctccccccgtcagcggcttcgcgctgacagagggagagaccctagcagccggcaggctgcgaaaaaacacagcatcggccgtcaggccgattccgggaggctggcgaagtcaggccaaggcgcccatcgggtcccatgcggggagcatggtggctggctcttcgagggccttctggtattcctccggcaacagggccttcgggacggctacctcgtagacgtattcggtgaaccagtcgtcggacatggtgaagtagcccttgtcggcgatcttggtgccccaagagttctccactcgccagcggcgggtggtgccgtcgtcggccacgtcaacgccggcgaaagccatggcgtggttcatggcggagtcaccgaagcgcacgcgggcttccttgtccaaatcgaagtccacgtcgtacacgcggccgtactcgaacaggtcggtggcccaagcgccgttctcacggtccatgaacgggtggcagtcggcaccgaaccataccgggatgccctgctcaacgagaatctgcttgacacagtccttcatgaactggtttggcacgttgaggtactcggtggcgtcgccgccagccacattgccgaggtgctcgatgccgatcttcttgcccttggcgtgctcggtgcgcggatcatccaccaggcacacgtagtcctcaagaccagccggacccacgtacttcttccagaactcaaccggcgtaatctcgccgtcgcggtggaattcgccatccttgtcggtccattcccagtcgaaggagaccggcggctcgcccaggtggatggtcagaatacggtggccggcagcagtggcgtcggcaataatcgcctcgaccttggagacatcgccgtcagcggcgtacatgtgcgccacggcggtgtgcagcatgtggcgcagctgggtgttcatttcaccggtgttcttggaggattcggtctccgggaacaggtccttgggcacagcgccgtacttcttgtacacgttcatggccatggtccactggccgccatcgcccatcacgtcggcgagcaggtgctgcatcaggcgggagtcggaaggctctccggcagccaccagagcggccacatccttaaggaagtagttgacgcgctccagcttgtcgtagtacatcgcgtagttctgggagaactcgaactccttcaagttcatgttcttcttggccacgaaacgggccacgttcagggagctgaacagccagcagcggccggagcgatcctgatgggtggcttcgccattgtcaacgatggtggagaaacggcgctgcatcagacgagcgcggtcataattgcgagccaccttgtcgatgccggcggcggtcaccgcgttcatggccagacggttggtgccgctctgtgcgaaatcgccgcgcagggtattcaatgcttcgccggtcagaggcgtcaattcactcatgtcatactccttctgtgatggtgcgcttgtggcgcagatccaaacgaatacggcacctggctcgaaagcgcaggtgccgtaattcttaccgctagtagtctaatcgaaggcctgtcattcgccgttctgctcagatacggctggattctcctgagtcggggcctccggttcgccctgtgtctggtgctcggacggctcagacgattcggactgctcattctgcgcagctgaatcagccgaatcagccggtgccgcatctgtctcattgtgatcgtcggcagccgactcgtttccgctcaactcacccggctgatcatcggcctcgttgtgtacaggcttgacttccgggacgggcgcgaccaccggcaatgacgccacggcagcggcttcctgactctgaccagaggccgccgcattaccaccgaaagcgaatccggagaacgcctgcgagaacatagaacgcagttccgaaacacgctgggtgatgacggactcgcgttcctgcagatcggcgatgcgcttggacagaccgtcaagctcgctttgggcggcggcacgacgctcctcgatctgcgcatcggcttcctcgcccgccttatgcacgattgcggcggcctggatgtccgcctcctcgcgcttggacgcggcatatgaatcggcttggtcgcgagtgttcttggcctggccgaccaactcatcggcttcccgcttggccgccacacgacgctcttcgaggtgctgcaggagttcgttgaccttcttcgtggcctcatcctgctgagcggcgatgtcgtgacggatctgctcgacttcggcgttgacctggctcatcgtgctggtgcgcttgacctcggcctcatcagtgatttcctgacccttggtcttggccgcatcaatgatttcgctggccttgcgctgggcttcggtcatcatcttggacacttgctcgcgcacgtcggcgagcttcttgttggcctcggcgagcgccgcctcaatctgatcgttggaatcggacttaagcttggtgatctcctcattggcgcttttgcgcattgcggcgacctgctgggtagcttccgccttcatatcggcgatttcgcgctcttgggtggagcgttcggaagccatcttcttggtgtgctcttcgcgcgcgttgctgagctcaagctcgacggtctgacgctgttcggtaatggtcttggcggtttcggagcgcagttgtgcggcgtcctcgttggcggaggtggtcactgattcggcctgattgttggcgttcgtcagaatcgaggcggccttggcattggcgtcgtcaacaatatgctgggcatccagcttggcgttgttgatcagcgtttcggcctgagcctgagccgtggtacggatggaggatgcgtcctgcttggcgcgttccagcagttcggtactcgtctgctcggcggaggcgagcatctgctgggcgttcgcccccagggaagcgaagctgttgccttccggcttcttgttcttctcttcctgaagctgggcctgcagttgcagaatacggtcgtcatccgccgcaatctgctcacgcatgctggccaacgtctgctgcgcacgcttcacactctcctgagtagcgtcgaaggcagcatcaaccttctccttgtcatatcctcgcagcaccaccgggaaacgatccaccatcgctgtttattcctttcgcacacgcataaagctcttggcacatccttgaagcactgtagcgcatcgcactagcgctgggcgttgagtgacgcgcaatcgttacaatgcgtgcgaaccatgttctattccggcgtggcgcgcagcgtgctaggcgatgaggatgccggagctggagggcttgagatagtagcgcacggcttcgcgcaccacatcacggccagcggcgatctgctggtcgagtggcagaccatgctggctggaatccgccggcacgaccggcgggaagctgacgaatccgcccagcacccgctcctgggtggcggtccagttcagcaagttgtagaacagcgaattacatacgaacgtgcctgcgtccgagctcagggtggccggaatcgaatcgtccgtgaaatcattcaggatcgagcgcaacggcaggcgggtccaataggcggccgggccattggggtcgatgggttcgcggcgtggggtcacgttgtccgcgtccggcttgatcgcgtccatcaggttggtggcgcatcgttcaagcatcacgcctcgggctgcgtgcttgagcccggtggcgatgacgatattgggcttggtggcctcaatcgtctctttcagcgtgggccaggctttggcgaagctcaccgggatgctgacggcatggacggtgacggcgacctgctccaacggatcgtccggagcagaggagacgcccaacccctgctcggcgatggccttgggcacttcgacggcgggattgacctccacgccgtcatagtggtcgaagccggagatcacaacattgagttcacgcataatgccagtctagcgatgcatctggccggccgcttgggccagcagggcgtgcatgcgggcgcgggcctcttccttgggatcacgaccgagaatctcctcggcgatacgctcagctgtgggaatatcctccagcgtggtgatcttcaggttggtttccgcaccggagacaatggcgacgggttcatcaggcagataatcgaccactacgcgcgtgtcgtcggtgggatggaagtccgggtcggcggcagccagatcgtaagcgtgacgaatcgtcgcgaagcggaaggattgcggggtctgcgcgcggaaggtgttcgggcggtccggcaccgacttgaccactttcaaatcgcccagatcctcggtcaacagcacggtgtcggttgaggtgtaggccacggtcgcggccgtgaactggtcgagcgcatcaatcgaaccgtcgatggcggactgttccacgaacggacggacggcgtcatggatcagaatcttggcatcgtccggaatgccagccgtagccagcatgtcgagcgcggcggcggtactgtccacacgttcgtcaccgccgtcaatgatgacgcggaccttggtgtagcccatctcgccaaccaacgtttccacttcgccgcgcaccttgggattgaccaccaccacgatgtcgctgacgcgatcgcaatgttcaaaggcatcaatgctccagcacacgatgggcttgccgcccacggagacaagttgcttgggattgtcggggtcgaagcgcgtaccgaagccggcggccagcaccacggccaccaccggcacggtttgtgccggtttggagccccgagcgggggccggctggacggtaggcgtctcgacgggggtatcgaaatctctctcagtcataggcaccaccgtagggtgagggctggccgtccgtgaactgcatcacatcttctccacggaatgtgctcgcattctccgtttagtcacgcacgatgagggcaaggaggcggccttcgtgtgttttgttggcgagcgcggcgcggcggtgcgagtaccacagtgggttttcgagcgtgcacatgctgtggctgatgttgtcgatgcgctccgcgagctcggccgggccttcgccgtccgtacggcacagttcggcgagttccgggtcttcctcaaggtactgggtggcggcgtgcacgcgcggcatcgaatcgaccacctggtgtacgccggcgaaggcgaggtcgatcatcgcggcttcggcgatgtcgatgccggcaccaccgaaacgggtcttcgtcttggtcagcgggaagcgcttgatgaactggtcggcgatctcgtcgcccacttcatagcagtcgccgcagatgcgcgggccgagtgtggccacgatgttcgccggatcggcacccttgctcttcatcaggtctaccgtggcgccgatcacaccacgctccagaccacgacggccgcagtgggccgcaccgatgatgccggtgaccgggtcgcccagcagcaccggcaggcagtcggccgcgaacatgcctagggcgatgccggattgtgcggtgacctggccgtccgcctcgatgacgtgcggagtgtcagtctcaccatgtgtgccggacacgtcgaagccgaagggggtgttgatgacgaacgagtcgtccacgtccacagccacgccggaatgtacttgggagaccagcgataggcgggcttgcaccgcttcggcgagtgcgatgcggttcgacagtacggcctcaggttcgtcgccggacttgccgccgaggttcaggttgccgtaatcgccggcgctcaggccgcccagtcgcgtggtgtacaccaccttgatgccgggggccagtgcgatggggatggtcaccggaatagggcgaccggctttatcggtagagctgatgctgttggaatcgaggatttcttcgctgtattcaggcataaggcattctttcttgggtgcgggcggtgttcatgattcccatgaccacccccagtcagcgggggcggagtggtaggttattcggctttgagggtgggctttttggtgcgcgagcggatggcggcgttgatgggcacctggtgcgggcagggcatcgagaacacgtgcgccggattattgatggcgggtactggcgcgccatcggcatcgcgcaggccggtttccggcacggtaaagaccaatggtctctcgccaggcagcaggaattcaacctgttgaccgggctcgatcttgttacggctcatcagcgtgacacgtccgccttcgtccgcgctccagctcagcacttcgcccactaccagccatgagcggaagtaggcggagcggtcggtgttctgtgtgaccttgtgctccgggtaatagaagccggtggagtagtcgcggtgggccaccttgtcggtttcctcgagcagccattcgggcagttcgacgtgcggggccgggcgaacggccgcatgcttccaatcggtctcgatctgttcgaccgcggtgttggacttgcggcgcgtggagcgggcgtgggagctcatgccgtcgggttcgacggcggtgccggccgacgtaccagaggcagttgagtcggcggcatcagcaaccgtcacgcggtcacgttctgcggcaaccgagccggtgaccgaatcggcaaccgcagtatcagagccacggtcatatccctcatcggccacaccggcgaacgcggcatcggcattgctcatcacttgatcttcggttccttggccaaaatcggggtcgcccgggcgaatcacacggtcacggaaaggcttcagaacattgccatcagcgtcttcaaaaccgcgttgaatcatgtattcattaaccgcggttttgtaggcgttggtcatggcggcgatatagtaggcgcttttcgcgcggccttcgattttgaggctggtggcaccggagtcaatcaaatcatccaagtgccccagcatattcatgtcctgcgaattgaacagataggcgccgttctcggtctgctcgatcgggaagtactggccggggcgcttctcttccacgatcgaatacttccagcggcatggctgcgcgcattcgccatgattgccatcacgcccggtcagatagttggagaacaggcaacggccggagaacgccatgcacatcgcgccatgcacgaagcattcgatgtcgaggtcaccgggaatgttggcgcgaatatcacgcacggcctgcaagtccatctcgcgggccaacaccacacggcgagcgccaagctcatagaaggcgttcgcagcttggtaattggtgacgccggcctgcgtggagacatgcaattccaggttcggagccacttggcgggccatcatcatcacgccgatgtcagagacgatcagcgcgtccacgccggtgtccttgagctggccgacgtactcgcgcatggcttcgatctcgttgttgcgcggcagcacgttgcaggtcacgtacacgcgggcgccgcgttcatgggcgtagcgcgagccttcctcaaagtcctcaaggcttaggtttttgggggccgatcgcatgccgaaggctttgccgccgcagtagacggcgtcggcaccataatcgaccgcggttttcaggcccctcaggttgccggccggggacaacacttcgggctttttgcgggtggggaggttcatcgtcgtattcatcaccgcaatagtgtagtggtggccgtgtaatgcgggcggggctaccgttaggctggataacatgaagatcgatatcgtgagcgtgttccccgaatactttgaggtgatgaacctcagcctgatgggcaaagcccaggccaagggattgttggagatcaaagcgcacaacctgcgcgactggacccacgatgtgcatcattcggtggatgatacgccggtcggcggcggggccggcatggtgatgaagcccgaggtgtggagcgaatgcctggacgaactgctgggattctcgcggccgtctgaatcctccgccctatccggcacaccggtgctcatcttcccgaacccatcggccccgttgtttacccaacgcgacgccaccgagctcagccatgccgaccatctgctgttcggctgcggccggtatgagggctacgatgcgcgcatcccggactactaccgctcccagggcgtcgacgtacgcgaatattcgatcggcgactatgtgctgaacggtggcgaagtggcggtgtcggtgatgcttgaggccatcacccgcctgatgcccggattcatgggcaacccagattcgattgtcgaggaatcctacactggcgaggacgcactgcttgaacatcgccagtacaccaagccggccgtgtggcgtggtattgcggtgccggacgtgctgttgtccggcgaccacggcaaggtggaccgttttcgccgcgacgaagcgctggcccgcaccgccgagatccggccagaccttatcgcggcactggattgcaaggcgctggataaggccgaccgcaagaccctgatggccttgggctgggaggtctccgccgcccatccgcgccggctcgccgattaattcaccacacggtgggagattcactacgcggcggaatcgtcggaacgctctatatccgagtcgtcatccgcgggctcgatgtagaagacggcggtttcgccgtagttgcggctttcagtgatttgccagccttcgggggcggtgggggtgtcggagcgtaccgagcgttcgagcataatcacggtgttctcgttggtggcgctgcccaccgccagattggccaacaactgattgcattcagcggtctcataggcgtagggcggatcaatgaatatcacgtcaaaggattcaccaaagccgccagccacttgctcggcctttttggtgaacacacgggccttgagcgaggcatcccacgaacgattcttctgtaactgcgacaaggtcttggtaatcagcgccgccgcaggccgggaactttccacggccacgagttctcgcgcgccacggctcagcgcttcgatgcccaacgcaccagtaccggcgaacaggtccagtacacgggcgtcatccagcactccccatgagtcgaggtgcgagaaaatcgcctctttggtgcgatccgtggtaggccgggtacccgttttcggcgtagcaagcgccacacccttgaatcgtccagaaattacacgcatagctttcactgtacaggttcatctgcgcataccaatcgtggaaaatggcggaatctcctttcccatcaaaaaaagattgcggaccgtcctcctctattaggaaagacggtccgcaacatttagtaacggatataacgcaatacgttaacgccggatggttcccttgaatggcttatccggagacaatgcgacacgtcccatatcagtccccagaacgttcagcgtaatctccgtaggcttcgaacagcgcaacgtatattccactgtctgatccgtccatgtcgcatccacttggattccacctcttgcgcggagcgcatggaagcttccctcatgccaatcctccggcagggccggaagaacgcgaatccagccatcgtggctttggacaagcatctccgacaaggccgccgggaatccaaggttcccgtcgatctggaacggcgggtgggcgcataatccgctgtcgtacactcctccgcccagcagattggtttcagcgttcgcatccaccggccgtaggaacatgcctatgattcgtttggcgtgttccgcatcacgcagacgagcccacatgatcatgcgccatacgatgctccaaccggaaccatcatcgccacgcacttcgagggattttctcgcggcttcctccagacgcggagtcttagacgtgatgcctgcaccaggatgcagttcgtaaaggtgggacagatggcggtgctgtggatcggattcgatgaattcgtcgttccattcaaggactcttccatcagctcccaatcgcgtttcagccagttgggaacggacggattccgcttcacggaccagagcgctgtcctcttcgtcaaggttttccaaatcgtgagaagcctgaatcaaatcatcaagcagattacgcacgatggccgtggcattctcactgctttgcgcaacggataccggttctccattcgccaggaaacagttctccggtgatgttgcaggggacggggccagcccatgctttgtctccgataggaaatccatgcagaatcgcgcgttgtcccgcatgatcggccagatgcgggacaggtacgatgcatcctggttgaacagatattcatcgaacaggttccggcacatccatgcctggccgaacggccagaacgaccacatcggatcgccgtttgctggaagagccctacgccagagatcgacattatggaagacagccgatcctcggcagccgagaatcctgtcagcggcatcgtgccccggtgccagcagctcctcattcatggagacgagcggctcgatgagctccttgagcgcgcaggggccggtcatccaatagttcatctcgacgttgatgttcgtcgtgtaggcgctgtaccagttcgggaaatccttatggttccaaatcccctgcagattcgcaggttgggtgtgtggcctggacgaggaaataagcagataccggccaaaatcgaacattgcctccgccagcatctccagacgatgcggttctttgttctcatccgagcgaaggatcgccgagaacggtagttccgtatcgtcatcatgggctgaaccgagatggatggccaccctgtcgaaatatctgcggtagtccgcgatgtggcggtcgagcatggtctgcaggtcggtcgaccactcgtcgatggttttctccagatggtcggcgataaccgtcatgcttcgttccggctgctggtcgcttcccttgaatccactcatactgcggaagcagagcgataacccggtgatattcgaacattgcagactgttgtcacccacattgacgtcaccacctgtgacggtaagggagaacgcaccggcgtacgccattccagttccgtcccgctcatcttcccaaggattttcagaaggatgaggcagaagtccgatgttgagtccaggcatccga

SEQ ID NO: 1977 - DNA, 7311 bp, Unknown
  R17_18m  MAG No. k141_21349
cggttctgtgaccttcaccggttcgctcatcgccgccggcaagctgcagggtatcaagtgggtcaagaagctgaacctgccgggcaagggcgtatggaacattctgttcgccgtgctgtccgtcgcttcgctggttatgctgtgcgtccagaccgaacagcgcctgctgtggtcgattctgaccaccgtgttcgccctgtgctacggcctggtgttcgtgattccgatcggcggcgctgatatgccagtggtgatctccgtgctcaacgcatgcaccggtactgctgtggccatgtccggtctggcgattgacaacgttgccctgatcgtggccggcgcactcgtcggttccgcaggtgtgaccctgtccatcctcatggctcaggccatgaaccgtccgctgctctccgtcttggccggtggcttcggcggtggtgctgacgccgccgctgctggcgacggtccggaaggcaccatgaaggagaccacgccggacgatctggccgttcagctcgtctacgcgcagaaggtcatcttcgtgcccggcttcggtctggctcaggctcaggcccagcgcgagctcgccgacctcggcgaactgctcaagggccatggcgtggaagtctcctacgccattcacccggtcgcaggccgtatgcctggtcacatgaacgtgctgctggccgaggccaacgtgccctacgaggagctcgtggatctcgatgagatcaacccgcagttcccgcaggccaacgtggctctggtcgtcggcgccaacgatgtgaccaacccggctgctcgccgtcctggcaccccggtttccggtatgccgattctcgacgtcgacaagtcccagaacgtcgtggtcatgaagcgtggccgcggcatgggctacgccggtatccagaacgaactctacttcgaggacaacacccagatgctgttcggtgacgcgaagaagagtctgcagtccgtcatcgccgccgtcaaggaactgctcgcgtaaccattcttggctcccctcacagaggggagccaagcttctatatctactacagcccaaacacccgcttaacaaagccgttaacgcgacgccaatagtggtccggatcggtgctggcgctcatcgtgtggtcggcgccgggaatcagcagcttctcgcggtcgatgctggcgcaggcgttgtaattgatgtccagatacttcgggttgacaaaagtatccgctccgccatgaatgaacatcatcggaatagtcgcgtgccgtaatgccttcacacaggaggcgtcctcaaaccggtatccagccttgcgtttagacacatgactggccactttgaccagcagcacggccaacgagtgcggcaaacggaacatcgcctcggcattatccgtaaactgcgagaccacggaactgtatccgcaatcggaaatcgcggcgacgacgttgcgggggagtcgcgcatcgccggccgccatcatcaccgtggcggcgcccatcgaattgccatgcaacagaatgcgtgcatccggatcagctgcggtgatcagcgaaacccagcccaacagatcgtcgctttccagcaatcccatacccacgtaacgcccttcgctcaattcatgggcgcgctgcgcgggtagcaggaccgtaaaaccgagttgcgcatagcgatgcgcccatttggccatttccgcgggctctccggtatagccatggcagcagatcgcgtatagatgcggctgtgggtcggaacaatccgggtccaacagccagccgtggagtttcaatccatcatggctgcgcagcgtgaccgattgcttggcctcctcgaaccaccggccggcctcaagctgctcggacatgtcgaattcgatgcctttcggcgtctcctcgtgcggcatgttgaacatcgaacgtttggccttggtgtccagcgcgaacatgaacatgacgttggcggccgcggctgtgacgccggctcctgtggcggctatcgcggcaagtgccgcagccatgcccctgacaacgcgagtgtgtgcggcgatgacgtcatggccatcctcattgatgacgtcgtccgaacgagtcatatcaacctcccgatatggtactcaccatcgtacgttattatcgaaatcatccccaacttcgtgaaagaccgtacactgagtgtcgctgagcgtacgtttttcacgaaatggcgaacgatttcgtgaaaaccgtatgatgagaacgggtaagcgtacgttcttcacaaagttagggattatttcgcggaaaccgtacgttgacgtagctgggacggcctatatgcagtgtcatcgaagcatcattacgcaaagtccggggttggcgtatacttgacaattgttgctttggcgagggaagtgtgcatgctgacacatgacacagattccgttatcgactcggcgtatttcactccttgtagggtgtctttcggcgcgtcgtggcgtctgagcgagacagtacgaaacgaagatacaaggagtatccattatggctaccaccattaagcttgagggcgaggcccgttccgagttcggcaagggcgttgctcgtcgtctgcgcgttgccaacaagattccggccaccatctacgccggcggcgaagagcccgccttcgtgaccttgccgatgcgcgagaccaccctggccctgcgtcacaccaacgccctgttcaccatcgccttcgacggcaacaccaagatggccgtcgtcaaggacgtgcagaagaacccggtcaagcgcatcatcgagcacatcgacttcctcgaggtcaaggccggcgagaagatcgacgtcgaggtgccggtgttcgtggaaggcaccccgaagggtgctgccgtggcgttcgtcgacattcaggagctcaaggtccgcgccgacgtcaccaacctgcccgagaagatcgtggtcagcgtcgaaggcctgaccgacggcaccaaggtgttcgccaaggatgtcgtcctgcctgagggcgtcgagctggacgtcgaggatccggaagagtccgtcgtcaccgtcgaggtgccggaggatgccaccgagtccaccaccgctccggaagctgctgccgccccggctgacgccgccgctgctccggctgccgacgccaagtgagtcggtcgcttcgatagcgaacaattcagaacataactgaaacgtggaagcccgcagccgttgagaacggtgtgggcttcttcgttttttcaccatgtgaactctgccacacgagtaacacatgggtgtgcaaaagtatgcaacagagttcgcgccacaagcgcacagcacacaccccatatggtggctttcgggccgccaaagtcaagaagaagtagctagtgatgactgaaaacacgcaccacgatccggcagcactcgacaagctcaccgaaccgttcaccgtactgccgaacgacaaccccgcatccgatgagaagcgccagtccctcatcgacaagccggctttcggccaggtgttctccgacaacatgacccacatgacttggaccaagggcgaaggctggtccgaccgccgcgtcgaaccgtacgcaccgctcaagatggacccgggtgcttccgtgctgcactacgcacaggagtgcttcgagggcctcaaggcttaccgtcatgccgacggctccacctggctgttccgcccggatgcgaacgccgagcgtttccagaactccgccaagcgtctgtacctgcctgagctgccgattgacgacttcctcggttccgtggccgcgctggtcaagcgcgacgccaactgggtgccgtcccgccgcgagtacacgctgtacatgcgtccgttcatgttcgcttccgagccgttcctcggcgtgcgcgccccgcaggaggtcgactactgcgtgatcgcctctccgtccggcccgtacttcccgggcggcgtcaagccggtgagcatctgggttgaagacaagtggttccgcaccggccctggcggcactggtttcgccaagtgcggcggcaactacgccgcctccctgctcggcgagtacaagggtgttgagaatggctgcgagcaggtgtgctttgtggacgccgccaccaagacctaccttgaagagctcggtggcatgaacatgatggccgtgcacaaggatggccacgtggagaccccgtccctgaccggcaacattctgccgggcgtgacccgtcgctctctgattcagctgttgcaggacaagggccacgacgtggtcgagaccatgatcgccctcgaccagctgctcgaggacatcaagtccggtgaagtcaccgaggtgttcgcttgcggtaccgccgccatcatcaccccgatcggtcgcttcaagtccgagaagttcgacgtcaccgtcgccgacggcggctccggcaagctcacctgcgaactgcgcgacgagctgctcggcatccagctcggcgaagtcgaggacccgcacaactggatgtggaaggtgtgctgaactagcaccttttgtttccgactaagaccccttagaatgtcaacaattccaaggggtcttggcgtattggaaatgttcctggctagagaggtacagatggatttagcaacatttcgcaacaaataatatgatttaggtcttctgcacgttgcgggggttggttatggttcatccagatgagaacaggagcaaacctatgagcaagatgagtgacatgacggaatactatgcttcagcctaccgtttgccgtcaggcttcgagcattgctcgaaactgaagccggtggcagaggcagcgacggcgttgcgtcggtggtgagacaagacatgagcttctggcgacgctgggggatgttcaatgtcagtaatggttcaaggtttggactgctgacgtcgctgagacaccttagcgtcgttaacgggtcaagttctggcgatcaaacgacggtaaaaaggggcttagcgtcgttagctgtacataagttggcacggcaacgacactggagcgcgtgatcgtcggtgccgtgccaaactttggccaacctccgacaaatgagaaggactaacgtcggtggctgctcaaagtttggcgcgctggcgacgctgtaagaaaaaagtgtggagtcgaatcggcaatagcatttattcggtttgttctctagtccaattgcgtcaggcaaggcctgttgtaggctcgggtacgacgggctgtagcgccgaataaggatgaacgggaacagaacgaagacggactgagacgaaccgaagcggtaccagaggggagcggctcatgcaggtggtgttggagaacaacatcgtttttgtggtcatcgagtatttagcaatcctgtgttggggattgtcgggcggacttgccgccattcgcaagggctacgacatcttcaccatcatgctgtgcggatggcttaccgcactcggcggcggtcttgtgcgcgacgtgatgctcggtgccctgccgccggtcggcatcaccgacaaaggctatgtgctcaccacgctgttctctggcgtcatcgcggtggtggcccacccggagatcaccaaactcaaatggacgatgactgtcatcgatgctctgggcctcggactattcgcagtcagcggcaccgcaaaagctctggcctacggttcctcaggcatgacagccgtattccttggcatgttcacagcactggccggcggcctcattcgtgacatcttcatcggcgatgtgccaatgattattcgagacaaacacctctatgccgtgccctcgttcatcggttgcattctgaccgtgcttgtatggcgtggtgtgcactacggttggttcgacatgtgctcggaaatgctgctcgacgtgctgatcgtcatcatcgtggtggcgctgcgcctgctctcggtcggcttcaacgtcaccttgcccggagccgtcgagcgtcatcgcgtctacctgcccagcgaaagccgatatctcaagcgcccggtcatccatccgcacgccgataccgtcgatcccggcgataccaccaaggacgaagaagacaagcctcaggatgattcaagaccgcctcagggctaactgccttcaaagaggtacatttggccttctgcaaaatgacaactgctttcaaagaggtgcctgaagcacgaaacgtcgagtataagcgttgcaatgacggcgtttatacttgggctttctcggattcggtacctttctgaacggagatgtcatttcgcaagaccgccaatgtacctctttgaacggagatataaaaagtcccgcaagccagatgacttgcgggacttgctaaaaccttaagaggcttatgctcacagagcgttgatcgcaacagcgaggccggacttgcggttggcggcctggttcttgtggatcacgccagcgccagcagccttgtcgagcttctgggcggcaaccttgtaggcggcctcggcggcagccttgtcaccggcggcgatggcttcgcgggtggcgcggatggcggtcttcaggccggacttcacagccacgttgcgaaggtgcgccttctcattggtgagcacgcgcttcttctgcgacttaatgtttgccacgtttactccaaacgatgtgtgttataaggacatacaaaaggtagaggatagcatgagccccggaaaaacccgcgcaatgccacgccgaatacagtccctcggctacactaggtgaagtttgagtatatgccaagaggaggaatgcgttggtcgtccaacacaatcagccgggttccacggatcagtcggtgattcgcaacttctgtatcatcgcgcacatcgaccacggcaagtcgaccgtggccgaccgcatcctgcagttaagcggcattgtgcccgagcgcgagatgcgcgatcgcttcctcgaccgtatggatatcgagcaggagcgcggcatcaccatcaaatcccaggccgtgcgcgtgccatggacctttgacggcaccgaatacacgctcggtatgatcgacacccccggccacgtggacttcacctatgaggtgtcccgcgcactggccgcctgcgaaggcgcggtgctgctcgtcgacgctacccagggcatcgaggcgcagaccctgtctaacctgtacatggccatcgaccatgatctggccatcattcccgtgctcaacaagatcgacctgccgtccgccgagccggacaagcatgccgaggagatcgcaggtctgatcggctgcgagccgagcgacgtgctgcgcgtctccggcaaaaccggcgaaggcgtggccgacctgctcgaccagatcgtcatggacgtgcccgc

SEQ ID NO: 1978 - DNA, 5781 bp, Unknown
  R17_18m  MAG No. k141_21881
ccataatgaaagtagtgaacaaactgttggcagcaatggcgacacgcaagccgtagtgagacatagtcatgcgactcacgcccacacgccacaacagtcaagcaagctttcgggaaaggagatctgatgaacgatcagccggtagagcgtactcgccatatctccataacccgtacggcggccgatggcacggtaagccagaccgaagtgcatatcacggcggtgcatcatcgttcagtagataccggctcggccgctgcgtcggtccagacagacgtgcatatcgttacggagggcgactgttttgacccccgtacctgctgcgacgagcgtgaacaggcgttgattgccgcgttgcgtgcctacttgcgcccggatgtggcgcccgaatgtctgatggcccggctcaaggccacgcttgatcactgctgcggcgaagataagtaacgacatatacaacaaggcccgtctgatgtatcatcagacgggccttgagcgttctataagaaacgcgaagaatcaggcgttaggacgcttgccgtggttggcggccttcttacgacgatccttgcgcttacgtccgcgcatgcccatgatggactcctttgctgcagtaaaaaaataagccttcggaattatgccacataagtacgacgtgatgcaacacgggtgtccatgtggcgatgatcgtcaggcttggttattcggtttttcagatttgttcggcgtggaaggtgaccacggtggtgtagtcatcgcccggctcgagcacaaccagatccttgccggtgcggaaggcgtcggcgtaggcggtcatcggttcgacggccacgccggcctgacgagccttcccgccgatttcgttgccggtgcacacctgccaggagttgatggtcttgtcgccggtcagcgtgaccttgatgccgtcggggcgggtgaacacggcggaagtgctgccatcttcgccgcggttggtgatatcggtccaggcatcgtcgaagccacgtccctccagcgtggggttatcgcgcaggtcgaagatgccggaaaccggctcttcaccggtgggcagcaggtgttcgtctacggtcacgtgggtatcgcagtgcagctcaagacggcaggactcgttgtcggcggtaatggcctgaccggtggcgtgcttgccgttggccagccacgggtggatgccaaatgcccatggggccttcacgctgtcgttgttgtgcacggtgaaggtttccgtgagaccgttctcgtcaagtgcataagtggcggtgatggtgatatcaaacgggtagccggcgatgtcgggggagcgccaggagagcgtcacatgtgattcctgcaaatcaacgagctcccacatgtagcggtaggcgtagccgtgcagggaggattggcggtcgaactcgtcgatcggcatctggtagtcttcgccatcgaaagaatactgaccattggtcacgcggttcgggtacggtgccagcacccagccgttgcagcaggggatgaccttgttcgggtcgaaggggacgatgaggtcttcgccgcgccacttcagctcgcgcaggctggcacccagttcggtgacgacggcactccattcgccggacgagatgacatattggttaccagtgcgaggcttcaaagccatagtgcacactcctttgtgaaacagattgttaccgctcacaatcgtatcgcataagtcccaagacgcggcggcacataaggataaaaaattggctcccctctggaggggagccagcgtaacggaactacttctggactacttcgtagcggaccacagtggtgtagtcgccattgggggcgagcgtcaccaagtggtcaccagtgcggaaggcattggccggggcggtcatcggttcgacggcgataccatacggatgctcggcgaacggcgcgccagtggcggtgtagcactgccaagcattgatcgtctcatcgccaatgagcttcacttcaataccgtccgggcgggtgaatgtggtggtggtcgtaccatcggcggcacgctccacgtcgacccaggcatcatcaaaggcgcggccttcgagcgtcgggccatcgttcaggtcgtagatgccggtaaccggttcggtgccggtgggaatcagcgcctcgttcaccgtcacatgactggcggccttgatctgcaggtggcaggcggcggagtcggcgtcacgctcggcggaagtcgcgccctgcttgccgttggccagccacggatgcaggccgagagcccacggtgccggctcgtcgccatcattgcgggcattgacggtcacggtcatgccgttgttgccgagttcgtatgtgacggtcacggtcacatcgaacgggtatccgtccaggttggggaagcgcagtgaaagcgtcacggcgctatcggtcaacgattcaagcttccacatgtagtggtaggcgtatccgtggttcgcgttgttgcgcggtgcgggatgatattcgttgaccggcgcgcagtaatgcttgccattgaaatcgtattcgccgttttcgatgcggtttggccacggggccagcacatagccgttacaggtgggggtcaggtcgttgactccgaacgggcagaaaatttccttgccttgataatcgaatcggcgaatcttggcgccgagttcgcagatgacggcggaataatcgccatagtgaatcgaatactgatttccggtgcgtggtgttttactcgtcatggaatcactcccgtagtgaggttggtgggccggtagctcctgctatcgctggccccagtctagcgcgtctcctctatcgaggcggggattggcgatagccggcatataataaacaattcgtacagacacggtagcaatacgtggagtgacgagtctcacaccatcatgcgagaagcacgtggattccttggaaaccggtgattcgtgggagacgcggaaaagttgtgacggcagattcctgtaatccctgctttacactggaaaacactattgacgttcaggaggttccgatgaccaaaagcgttgtgctcgctgatccgcgaggcttctgcgcgggtgtggaccgtgcgattcttaccgtacagaccattctcaaagccgcggaggcttccggaaagcggacgcgcgaggatgggctgcccccggtatatgtgcgccggcagatcgtgcacaacaagcatgtggtcgaggatttggccgggcaaggcgcggtgttcgtccaggaattggcggagattccggatgctgctgcccaagcgggtattccggtggtgttttccgcccatggcgtatctccggtagtgaaggcggaagccgaacgtcgtggcatgcatgtggtggatgccacctgccctctggtgggtaaggtgcaccgtgaggtgctgcgtttcgtgcgcgaggggtatgaaatcgtctatatcgggcacaagggccacgatgaagcagtcggcgtggtgggggagaaccccgaacatgtgcacttgatcgagcatgaatcggatgtcgattcgttggattttgcgcccgacaacaagctggtgctgctctcgcagaccacgttgagcgtggatgagaccgccggcaccattgccgcgctgaaggccaagttcccgtggattcaagagccgccgagttcggatatctgctatgccacgtcgaatcgtcaggctgcggtcaaactggtggcccagcagtccgattgcgtggtgattgtcggatcggccaactcctcgaattccgtgcgactgatggaggtggcgcaggagggcttgggagagcgcggcaaagcgtatcgcgtggatgatgccagcgagcttgacccggcatggttcgagggtctggaatccgtaggtatctcctcaggtgcctccgtgccggacgaactggtgtccggtgtgattgacgctctgcaaaacttgggcttcaccggtatgaagtccgtcgaaaccatcaaggaaaacatgcacttcgtgctgccgtcggagttgcgcaggaagaagtagtcatccttggctcccctcaccgagggaagccaagaacggtcaccacgtgccgattggtgcggcaacggcgttcaagaccttgagcaggtcctgcgggttcacgcctacggacagtccgcgtttgccgccggagaccagaatctggtcgaattgcagggcgctttcatccaacacagtcttatgacgtgtcttctggcccaacggcgagatgccacctaccacatagccggattcacgcattgccaccttgggatcggccatagaggccttcttggcacctacagccgcagccagggccttcaaatccatatgtccgctgaccggtaccacgcccaccacacgctccgaaccggtgtccgccatcaacgtcttgaacacctgatgctcgtcgaagccgagcttggtggccgcctccacgccgtagccgtcatccatatggtcgttggagtgctcgtattcgtatacgtggaattccacgcccgccttctccagttggactgtcgccggggtggaacccgcgcccttatcatgcttgcttttctttgccatgattaccgttctactacgaagagacccccgcacaaggcgggggtctcacagcttagttctcaaacgaaccgtagcggcctagaccgcagtggttcactcggagatctcagcgaagtacagcagggtacggatcatgttggaggtgaagccgtactcgttgtcgtagaaggacacggtgcgagccagggtcacgccgtcaatggtgttgacgtcggtctgggtcgggtcgaacacgccaccgtgggtgtcgccgaggatgtcggaggagacgatgccctcatcgttgtagccgtagtaatcggtgtcggagaaggcagccttgaaggcttcgttgatctcgtcggcggtggtctcggtgttcagaacggtggtcagctcggtgacggagccgtccggaacctggacgcgctgggcgtggccctgcagcttgccgttcacggacggaacgaccttgccgatggccttggcagcgccggtggagtgggcgatggtgttgatggcggcggcgcgcaggttgcggccggtcttggtgccacgcgggccatcgagcagcatctgggtgccggtgtaggcgtggatggtggtcatgaagccggccttgatgccgaacttctcgtccagcagcttgaccatggcggccatggagttggtggtgcaggaaccggcggagacgatcacgtcggaagccttgaggatgtcgtggttcacgccgaacacaacggtcggggtggtgtcatccttggccggggcggagatcaggaccttcttggcgccagcgttgatgtgagcctgggacttctcggcggaggtgtagaagccggtgcactcgagcacgtactcgacaccgtcgttcttgacccacggaatgttgttggcgtccttctcggcgtagaccttgtattccttgccgtcgacgatgatggagtcttcggtggccttgacgtcaaccggagtgccatcgtcatgacggaaggtgccgtgggtgctgtcgtacttcagcaggtaagccagggtagccggggtggtcagatcgttgatggcggcaacttcaatgtcaccagcctggccgccgcgagcctgcagctcgaagatacggcggaaagccagacgaccgatacgaccaaagccgttaataccaatcttaactgtcatgtaattctccctttagggtaggccacgcgtgtgccgggcacactgaagccattgtttac

SEQ ID NO: 1979 - DNA, 22122 bp, Unknown
  R17_18m  MAG No. k141_22565
ttgcggatgacgagcaaggcaccagccgcagctgtcagcaccacaaccacgaccgcaatggcagccacggcaacacccgtattcgaaaggggcgcagcgccattagcagccggcttattcgtggcagtgttaccgggcttaacagtgttgccaggattgttggtatcgccgggcttctgctctccagggccgggagtgacctccgtggccgtgaccgtgacttcgaacgtcgcgttcacgccacgataagagacggtgatggtcttcgtgcctgcggtggcagaatcaaagccagtgaacttcagatcaccatcagttggatcaatcagcttgcgcagcgtttcggtatcgccgactttgtaaatggcggataccttcacatcggcagcgttgaacttatcgcctacctgataggaatccttggtcacttccacagcaagctcggccaactgaggcagttcgccgaatgtcactgtgtaggtttccgccgtgccatcctcagcagttacagtcaccgtggccacgccgctgttctcggtcgaagcctgctccacctgcaccgtagccttcgcgtcagcagcagtcgcctccaccgtcgggtaagaagcagcgtctccggccagcgcaccggcatattcggtgatatccgcggagaatccgtcaaccgtcttgccatccacagtcagatcagcaagattggcgttactagacggctgcggctttggcgttgcttcaccttcggcgatgcgtacttcagcgatcttggcatagtcattgccatcggcgtaggtgaagttgaggcgaatgcccttggtggcgggcagagcgctcacatcggcttccgtcacggctccagcagcaccattcacagtgactgccggcagcgtggcatcagtccacgtggcgttgtcttcagctaggtacgatacagtgaagctcttcggagcggcctcgcccttggccttatccaccgcaacgctgagcttgcccagctgatatgccttatcgaaggtgtagctgagccacggcgaggtgtcgccggtgccccagttcgaccagttggtgctcagattgttgtcgcaagtcaggtcggccgtagaagcggaggcccagctgctggccggctcatacttcgaggctgcggcggacgagcagaacaaccgggcaaggttgctttccacagtcacggtgagcgtggcagttactgaagaatcagtgacaaggcgtaccgtcacggtttgctcgcccaatttggtggtgtcgaagccttccaacgtgtattcatctggctccagtacacgcgtcttgccattggtgagcgtagcggtaaccgtcacgtccttatgcgcgagcgtctgcctcttggcgatagtggcttcagggcccttggctgcgatggactccacagcagcagtctgcgaaccgaacgcagtgccgttgaaggccacggtgaatgcgccggcattgctgttcgacgtggcgaaagcaccggcatcgagcccggttacgtccgcaccggtcagcgttaccgtagcgacatcctgccattcatcgttcgcggaagcgcgccagtagcctttcagagtatcggttgaggtgcgctccagcttgagctgcacttggtcgccgaagccggtaccaacatgcgatgtttccttatcgatgtagccatcggcattggaatcgtactgcatgtaaacgccgcttgggctggcaagtaacgtggcatatcccttgccgccgttagcgccagtaagaccgttacggaccaccagaccggcgcgcggatcgccattaccgcccaagtcgagcggcttgaccgtggtttccagcgtttcgttcacgtccagggcatcaggctggtacaccgcactgccctcgttgcgatccgtccagacgccccgattggcgttgtccgtaatcgtgaagtcataagcaccgccggacgcagaaacctggcacgcgctgccgcccttccaatgagcttccttccaacttccggaaatcgggttggagcaggaaacatcgatggttctacggaatgtacggcccggattgaagttactgctctcggcaagagtgcccgtaatggtgtaggttcccggcacattgaatgcgtaggtgttaccagcagccttggtcgacttgctgactgccgtaccgccttccacattccatgtcaccttggtagcaatggtatcgtcgccttccttgacgttgacggtgtccggcagagtaacggttccgcccgtgttcacggtcttcgggagatcatcgccggtttccacagtccagttgaccagcttgcccttggcgctaccatggttgccccaatagctcagatcccaaccgtcgggctcgccttcttgagcaggattgtgcatttcgatggtgccgttctcaccgatggtcagcggcagccaaacataggtggaatcggctttaccggaatcccaacggtcaccaaggtagatgaagtgacctttctcctggtctactgcgagcacactagccgactgcgaaccgaatgtggtgccgcgggtatcgcccacggacaacagaccatccgcgccttccggcatgttgttgtaccacgtgttctcgttgacatcgtccttttccacgccacgggtccagcttcccagcatggagtcggcggtgtagtaggtctgcttgttcggggcccagccggttgcaccagatgcgatgatgttgtaacgcccgtcatattggaatacggcaggagcttccagcgaaccattttgtttgacgatttggaaatcttcgccacgcaccggggcatccgtagtagcgtctgcaagaatgtatgggtactgcccgtcagcagagtactgcttttgtccctcggactggtccacattcgtggtcttgactacattggtgtaatcatcgttgagcttggcgatgtacagcgtggcattggcttcggaagaatacagtacataggcactgtcgtccttcgggtccacgaacacagtcatatcgcggctgtcaccgttctcaccccagctggggttacctgcggcttctttccaattgttctggttaggcaaacgataggcacccaccatagtgaacgggcccgccggattgtcggaaacagccacgcccgcaagtgcacgtgcatagttggaaccgcccggcgtggtgcttccatcggaatgccaccacagcacgtattgcttgttcttcttgttgtagatgatcttcggacgctcgaaaatgccctgtacggaatcaaccgcgccatcaccatcctgatcggggttggtgttgaggtacgggaagattgcgtcggccttggcagcgtccacactgccgtcggacttggtcaggttgtaggccttgtcgaagtaggcgtaatcggcattgctcttatccgtcaactgagatttgctggtcaccgcacgcagcgccacaccaagatcggtccagttgtatagatctgtcgacatataagcatgaacaccggggctgttgtcgtaaccgttagaacggtcttcgccataccagtagtaggcgtcgccaaccttgaccacttggccaccgtgcgcttggatgtgtgtgccgccattatcattggcgttcttggcataccaatatggctggaagtaatcgctagcgttcttgcccggatcggctgtgggctggaacttggtgtatgtcggcacttggccgatggtaggcaggtaatccacacctgccgcactggcacttgcagcggccagcccgcatgacaatagcgttgccgcggcggtaattgccgcgataagagcgcccttgcccttattgtttatcttcattgatttggttccttgattgatgataacggttttttgaacaaacagttatatcgctatccgcgaagccagaaaaggttcgacaaatcaatataccgatactgaaaactcagtattcaacttgtcggaccaattatggtcaaagagcggaggaaccggccggcaatagtcaatattgccggcttgttccttcacccattactgcgcgagggtgctatgcacgcttgcgcagcatgaacagtgcacccgcggcagcggccagcagagcgacagcgccagcgatggcggcaacactggaaccggtgttggccaccgtgttcttgttgccgttgccggtggcaccgggcttgttggtgttgccgggcttctgttcttcagggccaggggcgactgcgttggccttgaccgtgacgttgaaggtcgcggtcacaccacggtaggagacggtaatcgccttcttgcctgcggtggtggagtcgaacgagccaatcgcaagctgcgggtcgtcaagagcgaccggcacttctttggtcttgtcgccactctggtagacggcagtcaccttcagaccggcggtatcgagcttgtcgccgatggcgtactcggtcttcgtgggtccgatcaccttgagcgaagccaaagtgaaggcgttgaaggtcaccgtgtaggtcttcgtctcagactcgtcggctgaggtcaccgtaatggcggccttgccgccaagcttgccgttctcaaccgcgtcgccagtcaccttgacggcggcggcattgtcggtggcgaaggcctgcagcaccgggtttgcctcggcgtcgaccggcagatcaaccgtgtagtcggtcttggccgggtcgaagccttcaacggtttcgccgtcaagacgcaggtcgcccagcgtggcatcggatgctggctgcggggtgagtaccgtgctgtcttgtgcgaacacctggatctcagccacgttgatgtacaccttggtgtcctgcaatgtgttagtcaggcggatggccttggcctttaccggggtgccgagcacgaagtcaacggtcggggtgtcggcggcggtgatgccgtcggagccagagccggcatcgccggcctgtatcttccagccatccttggtaccgactccatgccatccgccagcctcatcctggtattccagcgtctggctcttcggccaagacgcacgaccatcgtagtagaagaaggtcttcacttcggtgatggtctgagcttcgtcgaaggtgaacgtggcgaccgggtccaccgtcgaggcggtggaagcccaagtggaccaaccctttgacgtagtgtcaccatcgatggccttggaagcggaggcaccctcctggaagttcaccgagaagttcgtgccagaggccgcggcgatgttcttcgcagcaccctgaaccggcgtcacgaatgcctgaatttcggtggcgttcatgtagtcgttgttcacggtgttcacaatgcgcaccttcgtggcattcactgtgcccttatcggccttgaacgtcaccgtctggcctgcggcaggcttaacatcgctaccgaattgcatccacgtctcgccatcagtggtgtactcggccttggcggaagccggagccttgtcaccatacgtaatggtcacgctgctaagctcacactcagagccgaagtcaatcgtggcggtcgggctggcggaatagtcaccagcagagttccacgtcacccaggcttcagctgacgtgtcaccatcggtgagcttcttccactgatcgcccttgctgtattccgtctgctggttggtcacggtcaggctggaagcagtgtcggccacattctcaggcgtggcggcggtgacatagatcgcgcccttcagcgcaatcgtggtcgcgtcgtccagctggtaagtaccggtcacggcaatgttgtcgccagccttggcatcggcgagcttggtatcaagcccatcgaagttccacgtaaccttagccgcatcgccctcgaatgcaggcgatgccttgacgtgcagatacaccggcgcagcctcaagcgcggccttcgcctcgctcgcactggtgccggccagcactgtagccgataccggatcggaaacggtgagcgcgccaacgtagaccgtagcggcgacattgaactcgttgccgtacacatcggtggcggtagcggtggcttcgtaggtgccttccttggccacatcgaccttggaagtatcccagttggcaaccgtggccttgccttcgccccaggtgtagtagagcgtgacttcggtcggcagcgcggccttctcgttaacggcggtctgcacgttcacggtcttctggctggtcggcgttacattgcgtagagtccatgtctggttggcggacggcgaagtgccgctcggtgactgccacaagccaaccttcgtgccgactgtggtaccagagttatccacatcgaggttcgtcttagtcgcggcattgagcagctggtaggtcgaaccatcggaagtgttgagaatccacttggcagccgggtcggacttagcggcctcaaccgtttcgttggaaagcgcgttcgtgccatccttggacaccagcaccttgccttcggcgttagtaatcacataagccttgagatcagggcgctcggagtcggcgggctgctcgatctgggtaaaggtccaagtctgcttcttggcgttctcggcatcggaagcgacgttggccagggacagcgcggaatcaccagaagtggtatcagccacggccttgccggactgcttaccaacgagctggtaagtgtcgccggtctcgacggcagcatccttggcgtagccggtcacgccagtgagctggacggaggcgatagaacgggcgggcacagtgaccgtagcggtcttggcagccttgtcaatcatcacagagccttcagcttgcttgacgttgctggtcttggcgaagacttccggagtggcggaatcgacacccgcgttcttgtcttcgtcagaggtttcggtggtcaggtagagctcaccgtaagcgttgtcggcaatctcgccgtacttcgacaggtcgatgacgaaggtctggtcagaggtgccggagttgcggtggatgacggtctgtgtcttgccatcgtcggaggtggcagtcatgttgttgtcttcatcgttgttggcgatgaccttgtcgcccgcgtggatgaagtgggtgatggccttgacgccgttgtacttggcgtttgcaataaccgtgcacggttcaagtccatcggtggtaccgccgttgttgttcacgcggcgctcggagtagagcttgccgtccatgccagccacggtgcagtcgaagtcgatgagcacggtgccccagttggtgttctcaccggccggattcacattcgagcccatctgcatgttgtagaggtcctcgaccacctgccagaaggtgaagtccttggactgcaggcgggtgacgttggagctgatcttgctcatcatgcccagcgcgttgtcgaaaccgtacgggttgtaggagccagactgccaggagccgtccacctcgctcatcgacagcttcttgccgtctgcctgagcgatatcgcgcgactgcatctggttgctgtcggagtaggcgtgaacgttgtactggccgataaggtccttgatcgcctgcgggtactggttgtacgacttgacgaagtcggcggagttcgtggcatcggtggctgcgatgatggtgtcatcattgtccttgagcgcctcagcgagtgcggtaatcgtctgctgctgctgggcgttgctgacatgcataccctcctgcggcttcttcagcgcgttggagtatggggtgacggacttatctttgtcggagtagtacttatcccagtagttgttaatgagcttggtgttgtcatcgctctcatcggtgtacttcgaagccatgtcgcccggagtgccccagtaactggtctcggactcgttgaacggctcgaccgtgtcaacgtttgcgccaaggctttcgaggtgctcgacgttcttggccatgtactgagcgaatttctcagggtttgcaagattattgctaccggagttgcgtccaccagtggcgtaaccgctgttggtcaggaaccacggagcggagttggcgaaggcctctacgtcggtgatgtcagggttatcgccggtggcaccgcgctcaatccaccagtcttgggcggcggacttggagaagtcatactggttgtcgtcagtcgggtcgaatgccgcagccagcttgtctttgtcggcctgcttggtggttacgccattgccatacgtgccggagccggtggcgtcatctttccacgtgccaggcacggcagcgccttggcgcatgaatgggtagccgtaggcaacatcggaggcattgccgccgcccacgttgtagcgggccatgttcaggtccagtccttcatcaccgaagatggactggtagaactgttcgcgcagctgtttgccgtattccacagccttagccttggaagcgtcatcgccgagattggtggtgatggccgattcctcgccgaggctgccggtggcgttggcgaaccaagccagcgaggtgccccagccatcgaaactgttggcataccacgggttcggggtcacggtaatggcatcgttatcagccgcatacgcagtgccggcaaccgcaaacgcccctcctcccactagtgttgccgccgcaaccattgcagcaagcgatttgctcagtaccttcattggtctccttagtgttcctgctatccgccttataccggaaaaatcggcctttgcttcactgcgccggcctctttgcctgatacatgacctacgtcgactccttctttcggcgcagccaaaatgtttacgcaaacattttgatatgagcgattttatcacaaaaccgtcacccagcaaacaacttcagaggccacaaacgacgcacaaagtcatgagccattcgaattgcgctggcccaatcgctacgaatcatatttgccgtagcccttaagtgaatcccactgcatcgagatatcgcgcccgctatcccttccgataacgccgaccacgcgtgttgccttcagcaatcagctttccttgcgcaactaaaccgtttaggaatttgcggactgttctgttatcgagctctgttatcttggcgagttcaggtacagtcacatagtcaacctctgtcaagcgtcgattcatcgccgacagcatcgctgcccgcgaatcaatttcacccgatgcggttgcatctgctttcttaccatccacacgttccccgccaatgagcctcgcaccctcttcggcatctttctcaactacagatctcacgctagcaaaaccagaaccatccacggtcttcagcgcaggaacaataggaatcgtcgcctcgaatatgtcaccatcgcggaactcaggctctcgctcagtatattgccgggacgctcttatcagattccgcagtccgctacccagctgctcggctatgccggtctgcacaaacacattagcgataatcggattctttggcattggcgtgaactcgcccagcttcattcgaccttcaaagaatgagcgcgaagcattaaccgtccggatggattcattatcaatggtgacacgcgccaccaccggactggaatactcccgatgcatgaggctgtttgccaccaattcacgggcgatcatcgtacgcgggctcactcgcttatcgccctttaacacaaagcggtcaggcagattccgctcagtaaattcacggagttgctcgtacgaatcgaacaagttggtccgcaccataagtcggtcatcgtatcggtcaatattgtctcgccgaaccacggcatcagtaatatacgctgggcaaaccgaggaaatgacttcatccttgcccaagagcagcactgcagcaagattaaagccctcttcgccggtcgtgtaatcacgatcgtatagcttggcgctgcggaacagttcttcgtcagacatagttccccaagggtgcccagctcgctgagcgaccgccagctgccgcattcgcgcaatcagctcaggacgcaaatcaaacggagtcacgtaacggaaaattcgccgttcggaatagtagttctgcttgcgaatatacatttgactaatctggatatcgctttcgatgtgtgtatccacatcagcaatgcgatcaaacactgcgcccttgaaccgcacaaccgaagaactcggagctacccaaatacgaacaataatccgttcgtcgtactcgatatgttccgtttccaccattggagccggttcgaacatcttacgattagacactacgctgacaacgttgcgctctatctcactaacgcgcttagaatcgacgccgagcacttgaccgtcatcgtcaacgccaagataaatgctgccaccagaacgattggcgaatgagcatacagtctcaaaagtatccgtatgaggcaattcgctgcagcgcttgaactcgaccatagatgattcaccggcctgcagcacttgcataagttcatcctgcgtcatcgcattccgcccttcatagcgataattcatacattaggacatggcacttatcgtattttagcatctaattagtacattaggacattgttttatgtcctaatgtactaattaggcggctaattgtactaataattgcacactgatgtactaatccgatgatcgaatgcactaattgtccgcgcaaatgcactaatcggatgaccgaatgtatcaatgagacctataggcagccgattggctgacgatcagcccagtcattggctatcggccgctagccagtcagccgccaacagccaacagccacccaactaatagccgccagccaatcagcccgtccaatcactccttgtgttccagtgcggccttcaaatcgcggctacggtagcgttcgcgcagcatagagaatccaccgaagcccacaagccacaccaggccggcaatcgcggaattgcgcgtatcgtccgcaaggaacaacgtcaggtagatgaacacgaagaacacgattgccaccgtattgagcaccttccacgcgggcatgacgaacccgtccgcgatgaaatcggcggaacggcgatacctgcgatgcgccagcagcgtcaggatgtagatgaacaggaacaccgcggagctggcggacgagaacagcacgaacgcccccgagatgccggggatggcgttgacgatcggcgacagcaggatcagcgccgcggacaccaggatggcgcgggccggcaccttgcggtcggacaccttgccgagcttgttcagcatcgggttcggcgacacctcggacagctggtacaggtggcggccggcggaatacaacagcgaattgagcgacgaggacgcggcggtgatcaccacgaagaacaccagggcggacgcccagttcaaaccggcatactggaacaccatgatgaacggggaggcgaaggagccgtcctcgttcggcttgaacgaggtccacggcacgatgcacatgatggccacgagcgcgcccacgtagaagatgagcacgcgcacgatgatctcgttgacggctttgggcagcacctcacgaggattcttggtctcggagacggtgacgcccacgaactcgagcagctcataggcgaagaacaccatctggaagctcatgaggaaggccatccagccgttcggggcgaacgagaagccggagaacaggttgtcgagtccggcgtggcccgccgggctcacatgatccacgccatgaatccgcgcggccgggtaatggtagccgatcacgatcatgaccacggcggtgacgatcatcgcgccgatcagcgtgatcttgatcatcgagaaccagaattccacctcgccgaacaccttgacggcgatcaggttgacggacaccagcgacaccaggaaacacagttcgatcagccatttccaatgggtcaggtcgatgccgaacgtgtcgaagaaggtgatgaagtacgtggagacggccgtgatctcggtcatgcccaacagcacgagcgcggcccaatacgtccagccggcgaaatgcccccatccgttgcccaggtagcgggtgatgaaattgatgaaggtgtgctggctggggtcgcggtacatcatctcgccgatggcgcgcatcaggaagaacatgatgacgccgaccaggatatacacgaagacgatcgaggggccggtcagcgccagcgacttgccggaccccaggaacaatccggtgccgatggtgccgccgatggcgatgaactgcacgtggcggttgttcaggccacgctccatctcgttggtccggtccaggctttcgacagacttgagtctgcccgtagcctgccgtgtaccaccattcacattcgtatcggccatactgatttcatttctcttctccgccgcccgattgttacgcaccggacgcgatactcgttcaaaacaagttcagactgtatcaccgaaatatgtcgcgaaaaccgctcagctcaagaatacatgcgatgatactgtaaatattcagccaaaaaagttcaattcaccaacacctaattgaacttctacctctattccacggacttgagcgagctgaccgggtctacgcgatcgagcactgggttggtgaacagctgcaccagcagcgcgaacgccagcgtcgccaccacggcaatcgcatagctgtaccagtgcacttccacttcgaaatacagcgacggcatattcaacgcagcagtcagtaatccgcctatccacctgccaagcggcagaccaaccaccacacccataccggtcaatatcatcatctcgcggttcacgtagttgtgcacctcgcggtcatagaagcccagcaccttcagtgtggccatctcgcggatgcgttcggacacgttcgtattggccaacgtaaacagcaccaccagcgccaggccgccggcgagccccacaatcagcgccaccacggcacccatcaaatcgaacttaaacgtggcggccagatgcgcacagctcacggccttgagcaccgacgattcctcgcccaaccgatccgcatattcggcctgttcggtctcggaacctttcagcttggcgagcatcgcgttccacgtcaaggtcgaggcagtgccatctcccgaagccgaagacgtcacaccgccggccgcaaacttctggtcgtacagtcgctcactgatgtacacatcagagccaataagattgcgcgtcacggccgtgacctgcaccttggcccggctgctaccgccattgcccagcgtgacggtgtcgccggcatgaatattcagcgagttggcggcggactgcgacacaatcacgccactatcgtccagcgctacagtgccgccacccgctttgccgaagatattgggcagcccaaaccatccatcatcgccggcttgttccagcgtgaccatatcgttcaagatattcagcgaatcgttgggcacggtcatcagctgcacggtttcgctttcctgcgccgcattgctcatctcgccactatccacgcgcagattcagcgtttcggtggtttggccatcttgtgccacctgcttgcgcatcgcggtggcgtcatcgtcattggccacgaccatcaggtcgtactggtagatctgctcgtattgtttgacgccaatcgtgtcgacggtgtcattaatcgcaaatccgcagataatcaacgctgtgcaaccggccacgccgcccacggtcataatcaagcgcgacttgaatcggaagatattgcgcgcggtgactttgccgaggaagttcagccggctccataccgggcgaatccgctccagcaatatgcgagcgcccgctttcggtgccttcggccgcatcagcgcggcgggcgtgtgccgtatctcctcgcgacaggcgagcgcggtggccacgcccacgccgaccacgaacagcacgatgccggccgaaccgtacagccagtcgtattcgagtcgcacaccgggcaatatatacagtccctcaatcaccaccagcaggaatgccgggatgccaaggaatccgaccagcagaccgatgccgccgccgaccaggcaggcgagcaacgcgaacagcagataccggctggacacggcgagtccgccatagccgagtccaaggtaggtgccgataagtccgcggtcttcctcgaccatgcgggtcatggtggtcaggctcatgagcacggcgaccagcaggaacacaatcgggaatgcgcggccgatggattcgatggaactgacgtctgatttgagcgagctgaatccgtcgatcgaagcgcgcgtctgcacataccaacgtgcgttggccacatcgtcgatgcgccgttgctgcttggcgaattcgctttccgcttcgcttcgcttcgcatcgagttcagactgcgcatcatccagtttcgccttgccgtccgcgagctgttgttcgccttcttccagctgccgctcgccttcttcgagctgctgcttgccgctggccagttgggcggcctgcgcttcaagttgcgccgactgggtttcgagggttgcggcattcgcttcgagttccgcggatttggtattgagctgtgcctctcctgcagccgcttcctgttccttggcggtcagttgcgcgttctgctggtccaaggtggattgtgcgggggcaatggtttcgtttaatgtgcgctgcaaatcggctttctgctgggtcagactgtctcgctgcgtttgcagttccgtttgcttggcggccagctgttgccgcagctcactgattgacggcacttcaggcagggtaatgccaaggcgcgcgagcagttgcttgatggcctgccatgtgggtgagttgaagtcgatattcgggtcaagttgcgccagtagattgtcggcctgttgaatcatggacagcatctgatcaatttgtgccacgccttggtcgatttgggtaatgccctgttcgattttcgtgcgattggcagtcagttccgtttgcgccgcatcgagctgtttgcgagccgaggtgagctgcgctttgcccgattcgagctgggtgcgcgcttcggctatctgctggcgaccttgcgcgatctgttgacgggccgatgcaatctgcgcacgtccatcggcgagctgccgttcgccatcggtaatggttgtcctgttgttctccaattcggtacggctatcttgcaatgtcgttttgttggcttccagctcggcccagttgtcgtcgatctgcttctgggcttcgtccagctgctcgttggcctcgtctttggcatcatccagtttgcgctgcgcgctggagacgatctgttgacgacgggctttctggcgtgtggcctgtatctgatgttcgatacggtcggccacggttttgatggcttcatcgtaggcatcggaaaacgtgtcaaaatcggacgcaccagtgacggcaaccgatatcgcagtgtatatattgccggtcacgccgtcgctgggtgcaaagaacgtatagtcctcggatgaggtggaccggaaggaggtcatgcccgaatagccgtctggattgttgaggtcgcgcgggtcgagtacgacgccggtgatggtgagtttcgtggggaactgcggggattgctcggcgtcggcgtccgtattggcgtcggacttcgcatcggatgccgaggcattggcggcgacacctaccgtatcggcattattggaatcgtcagtctccgtggccgctaccgatatgacggatgaaaaggtgtcttgtggcgtcacagtaatggtgccgccaatcttgagtccgctatcgttcaggaattgctgcgtaaccgccacttcgccggccttgttcggcagtttgccctgccgtatgtacggctgatcaagcccttcggtaccgatttcctgcatggtcacggttttcttggtgccgtccaccaacgtggtcaccgtctgagaacgttcgggctgcacggtttgcacaccgtcgattcggcgcagtgccgttgcatcatcatcggtcaggccgtatgtggatagcacctgcaggtcatgcagtccctgctgatcgtaaaaacgaccggccgccagaaaagcatcgcggcatccggcgtagatgccggtcagcacggccacgccaagcagcgtgatgacggcgatcgagacgaacctcttccagctgcgcagccagcaacgcaacgtatctttggcaaataccgcagaaacgcccgctcctcgaccgtcgttatcgtcgaggttcggccgtttcacagactgtttcacaggttgtttcacgaatcgcctcgcttgtttcacggggcgtttcacagagtgtcttgcagtgagcatcgccaatcacctaccattcgatatcggcgatgggccgcggcgttgcgttgacctcctcgctggtcaccttgccggagcggaagcgaatcactttgtgagccatcggtgcaagcgcggaattatgcgtgatgatcattacggtcatgccttgtgtttggcaaatatcctgcagcaactgcagcacttccttgccggtctcgtaatcgagcgcaccggtcggctcatcgcacaacaacagcttcggctttttggcaatcgcgcgggcgatggatacacgctgttgttcgccgccggacagttgcgcggggaagttgtccatcctctcccccagtccgactttgcgcagcgtttcctctggatcgaaatggtcagggcagatttgcgaggcgagctccacgttttcgagcgcggtaaggttaggcaccagattgtagaactggaagacgaagccgatatcgttgcgccggtaggtcaccagttcctttttccgcagacccgtaatatcgcgtccgccgaccactacgcggccggttgtggcggtatccatgccgcccagaatgttcaatgccgtggttttgccggcaccggactgccccagaatcacgcttaattcgccttgttcggcggtgaagctggcctcgtcgagcgcgcgaatcacactgctgccagaaggatattccttgaccacatggtcgaattcgatatacgccatcgcacacctccaacgcgctcgtggcagccacctagccccatgggccccgccagaacttcctgctatactcaagtaaaacaacactgtgtcggttctgcaaccaacagttggattgtgggttgtcggaacttggggagaaggccatggccaaagaattgacggaaagccgccgcacccgctacacgagacgtgccatgcaggacgcgcttatcgagttgctgcgcgatcagccgctcggctccatcaccgttaaagcgttgtgcgagcgggccgatgtgaatcgttccacgttttacgcgcattatgcgagcatcgaggaactgctgcacgacattgaagacgaaaccatggcctgggtcaccaccgcactcgaacagctactcgcccagccagatcctgccggcatcgagcatgttattgagcgcatctgccagtacattgccgacaatcgcaatcatctccaagtgctgatgagcccgaaagcggatatcggtttccagcagcagctgctgggattgatttacagccagcgcggtgtaggcgaacagttgcaatcttcggcgggttacccagccgaggcgcagatgcgtatgcgattcgccgtgtccggcagcattgggcttttgcaatattggctcgccaccgatctcgcggcctctcccgaatcggtgtcccacaccatcttcaccatgtgtatgcctgccacgcagtgagcacagtgaattcagtgaactcagtgaactcagtgaagcgtgcggtttcataagcatcgctcgctatagcttcgcctgctcaccggccgcgcccacgcccgcgcttgcaatagcgcacaaatagacgattgaccatttctgagacgatacggcggcatagaataacgaacgttgcgcatcacggcaagccccgcgtgcgccaaacccaagaaatgtgagagaagagcacaatgagtactactgatgcgcctaagaagccgcgcgaaaccgacgacgtgccggtgccggccacgctgcgcaagtcattgaaaaaccgccacatccagctgattgcgctgggcggcgccatcggaaccggcctgttctatggttccagtgaatccatcgcgctggccggaccctcgattctgctcgcctacttggttggcggcctcgcgattttcgcgattgtgcgtgcactgtctgaaatgtccgttgaggatccgaaggcgggcgcgttcagctactatgccacccgctactggtccaagcgcgccggctttatttccggctggaactactggttcaactacatcctcgtctcgatggtggagctatcagtggtgggttcgtttgtgaactactggttcccggcgattccgacatgggtgtcggcggccgtgttcttggtgatcatctgcgccgccaacctgctgggcgtctctaaattcggtgagttcgagttctggttcgccatcatcaagattgtggccgtgatcgccatgattatcggcggcctggccgtcatcatctttgtcctgcccaccgcatccggcgtgcgcgcaagcttcgcgaactggttcaccgtgggtaacggcttcttcccgaacggcctgatggggcagaattccgacggttcctggaccggcctgctgatggcactggttgtggtgatgttcagcttcggcggcaccgagctcatcggcatcaccgccggcgaaaccgaggatccgaagaccacgattccgcgcgccaccaatgatattatttggcgaatcctcgtgttctacatcggcgctctgggtgtgatcatggccgtagtgccgtggaacaccatcgatggcaagtccagcccgttcgtgcagatcttcgattccgtgggcattcacgcggctgccggtattttgaacttcgtgtgcctgaccgctgtgatgagcgtctacaactccggcctgtacgccaactcccgcatgttgtactcgctggccaagcagggcaatgcgcccgcttacttgggcaagctcaactcgcgcggcgtgccagtggccggcgtgctgacgtccgccgcgatcaccgccatcgccgtggtcgtggtgttcgtgtggcctgagttcgcgttcaactacctgatgtcgattgccaccattgccggcatcatcaactggacgatgatcatgctcaccgaaatgaagttccgtaaggtggtcgccgcgggcggcgctcccgaggattccgagctggccggtctgagcggccaggaggcactggacgcgattcacttcaaactgccgtttgccaaggtgaccccgtgggtggtgctggcgttcctggcgctggtcgtggtgctgatgtgcttctccaccagctaccgcatcgccgtcatcgccggcgtgatctggctggccatcctcttcgccgcctaccagctcactcaggcgaagaagtaaggctccatttgcgaatagctctcactgatgagcactcagtgagagctattcgcaaatgggattcattcatgaaacagctcatcgatgccgacgagctgaacgtcggattgagacgccgcagcatcgtcgaccagtgattgatcgaaaccgccgagcgaaaacagcaggtatgttcgctggccgataccggttcgcgcagcacggtctcgcagtagattcagcacggaacggtccaccggcgcattgcggaatttgcactcgcccacaatggcagcatcagacgcattgtcaacggccatcacgtctatctcatcctgacgatcccaccaacggccaaccgcacgcgcacggaagggcaaccgtccagcagcactctcacgccacatccattcacggcacagaccctcgaacggtttgccggcaaaatcatgtaataccggcttgatatgacgctcgtatacgccttccacatcgccccgctccaattccgaacgatacggaaagacaaacgaataccagaatcggaagaaattgtcgctcagctgatacagcccacgcgaacctttcgcccgctccttaggctttgccgtgactgggaactcacgttccacaatccccagttccataagattggcgagatacgacgatactgttgcgtttgccatcatcgtgtgtgtcgcgatctcattcagcgaagttgcgccgagcgcaatcgcccgtatcacgctgttatatttcgcagtttcccgcagttcttcgtgcaacaaaaattcaacctcgctgtatagcggagcaatgcgtctcagaatatgccgcttgacatttgcgtctatggtctcatctgggtcaaattcctctaggtaacgcgggataccgcccagtattgcgtaggccagcgccttatcctcgctactatagttggggaagaattgcgctgcatcccaatatggcatcggcagcatcttcaggatgccggtcgcacgaccatatagcggcgatttttctcccaacagctccttttcgatgaagctcatggcactgccgcaaatcacaatcatcagatttgcatgacgcaacgtgtggtcccaaagattctgtagcactgacggcaatgacggatcagatttgaccagataaggaaactcatcgaatatcacaagcctgcggccgccatcgctcggctctggcagccgggttaactcggttaacgccctttcccaagaaggatattgactcagataatccttgcccggggcacccgcctcgaacatgagacgggagaacgatgccagctgttcatctttagtggcattctgcgccgcgaagaataaggtttccttgtcttttgcgagttgaataagcgtctctgtttttcccacgcgcctgcggccgtagacgaacacaagctgtgccctacgctcagtgaaacattcctgcagttgcttgaggtcatcgtctcgtccgatgaatgccatgctgcccgcctcctttatgccatacgccggcgtatttctatcgcatcacgatttattgtatcacgattagtataatcgtgattatacaagctgtgacgaggtgcgggtacgggccaatttgcaaaaaactctcactgagggggaggtggtgacggctttgaggtcgagcttgccgcaggtcaggtagaccatggtggcgaagtagtccatgtcacggaagccgcgggcccgtctcttcacgttccggacgacgctgtcggcaccctcgaggacggcgttggcgtacgggtgctcgaagtacgcgacgacctcggcgaagcggcggcggatcagacgggcgggttccttcacgggttcgagcctcgagtgtatcatccacgagcacaggcggtatagcctgacccatgccccggcgggcggctgtccatgcagatgccctgcaggacctcgcgcatccggcacgcgcgggcggtcttcagccgctgccgcgtgaggccgcgcttggtctccagccgcaggtcggagagggccgcctcgttggcgtgcctggccacgtggaacttgtcgatgatccgcctgacatggggcaggtgctcgcggatgtccttctggaacccgcggttcatgccgcaggtgacgagccgcacgcgcccaggcaccccgtcgtggtccatgaagtccccggcgaaccgttcgaccgtggtcgagtccctgcccggggtcacgtcggtcacgtcgtgctcgaccaggccggcgaccacggtgatgcagttgcggcccttgcggctggtcccgtcgacgccgatggcctccacgcccgtgtggtcctcgagtcccctcgcctcgtccacgtaatgcgagatgaaccgccacaggcgggtgtcggtctcgtccaactgcccggcgagcgtgctcaccggcaggtgccggaccatctccacggcccacgcctcgaacaggagcgtgaacccgctgccgggcctggcccacggggcgggcaccgtcctcaccccgtgcacgggacaggtgacgcggggcatggcggcgtggatgaacgccttgtactggaagaagttcaggtgtcgccacacgcgctccctcgtgtcatacaccggacaggcgccccccggcagcccgtctcggggcaatggaagcgcacgccgggctcgaagccgatcatgatgtgcagtccccgcccgccgtcgcccgcgtccctgaaatccacggacccgaccttccaaggcccccgcaactgcaatgcagcggtgaacaggcaagaggtatccatgcctccaacccacccgccggcatcaccccacaccacaa

SEQ ID NO: 1980 - DNA, 6310 bp, Unknown
  R17_18m  MAG No. k141_22746
gaggtcaccggcggcgtgcttatcagcggcgtgatggcctggtatctgatgctggccatcgccaaaaccggtgtgctcgaccgcctcgcatccggccgcgcactcatcgagcgacgcgcctgacactctttgcgcgccactttcccggggatgttgtgctggcggagaggaacccaagcgcattagcgcaacattcccgggaatgttgcgctaatggaagggaatacgggtgcgtcggcgctgccttcatgggactattcgagaacagtcatcttagctacttcactttgctgagatgccctatccgcactcattctggcaccagttcaggcctcgacaggttgaatgcctgctgtcatctgcgttatgcattcgtggatgagttccgccatttctgggtctttcatggcctcattgaacatgtcgtcaaatcgttccgtaggcatgatattcctccttgcggcaattctcgaaaatagtgaagagccttctgcgggacgtacgtactttgaattcaaccattgagcccttacgttatgggagtgctttgccgctgagaatcaataggattatgaagtgagctgattgtcatgggcagcagattgatgaggtctatgtaatgatgcgacacgcccattaaaaataacactaaagtaacaaataagaacatagtgctgttgtatatgatataccgatatatccaatactgatggcaggccgtgcgttgtgttgcagagaaggcagcggttaagccatttcttgaacgtgagacgaagataccttgcaaacgttgatgtttcaggaatgttcggatgtgggatgatgtgatgttcgattgcgtattgcaaaagcgacgcattgctaatgtcgatttgatgtattgatatatcaatgatttaatagttttcgtcagataaatgaacatctgacttgtctcttcaaaggtgaaaggaacaatgatgaagacttggatgaaaaccgtagctatgggagctagcattgcaatgctgattggcgctggggggttgtggatcaagtcgtggtggttcggcgacctcgtctgaggcgagcggtaaagatccgtcctcgatatccgttgggatttcaatgccggaacagcagctggaacggtggaagaaggacggcagcaatcttaagcaaatacttgaaaagcgcggctacaaagtcgttctacagtatgctgatggcaaggtggaccaacagacgtcacaaatccagaacatggccaaccaaggggccgacattgttgttatcgcttctcttgatggtgtggcaaccggtgctgcggcagaaacagcaaaggacaatggggcgacagtcattgcatatgatcgcatgattatgaatacagatgaggttgattattacacaagtttcgacaatacaaaaattggtgaaatgcaaggagagtatatagttaagaaactcggccttgaccagggcaagaaaggccccttcaatgtggaattgatgtcgggttctcctgacgacaacaatgcaaaatactattttgaaggctcatggagcaaactgggacagtattttgagtccggagtgttgcaatcccggtcgggcaaagttccgaaatcagttgacgattggcaaaccattggtatccaaaactgggatcgacaaaaagcccaggctgaaatggagaatcgtatcaactcattctatggtgatggcgaacggttggacgcggtgctggctcccaatgatgcactggctttgggcacagtcaatgccgtggaatctgctggttgggattactacccgattatcaccggtcaggatgctgagaaggccaacgtgcaggccatcgtgcaagggcgccagaccatgagtgtatacaaggacttccgtaagcttgccgatattacggccggcattattgacgacgttgttgcaggtaaaactccgaagactcaagaaacatatcctaatggcaacaaagacgtgccttcgatcatggctgttcctgaagctgtcgacaaggataatgtcaagtcattgcttgttgattccgggtacatctcagcagaagatgccggcttgaaatgacaccgaatggcaatgaatagggaagagctgaattatgacaccaattactgagtcccaatatcaaattgataccaaagataatcgagatttgctcaatcgggaagcgcaagaattagtggatttcggcaagcgcttcgcgtggccgggcggtggtgcctcatatctcgatgatgaaggcaatccggttccgtcggaaggcctatatgcatatgagtcgggacgatatgctcatgcctacacgcttgggcttttagccggatatgtgcctgaagatgaggctttgccgttaattaagcaggcgttggacggattcactactgggctgttacttgaccgcgaacacgggggctggtatacccgcgttggaaaagaaggaaccccggatcccaataaaggatgttatgcccatgcctttgtgattttgggtgcggcttcagcaagtcttgtgcatattccggaatccagagcattgctagataaggcgttgaaagtatatgatcgctatttctgggatgaacagtatggcatgccgagagatacttgggatacctcttttactcattgcgagcagtatcgtggcattaattcctccatgcactcggtggaggctttcctcgcagcaagcgatgctttggaagagcctaaatataggttgcgtgctggccgaatgattcagcgaacagtcggttttgcatcagactgtaactggcacatccccgaacactttactgaagagtggaaacctgtatacgaatacaatgctgagaaaaaagatgatcaatttaagccatatgggaccactccaggtcatagcttggaatggggaagactgattacacaatgggccgtaagctcctatgatcatggggaaatcgacgagtcgactcgtgatcgatatattgaggcggcggaaaatctgtttgccgtagcggtcgaaaccgggtggaacgtagatggtcaaattggcttagtgtacaccgttgactgggagggccgaccggtagtgcatgatcgtatgcactggactctggctgaaggcattgataccgcttcggtgctgtaccggattaccgggaaatcgatatatgccgagtggtatgcgcgtttttggcaatacgttgatgaatatatgattgaccatcaacgtggcagttggttccatcagcttgatgccaacaatcaagtgattggcacagtatggccggggaagcctgatatttaccatgcgcttcaagctacgctcattccgtgcgtggcaaaagatcgaattggtctgtctattgcgaaggcgctaacagactaattatacaaggggcgctgcgctgcgtggttgcggtacggtgccttcatcatgcacaggggcattactatcggaggaggtagctgtggctatgaacggtgacgtgattttggagatgcgtcatatcgtgaagcgtttcggcccggtcaccgcgttgaacgatgtgaatatcatggtcaagaggggccagatgttctcgatctgcggtgagaacggtgcgggcaagtcgactttgatgaacgtgttgtcgggtgtgtacccgtacggcacgtacgagggcgacatcgtgtacaacggcgagacgtgcaagttcaggacgattcgcgattccgaggagaagggcatcgtgatcatccaccaggagcttgcgctggtgccgtacatgtcgatccaggagaacatcttcctgggcaatcagaagaggaagggcatcgcgatcgatgccgacgagcagcgccgcgtcgcgtacgacgtgatgaggaaggtcggtctggacgagaacccggacaccctgatctcgaacatcggtgtcggcaagcagcagctggtcgagatcgcgaaggctttgaccaagaacgtgaggctgctgatcctggacgagccgaccgccgcgttgaacgacgaggattcgaggaacctgctcgacctgatcgacgggcttcgccgcgagcagggcatcaccgcgatcatcatttcgcacaagctcaacgagatcgcctattccgcggacgcggtgcaggtcatccgcgatggccgcaccatcagccatatcgacatcgacgcggcccacccgctggaccaggatgtgctgatccgcgacatggtgggccgtccgttgaccaaccgctacccggtgcacacctccaggatcggcaaggagatgttccgcatcgaggattggaggatgcgccacccgctcgacgaggcgcgtctggtctccaaggacgtgagcatcaacgtgcgtgccggcgagatcgtcggtctggccggcctgatcggcgcgggccgcaccgagaccgcgatgagcgtgttcggccgccagtacggcaccaacgcgtccggcaggatcttcgtggaaggcaaggaagtcaagttcccgaccgtgcgttccgccatcgaccacggcgtggcctacgcgaccgaggaccgcaaggtgtacggcctgaacctcatgaagacgattcgcgagaacacgtccctggccagtctgaaggaactgtcgaacaggctgggcgtggtggacgagacccgtgagaagcggacggccgagaagtaccgcaaggagttccgcaccaaggcgccgaccatcgagatgcctgccggcaacctgtcgggcggcaaccagcagaaggtcgtgctggccaagtggatggccaccgacccgaaggtcctgatcctggacgagccgacccgaggcatcgacgtgggcgcgaagtacgacatctacgagatcatcgaccaattggccgactcgggttccgcggtggtcgtgatcagctccgaactgcccgagctgctgggcatctgcgaccgcatctacacgatgagcaacggcgtgatcaccggcaacttcgacgccaggaagaccagccaggaggagctcatgcgctgcatgacctccgccgtcccgctgcccaaggagcgggccttcgcctgacctccgcgcgaatcgttcccacgtgctttgtttgaaagtttgaaaggataccctccgaaatgtctaccgcaaccgtaacccccgcagccaagaagggcggggacgaacagagcctcaagaccctgctgttgggcaacatgcgttcctacggcatctacctggccctcgtgctggtgatcgtcgtcttccagatcctgacgggcgggcgcctgctgaatccgaacaacgtggtcgccctgttccagcagaacgcgtacgtgctcgtggccgccatcggcatgctgatggtcatcatcgccacccacatcgacctgtccgtgggctccgtggtcgccttcatcggcggcgtgggcgccctggccatgaagcacggggtcccgtggtgggccgcgatcctgctcatgatcgcgatcggcctggccatcggcgcgtggcacggcttctgggtcgcctacgtcggcgtgcccggcttcgtgaccaccctgggcggcatgctcatcttccgaggcctggcgaccgtggtcgccggcgagtccatcccggtggccaacgcctcgttccgcgccatctccaaggactacatccccaccatcttcgtcgggccgttcgccctgaccgccctgatcgtcggtctggccgccatcgcgctcgtggtctggagccaattgtccaagcgcgccagggccgtcaggaacggcctgcccgcccagcccatgagcttcgtcgtcctcaagtgcgtggtcgccgcgctggccatcggctacgtgacctacctgctggccatgtccggcaacgccacccagggcggcatcccgatcgtgctcgtcatcatcggcgtgctcgtgtgcgtctactacttcgtcctcaaccgcatggtcttcggccgcaacgtgtacgccgtgggcggcaaccgcaaggccgccatcctctcgggcatcgacaccaggaaggtcgacttcgagatcttcctgaacatgggcttcctggtctccatcgcctcgatcatcaccctgtcccgcctggcctccgcctccgcgcagaccggcatggagttcgagatggacgccatcgcggcctgcttcatcggcggcacggccgtcaccggcggcatcggcaccatccccggcgccatggtcggcgccctgatcatgggcgtgctcaaccagggcctgtccatcatgggcgtggacgccgcctgggtcaagaccatcaagggcctcgtcgtcatcgccgccgtcgcctacgacctactctccaagaaaaagaaaggc

SEQ ID NO: 1981 - DNA, 4649 bp, Unknown
  R17_18m  MAG No. k141_23025
cgccgcgagcgtcctcctgctccatttgctcgatctgcgagccgcgcagagagaccaatgccaactcggtgccggagaacacggaaccgataacgagaaatacaaaaatcaggaggatgttcaaaccaagtgacatgccttcaactctaggggagtggcacgtcaaattggggtgtgctggctgggcagtaagaaactcggcaaagggaagggcattctcatcaccatcgatgagacgcaagcggcctcgcatgatgatttggttgccattgctacagccgtgcagcacgtcattacggatgccgatgaaagtgatacgcctgatgaggataagaagggcgttgtcatcgtatttgccggcttgccgtatatggtcaacgatttgctggataacgaggtaaccacattcctgcgccgtgcgctacgccgcgaattggataacgtgccgcttccagacgtcaagaatgcgttcttggaaacagttgcggattccggcaagaccatcagtggggaagatgcgcttgaagccgctcgccagtctgaaggatacccgtacatggtgcagcttgttggctactacatgtggcaatccacacaacgtcgaggttcaaatgtcattaccgcggacgacgtgtcgaccggtgtttccgatgcgctgctcgccttcgacgattcaaggacaaactcatccgcccggcaggtcatgggcagctggaatttgcggtgccgcatttggggcagtatttgcagtcgttgtagcaccaaatatagggctgggttcattcatttggtaggttgcgcgttcatttggtgggttgtcggcatggtgaggcgttggaatggcggcatttcaatggtcagtgttggagtgcagtgaccaaatgaacgcataattgacctaatgaatgaagtaagccggttgcgggctagtttcgatccagttctatgagcgccgacgcatcttggccacggcattgctgacgcaaatacgcagcacaatggtgaagacgacgaccataatccccagaatgccaatgttgaaccagaactgatccgtggtgtgctcccacagatcatcctttttgaacatcggcaccttggtggggccatacagcagatcgttgagcccgatatccgaggcggcggcggagaagccccaacgtccggggaagatcatgctgaccagctcgaggctgtcgcggccggtgactggaatcatgccgccggagaacaccaactgggccatgaccagcaccaccagcaatggcatcgtctgttctcccgacttcaccaacgccgagccgacttcgcccaacaatgcggaagtccacgcagtcagccaaatcgccaacaccagttcgggtatgccggaatcagtgaccacaccatggtccgggccgggcttgccgaggctgaccgcagtggtcagaatcgccgcctgcaacaaggtctgcaaacccatcacgatgagtttcgaggcggtgtatgacgtgggcgacaaacccaccgcgcgctcgcggccgtaaatcgctcgctcggagacgatgtctcgcacggacaaagccgatcccataaaacaggcacccagtatgacgagcacaagcagctggttcggctcggtggcggcgtctttgaaatcgggctcacccaagccatgagaaccgggcacaaccagcgacagcagtcctaggagcaatggcagcaacagcaggaagatcagcaatccggggtcggcgatgatcaaatgcagctgacgaatcaccagagtgatggtctgtttgatgcggaatggctttgccggtttctcatgctcggtgtgccgcgtgatggtggactcggcctgcatggtgcgctggcgtgaatcagtaatcgaatacacccgttccggagattcggcgacatcgttgaagatgtcggcccattccttgccgttgaacgcctggctcatctcctgcacggtgccgaagaatgccggatggccgccgggagcgagcatgagcacgttatcgcacaacttgttgatatacgacagtgaatgggtgaccacgataaccacgcggccggcatccgccagttggcgcaacatggtcatcaccgtaagatccagcgccgggtcgaggcccgaggtcggttcgtcgagaatcagcagttcgggttcggtgagtagctcgatagcggtggacacgcgcttgcgttggccgccggacagtctgtcaatgcgattcttacggcgagacgtgagttccagctcattgagcacgttgtcgatgatttcggcgcgctcggccttggttgagccgggcaggcgcagcttggcggcgtattcgagcgccgcgtccacagagagcttgcggtgcaccacgtcgtcctgcggcacgaatccgatacggctgcgcaacagttcgatgttctgatgcacgtcgtatccatcaaacagcacgcgcccgtccgtggggctgttgagcccggcgacgatggaggtgaatgttgatttgccggcgccggaaggtccgattacggcggtgagcgtgcccttggcgaatacggcgttgatgccgtcaagcagccgggtgcctttgcccacggtcagtccgatgttttcggcgataaccgcgtcgttgctgacaaacggcgtgcggtcgcacagcacgccttcatgcacgatcaggtcggtgttgccgacggtgacgacgtcgtcttcccgcagccagatcttcgcgacgcggcggccgttgacgtaagtgccgttggcggagttcaggtcagtgagcaggatgccgctgctggtggtttccagcgagcagtgtttgcgggagaccagataatcgttgatgcgaatcaggcaggcggtatcgcggccgatgacgcctgtggtgtcgtgctcggggctgaaggacccgtgcacgcggttggtggtgagttgggattcgagccttaccgcttgcgtgctgcctgccagaacggtgccggcggcattcgatggggaaggggatgcgcagggagacggagatggtgatgcgggtgataccggcactggcgatactgccgtcggtgccactgctgttgggcggggttgctgttgcaggtgcgcgagggccggggatacgcggtgcggggccagcggggctggcgttggttgcggttgtaccggttgtgccggttgcggtgctggtggtgtgggttgcactactgggcgtgcctgttgcggcgcgagttgcgtgggttgtgccggttgcgctgatggtgccggaggtagcgcaggctgggccacgtttgccgcagggcgtcgcgggggctgtgccggcgtggacggcccgctggttccgacgatgcagacgatggtggcaccttgtgccagcgtcactttggtgctgttcagcagcagtacggaagtggtgtgaatgccgttgatggacagtccgtttgcactacccgtgtcttccaagagccaaccatcgtcggtaaaggtgacgcgagcatgatggtgagatacgtacgggttgtgaatcaccagatcgcaatccggcgcacgcccgatggtcgtggcacgtgcaggattgggggtataggtggcggatccgtagtgaatagtaagggcaggtggcattggttcagacttccgtgttcttcgatctctctgcacacagatgtaccacgaccgcattacccccggtgaacggggtctgactgatggtcagaaactcagcacctcgaccttgccggtgtcgagctggtaacgggcgccgacgatcatcagctggtcggcagccaatgcctgctgaatgatgggggattgttccaccagcgtctcgatggtgtgggccacgtgtacgcgctcgatgtcttcatgcgcgtcgagctcggcttcgcgcgcctgccagacggacatgccggcctggcgcagaataatcgattcggcggcggcgatgtgctcgtcgaggtcgtccatcgcatccgcggcctccagtgagccgtcggcttcggaagtgatggtgtgcatcaggtcgtccagctcctgctcggcggcctcgattgcgccgcagtgctcgtgaccgagcacacagatcaggctgacgtgcagtttcttgaccgcgtactccagcgaggcgataaccgcgctatcgatgagttgcccggcggtgcgcacggtgaacagatcgcccaagccctgatcaaaaatgatttccggaggcacgcgcgagtccgagcaggagagcaccgcggcatccgggttctggccatcaagcagcgtctggcgggtctcctgatcctgccatggatggtcgggcttgccttcggcgaatcggcgattgccttggagcatacggctccacgtcgcatttgcggtcgattcctgttcaacgtctgcctgagccatgaaaacctccattatcagcggactgctggtacccatagtagcgattggaagtgcggattcgcgactgcatgcataatctggctttgcccaaagcataatgagaacgctcacaatctcaatcctgtttaagggtgggccgtgatgatagtcagcacaagggctgtggctggtgtgataaggctcatatgttctgtccgtgcgagccctgtgccgccacactacgatgggttctggtaatcgcctgaagaatcctgaaaggaccgaaaatgac

SEQ ID NO: 1982 - DNA, 7020 bp, Unknown
  R17_18m  MAG No. k141_23156
gcatgcgcagggacgggccgaccacgatcacggaacggccggagtagtcgactcgcttaccgagcaggttctgacggaagcggccctgcttgcccttgagcatgtcggacagggacttgagcggacggttggaggcaccggtgaccgggcgaccacgacggccgttgtcgaccagggagtcgacggcttcctgaagcatgcgcttttcgttgttgagcatgatttcaggagcgccgagctcgatcagtcgcttcagacggttgttacggttgatcacacgacgatagaggtcgttgagatcagaggtggcgaagcggccaccgtcgagctgcaccatcgggcgcaggtccggcgggatgaccggaatcacgtcgagcaccatggcttccggcttgttgccggtggtcaggaaggcgttgacgaccttgaggcgcttcagggccttggtcttacgctgctcggaagcgtccttgatctcctcgcgcagttccttggagatggtctccaggtcgagggactgcaggcgcttcttgatggcttcggcgcccatgcagccgtcgaagtaatcgccgtagcggtcctgcatctcgcgccacaggtccacgtcgtcgaccatgtcgccgggcttgagcttcttgaacttgtcgaagacggcgtccacacgggcgatctggtcgttgtagcgggtgcggatggcggccatatcgcgctcggcaccgttacgcagcttggtgcgggccgggcccttggcctcgccggcctcctcaagggcggcgagatcctcttcgaccttcttggcgcgggcttcgatgtcggagtcacggcgctgctcaaggcgtttgatctcggaatcgaactcgtcctgcaggccgggcagatcgttgtgacgctcgtcctcgttcacctcggtgaccatgtaggaggcgaagtagatcacgcgctccagatccttcggggtgacgttcagcaggtagccgaggcgggaaggcacacctttgaagaaccagatgtgcgtcaccggggcggcgagctcgatgtggcccatgcgctcacggcgcacgcggctgcgggtcacttcgacaccgcatcgctcgcagacgatgcccttgaaacgcacgcgcttgtacttgccgcaggcgcactcccagtcacgggtcgggccgaagatctgttcgccgaacagaccgtccttctcaggcttcagcgtacggtagttgatggtttcaggcttcttgacctcaccgtggctccaaccacggatgtcatcggcggtggcaaggccgatgcgaatcttgtcaaatgcgttgacgtccagcacttgttaatccgtttctgttcttgagaccttcccaagctccccttgtcaggggagctgtcagccaaggctgactgaggggtagtgcaaaccggaaaggtctctgtacgttatctatttcacgttggcggggctacacgcggcgtattgaccgcatgcagcccgagggatcactggtattcgggctcttcggccttctggtcttccttggcggccgcgtcggggcgggcgccaatgttgaagccgaggtcgtcagcggagctggccggatcgtcgtcctcgtccttcatgtcgatggccacgccttcggcgttgagcacttcgacgttcagggacagggactgcatttccttcaggagcaccttgaacgactcagggatgcctgccggcggcaggttatcgcccttgacgatggcaccgtagacgcgcacgcggccgtcgacgtcatcggacttggtggtcatcatctcgtgcagcgtgtaggcggcaccgtaggcctcaagggcccacacctccatctcgccgaagcgctggccaccgaactgggccttaccaccgagcggctgctgggtgatcatggagtacgggccggtggagcgggcgtgaatcttgtcgtcgaccaggtggtgcagcttcagcatgtacatgtagccaacggaaatcggcttggtgtacggctcaccggtacgaccatcgaacagggtggccttgccgtcggggccgaccagacggtcgccgtcgcggttcggcaacgtagtggacagcagacccttcaggacctcaggcttgacaccgtcgaacaccggggtggcgaccggggtgttcggctcggccttctcggcaccggacggaatcagcttcttccactcggcttccatgttcgggtcaagggagatgtcccaaccggagtgggcaatccagccgaggtgcagttcgagcacctgaccgaggttcattcgggaaggcacacccagcgggttcaacatgatgtcgaccggagtaccgtcggcaaggaacggcatatcctcttccggcagaatgcgggagatgcagcccttgttgccgtggcggccggagagcttgtcgcccaccgtgatcttacggtgctgggcgatgtagacgcggatcatctggttgacgccgttgggcagctcgtcgccgtcctcctcggcatcctcgcgggtgatctccttgacgccgatgacggtaccggtctcgccgtggggcacgcgcagggaggtgtcgcgcacctcgcgggacttctcgccgaagatggcgcgcagcaggcgctcctccggggtcagctcggtctcgcccttcggggtgaccttaccgaccaggatgtcgccggcctcgacctcggcgccgatgcggatgatgccgcgctcgtcgaggttggccacggcgtcctcgccgacgttcggcaggtcgcgggtgatctcttcggcgcccagcttggtttcgcgggcgtcgatctcgtactcctcgatgtggatggaggagagggtgtcgtcctgcacgaggcgctgggagatgatcacagcatcctcgtagttgtagccgttccacggcatgaaggcgatgagcaggttcttgcccagggccagatcgcccttctggatggcaggaccatcggccagcaccgagccggcctccacacgctcgccatcatggatgatcgggcgctggttgtagcaggtggtctggttggagcgctggaacttggccagcttgtaggagctggtggtgccgtcgtcgttcatcacgcgaatcaggtcggcggacacgtaggtgaccacaccgtccttctcggacttgatgacgtcgccggaatcgttggcggcgcgccattcggagccggtgcccaccagtgggcgctcggattcgatcagcggcactgcctgacgctgcatgttggtgcccatcagtgcacggtggccctcatcatgctccaggaacgggatcagggaggcaccgagggagaccatctgacgcggggagacatccatgtaatccacggagctcaccggcacatcgaccgcctcttcctcgccaactcgggcaagggcggacttggagacgaagttgccgttctcgtcaagttcctggttggcctgggcgatgacgtggtcgagatcgcggtcagcggtcatgtactcgacctcgtcggtcacatggccgttgacgaccttgcggtacggggtctcgatgaagccgaacgggttgacgcggccgaaggtcgccagggagccgatcagaccgatgttcgggccttcaggagactcgatcgggcacatacggccgaagtgggacgggtgcacgtcgcgcacttccatggaggcgcggtcgcgggacagaccgccggggcccagtgcggaaagacgacgcttgttcgtcacaccggacagtgggttgttctgatccatgaactgggagagctgggaagtgccgaagaactccttgatggtggcgttcaccgggcggatgttgatcagggactgcggggtgatggcctcggcgtcctgagtggtcatacgctcgcgcaccacgcgctccatacggctcagaccggtacgcagctggttctggatcagctcgccgacctgacggatgcgacggttgccgaagtggtcgatatcgtcgacgtccacgcgcaggtcaacgtcttcgccgttgcgcttgcccgggaaggtcgccgcaccgtcgtgcagggccaccagatacttgatcgtggcgatgatgtcttcctggtggagggaacggtcgttgaaatcggcctcgacacccagcttgcggttgatcttgtagcggccgacgcgggccagatcgtagcgcttggtgttgaagtagaaggagtccagcaggttcttgccggcctcgggggtcggggtgtcggccggacgaatcttgcggtagaggtcgacgagggcctcgtcctgggtctcgagggtttccttctccagggcgtcgagcaccagcgggtagtccttgaaggcctgggcgatctcggacttggtcatgccgatggccatgaggaacacgatggcggactgcttgcgcttgcggtccacgcgcacctgcggctggtccttcttgtcgatctcgaactcgagccatgcaccgcggctcgggatgatcttcgcgccgaagacttccttatcggaggtgcggtcctgctggcggtcgaagtagacgcccggggaacgcacgagctgggagacgatgactcgctcggtaccgccgatgatgaaggtgccgtgcggggtctgcagcgggaagtcgcccatgaacacggtctgggacttgatctcgccggtgtcgccgttctcgaattcggcgttcacgtacagcggagcggagtaggtgtaatccttctccttgcactcctgcacggtgtggcgcggctcctcgaagtacgggtccgagaaggtcagggacatggtctgtgcaaagttctcgatcggggagatctcgttgaagacctcatcgagaccggaggtgtgggccacggtgttggtgccgttagcctcatcctcctcgacgcgcttcttccagcggtcggaaccgatcagccaatcgaagctgtcggtctgcacgcccagcaggtagggcacatcgatgggttccttgatggaaccgaagttcacgcgatccgacgccttgtgcagatcaatgtcatgctggtcggcgcgtgcgatgatggtggtggtgttcgtcgtagactcagtagccaatggacgttccttatcgctcgctaatatgtggtaattcccctgggagcgccggcatggccaccatatgcctatgcggacgcttcattgtcgacggcatgcccgcaatatgacacacctcatgcaaagtcaaaagaatactgatatgcgaggacatttttagctcccgctgacgagggagctgtcgagcggagcgagactgagggagagacccagcgtccaaacaccaaccgcaggtcctaccccaccgtaaacgtcaccggatcgctcttcaccttcggatgatccttcaaactcagctgcgccacgtacgttcccgcattgaccttggcccaatccgactcatccgtgcattcggtgagcgtggcgttcgcatcggtattccacgtgaccttctgaacgtccttatcacccttggacatcagcagcagacgtgaatccgccggacacacatcggacttgtaaatcgtttcctgaccggaagtaatggtgagcacacggccggaatcggccccgtccaccaaacagttgcctgacccctcgtgcacgatggtcgcggtgaaatcaagcgatcctcctaccggcacggattgggaggccgcggaaagctgcaatgtcacatcactggccgagcaatccttgacgttgctgactttcttcggagccggcgtggcgtcgcgggaaatcgcatacacctcgtcatggtgaatcatcgtgttcacggcaccgataccccggccaaggctgtacacgcagaatacaatcagcgcgattatcagcagcaacaccgtgccggccacgatacgccgacgacgatagatggcctgctgctttttgctgatcctgcgcttgcgcggcttgccggaacggtcgtttcgggcgggcccgccggatggcccattgtccccggtgccggctccgcgtaccgttctcgcgcctgatgtgttcctctgcactgccataacccttccagtctacggtcaccacacccatacacgcttggggagcccgccattttcacaatgtcagctgggtaatcgcaggccgccgtccagaatctcgatcaggccgtcatcgtcaaggctggcgatgcaggcggcaagctgaatctggtccttccaaagcttgtcggcatcttccctgggcaacgtgactccagcgggaagctcgcgcagcgcggcgagcaccagaccgcgcacctgtcgatccgtgccttggaatcgttggcgtgggcgggtgcgacgctcccccagtccggggcggccggccttgaggaacgcgcaatcgtcggcaatcgggcaaatctcgcataacggcgatttggccgtgcagatcaccgcccccagttccattaccgactggttccatgtgaccgatgggcgttcgccacgatgcagtcgggagcgtttgccgccacggatagtgctgttcacggtatgttcggcgctaccggcattatcggcgacgtcagcatcgcgcccgagaatctcgtctttgggcagcatgcggttcgccagcgcgcgttcggccgggctggccgctcccccgcgcgattcgacgccaaggaacacacggctcagcacgcggcggatgttggtatcgatcacggcgattcgttcgccgaacgcaaagctcagcaccgcggaggcggtgtaatcgccgatgccgggcaatgcagtgagttcgtcatacgtacgcggcagtttgtcggcgtactgctcggccaccacgcgggcacattcctgcaagcgcaatgcacggcgtggatagccgagccgaccccatgcggtgatcacctcggccttgggggcctcggcgagtgagcgggcgtcgggccagcgtgccatccaatcgttccaatacggcaccacacgactcatctgcgtctgctggctcatcacctcactgaccagcacgccccacggcgtggcccgtccgaagcgccatggcaagtcacgcgcattggcctcccac

SEQ ID NO: 1983 - DNA, 3939 bp, Unknown
  R17_18m  MAG No. k141_23323
accgcaacatcgctcgattacatgccagccatagacgtactgcgcgcccacggtctcactatttgccggtgagtccgagaagtcaatcggtggttcatacggcagtggttcatacggcacataccgcacggaactgctatgcacgaaccaccgtgtccgaacaacgagaacgcactacttctccagcttctccaacttttccagtgcctttaatagcgaatcgacatgtcctttggcacgcacgttgtagcgcgcaatcgccacggagccatcggaattgatgacgagcgtcgaacggatcacacctacgtgcaccttgccgtagagcttcttttcgccgtatgcgccgtacagcttgtgcacggtcaggtcgggatcagacagcaacgggaatgtgagatgatcacgctcggcaaacttgcgcagcttgtcaagtgaatccttggagacaccgagcactgtgacattcttcgacgccaatcgggcgagattgtcgcggaaatcgcaggcctcggtggtgcatccgggcgtcatcgcggccgggtagaagtacagtacaaccctgcggccggcatcaagcacgtcagacaggttgattgatccgctctctgtaaacccaggtataaccgccggcagagtgaaatcgggcgccgcgctcccctcttgcagacgttccggcattgaatcagagctatcaacagtagtggtcatgattcccatcatagaacccttatcaacagcgctagtaaagttattcagaggtcagtcacacaactgcggatcggcaaaacggcgattctgcaacaccggcaatgttcgacgcgcggaatcaagacactcacgactcagctcagcagtaatgagatcagcttccctatcgcccgccgccgcatcacgcgcgaatccgtcgatgatctccagattccgttccggctcctccgccaccgtaaattgcgcaaccgcgacggacagatgaccactatcttcgcatgatgaacaaaccattttgaattcacaattctctatgctcggcacagcatacgttgtgccacatcgatataaatattgcaatcgaaaatgacacatacggcggagctcatcagctctccagaagttgcttcaaataagctgaatcatgcacccgcactggtcgagtatcctcatcaaagcctccattggtgtctacctgctgcttgatgaaatcaaaaacctgctgaggagtgacacgaatgctgacttccatctgttctttcattatcgtcggcataagatcgttccctccttccccgttcagtatatattcaacttatttctcactactacagcacgaaaggatccttcgtctgagagcaaacgacatagcctcacaccagttccaacgtcttgaaggcgttggccaggccgttctggtgaatgtcggtggtggtgaagtcacagaaggcttggatgccgtgaatggcgttgcccatggctacggatgtgccggcggctttgagcatggcggtgtcgttgtcggagtcgccgatggtgatggtgtcggcaatggcatagcccagcaaagaagccacgtcgcgcacagcggtacctttgtcgatgccattaatcagcaactcgccattgttcggggaaatcttgtcatacgaaccatgcacgagctcaaaccatgggctcaaatcatgttgggtctcctcgaaagtcacgtcaggattcggcgaggtgaagtatgaccccttgctcacacgaatcgtctgtcccaaagtcgagccagccggcacctccacctcatccaacaggtgccagaatcgcgcgaattcgccacgattccaggtcttgcctttcgattccagatgttgacggtagccttccgagatgtacatgccatccgcaccttgccattggtagctctcgatatgatgcttggcaaaatacgccatcgccgcatcgaccgcttcaggagggacgagatgctggaacagcagcctgtctccgatattcgcctgagcgcccgccacggaaaccacgccatcgaaaccgaggtcgaggatgctgcgttcgattttcggcacggaacgcccggtgcagatgaagagcttgtggccgttggcctgggcttgtttgcaagcgattctggcagattcgggtacgacgtggttttcgtcggctagggtgccgtcgatatcgatgaatacgagtttgctattggttgtcatggttgccttcgtaactggttggacctcccccagtcagcttacgctgacagcccctccagagggggcgaagaaaatcccgcctaaaaacctacaagcatcacacggcgtaggcggcccagcgaccgtgggtgtgctggacttcgatgggcataccgaacaattccgacaagcgttcgtcggtcaggccattctccaacgaaccggtgtagacgatggtgccagcaccgggattacccattgaatccacgcccgcttcggtggcgtcctcagcgggaatcggcttgcgtcccataatggcgatgtggtcgaaaccggccggaatctcctccaagcgatgggtgaccagcaccacggcacgctcggagttctcttcgccgattcggctcagcgtgcgcatcacctgctcgcggccgcccaggtcaaggccggtggtcggctcatccatgatcagcagctcaggatcgcccatcagcgcacgggcgatcaatacgcgggtgcgttcgccttcggacagtcgccacatctccttgccttccagataggagacgcgaaaatcgcgcagcagctggcgggcgcgggcgtattcctcttgcgtgtaggtgtcgcgccagcgcccggtcacggcggacaggccggtgaccacggcgtccagcgggtcctcgaactcggggaactgccggcccaggtcggccgaggcgagaccgatgcgggtgcgcagtttgaatacgtcgtatttgccgagttgatggccgaggatgaatacgcggccttccgaggggaacgtgcgggtggccagcatgtcgaccgcggtggatttgccgatgccgttcggaccgaacagcacccaacgctcccccgcgttgatggtgaggttcacgtcggtgatgatgacacgacggttacgccggaattcgacgttgtcgagttggaggacggtgtttgtcatgagtgaaatactaactatgattcgcggtctgagaactcccctcagtcacctgcgccagactgaggggagcactcgttgcagcgctacttacttcttctgctcgtcgagcacggactggtagacttccacggtcttgtcggcgatggtctcccagctgaacacgtcgcgggcgcgttcgtagccggcctgacccatcttcttggcgagctcggggtcggccatgatcttgtcgatggcggcggccatgtcgtgcacgaacttgtccggatcggtgggggtgccggtgccgtcgtgcagctggtcgatcggtaccagatagccggtctccccatcaaccacaacttccggaatgccgccggtggcggaggcgacgaccggcagaccgcaggccatggcctcaaggttcacgatgcccagcggctcgtagatgctcgggcagatgaaggcgtcgcagccgtgctccagcgcgttgagctcgggcttcgggagcatttcctcgatccacacgatgttgccgcgctcctcgtccagcttggcgaacgcgttcttgacttcctcggcaatctccggggtgtcgggcgcaccggcgcacagcaccacctgaatatccttggaaatcaggtgcaaagccttgagcaggtatggcaggcccttctggcgggtgatacggcccacgaacagcagggtgggcttcgaacggtcgatgtggtaacgctcgaacaccttccaacccggatcgtctggtgccggggtagcgaagtcggccatggtgatgccgttgta

SEQ ID NO: 1984 - DNA, 13223 bp, Unknown
  R17_18m  MAG No. k141_23445
cgaacaccggtgactggggctggcgctgggcgctggccatcggcgcgctgccactgctctacgcgattgtcacccgtgtacacatcccagaatccgtgcgattcctcgaagccaagggtcgcgaagacgaagccgaaaaggccgtgcgctatttcgaggaagccgggggagtgcagccggttgcttctcccaagggcaagccgctaccgaagatcaagacgcgcgaactgttcggctccaagtacctggcccgcaccatcgccatctgggctacgtggttctttgtgaacttctcctactatggcgcgttcacatggatgccgtcgctgctcgccgaccagttcggctccctgaccaagtcattcggctacacgctcgccatctccatcgcccagctgcccggttacttcctggccgcatggctcgtggaggtctggggccgccgcaagacgctgagcatcttcctggccgtctccgccgtggccgccttcgcgttctcgcaggccggatcagcggccctcgtgctcgtgttcggcatgctgctgtccgcctccaacctcggtgcgtggggcgtgttgtacgccgtgaccccggaaatctacccgacccgactgcgtggcgcggccgccggtgccgccgccgcggtgggccgcatcgccgccatcatcgcgccgctcctcatgccgtggttcctgaccctgtccggcggcaacaaggccgtggccttcatcatcttcgccgccgccttcatcctcgcctgcatagcagccctctgcttgcccgagcgcaaaggcctcaatctcgaagactgattacacttcagccttcgctactaaagtggcccacaccaatgtgtgggccactttttgtcttatagctcccgaatgacacggcaagggttgccgtatgtcactgatcaatcgagggaacgacgggtgagattgcgcggtggttttgtgaccagccacgccaccagcagtccggttgccactacgccgaatgccagcgccgcctgcaatccccagatcggcacggtttccagccaatgaccgtccacaccgatcctgcggttccatgccacatgcagccatcccaacgccacgccggataccacgcccactggcgcgccggccagcagaatcaccgcagcctgcgtcaggccgtaacgtctgaggaatcggggtggcgcgcccacggcgaccatcgtggccatgtcgcgctgggcctgcgtgcgggccagcagcagtgaaacgagcgtggccatcagtgccagcaatgccaacaggccaatgggcaccaatgccatattgtcaccccacggcaggcgattcccgtcagtgctcgtggatgccagcggcagattttcgattgcataagctgaggccttctttacggtaacgggggagttgccaccggcgaagtctagatactcacccagatactgcaattgtttgatgccgagcgcctgtgctgttgccgggctcatcaccagcgggtacgcgccgcgcacgtagatggccttgcgcttctcgatatgtgtggcctgagattcgtttgcaattgccggattcggcgaaatggccacacgcaccatacctcccgcgtcgattgtgccggcatcgccgaccaccacaccgcccgcatcaagcacctgtgccgcctcatccgcgttcgggaagccggacaaacgcatcgcattgccatccataatgagattcacgccgcggaaactcggcagtatattcgaatacgttggctgatgggaccggtctatcggcacacaacgtatcggaacgtttggatacagggccgaagcggcatcctggcccacccatgtggacgtgtccggttgctcttggatcgttgggttatcacaagtgtgaccggccgggagcaatgcagcggcatacatgtagccgtgttcggcgttcaacttgtcggaatcgacttcggtcgtatcattgagctttgaccatcgcttgacatcctcggtgtacaccgggtaatgagcgcgtatcggtgtctctttgccaagccggcgtatcgcatccgacaccacagcacggtcgaactcattgctgacatgcacgtcggccccaatggccatccccgacggtccatacgtcatcgtcatcgtggaatttcgctggtccgccaccatggagccggtgattaccagtgtgtacgaggcgatgcacatggtaatcagcaccgcgcatgccgccggaacgaaccgtcgatgatgctcggctgcatccctgagtgccaggcgtgcgccgatgttcagttgggaacccgctttgccgcaccaccgtgcaaaagtgcgaatcgacaacgcaagccctatgacagccaacaaaatcgtggcaacaagcagagccatatgcgtttcggttccggccggaaccgcgcccggattgtgatcggccagcgtgggtaatggcaatgtcagactgagcgcggcgcatacgatggagaccaagaccagaatcggaccaaccgcaacacggagcagtctcaaaggattacggcgaagcttcgtatccacgccattcgcggattcaccgtagccgatttcctctcttgtcgggcaatccttcaacgcatcgactggatgcatacgcgccacatgccgagccggcgcaatcgtcgcggcaaatccaatgatgattgccgtgacaatacccatcggcagcgagccccacgagaatccgtgcaggatctccagcggcgtggatccacgcaatgcgcctatcgcagggccggccgccaaggtaagcgcgaatcccaatgccgagcccagcacgccaccgatggcgccgataacgagaccttgcgaggaaatgattcgactgaggtcacgtggtgcagcaccggatgcggccgcgagcccaagcacacgacgtgactgatctgccgacaccgtaaacgcgggcgtgaccagaaacagtaccagcaacatacccaccagcatggtgatgaccacagtgaccatgtggttcaacatggtagccgcatcgatctgcatcgggtagagctgcgatgcgggcggatagccgtcagtcagcacatggcgggaaatgacgatggcctgcaacaggttcatgctgcgggtgtgcgcccacgtgaccggctctggaccgaccaccaaataatggccatccacgccgacgccatcagattccaatatggctgacatccagccttccaagccccatgccgcggcttcggattcatcggtcagcccgctgactgtccaagcacgctgagtgtcggccaccgcctcgccgatgcgcccgtccaggctcatccagccatcgaacggcggagcgacgaacgtcaccgtgctaccgagagaagcgccgagattatccgccaatgtgcggctgatgacaatctgcgtattattctgcggcgccgaacccttgaccagcttcggcaacattcgttgcaatgcctcaggtgaagcctcggtcatggtcgcggtggaggccgcgttcagatcaatgtcgttcccgcttttcacgtcgatcccagccttggtctgttcgccgggttgcaacgcggtgccggtgatggcgatgagttcgggcgactgccaatacgggagcagccgatcctgttgcggcagaatcttcgcaagctcggcggccgaggccggctgctgggagggatcgtcctgccacgtgccgccgctttcgggtgactgccggaacggttggccggtgcggggcctggcggtggcggtgatgaccgcctgcgtatcagccgggattgtcgccagcgcacgcgatctggtgggcggtatggtggtggtcataccgatggaggccaccattgcggcgattggcagcattaccagcagcaaggacagtagggtgcgggccttgtgccgtagtgcgtcgcgccagccgagtcgcagcgcggcccgataccggttgcaacgtgcgccaaggcttggcctagcggcatggggaatttgggcagagcgaccgacggtggcattggcaagattattgagggctgcgcgtgccatcatgctcccctttcctcaaggttgagcaaatcatccatattgctggagccggtttcatcgatgatacggccgtccttcaaaaacaccgtgcggtcggcccaggcggcgaagcgaggctcatgagtgaccagcagtacggccgcgccgcgatctgcgcgggtgcgcaacacttcgagaatcgtcatgccggcattggaatccagagctccggtcggctcgtcggccagtagtagacggcgtgggccgaccagtgcgcgggcaatcgccacacgttgcgcctggccgccggacatgtcttcaggtcggcgatcagccatatcggctactcccacttcattgagggattgcatcgcggcctcacgtgccttgcggggattccagccatccaattccaaggggaacgacacgttctcggctgcgctcagggaaggcagcagattgaaatcctgaaacacgtagcctatcgatttgcggcggatggccgcgcgttcggccactgacagtgtggccagatcgcggccttcgaccagcacgtgcccctgcgtgggcacatcgagcccgcccgcaagattgagcaaagtggatttgccggaaccactggggcccatgatggccacgaattcacccgggcgaagcgtgagattggcgtgactgagcgcggtgacacgacgtgcatctttgccgtgaacgcgagtgacgtcgtgtaattccagcgcgcatggggaagattgcgggagagaagaaagaacgggagaagtcatgatgtgctcctatgcactattgaatggtggcggtgagtgcggctgagcttgccgtgagaggtgccgaaacggggtgctgcgccagttgtgctcgcagctgggtctcatccacggtatcgagccagcgcaattccgcttcagtgatgaaaatatggtggtcgagtactagacgtgtggcgagttcggtgggcggtgtttgccggcgcagtcgggtgatgtcgtgcagcagttgctgcaaagcgtggcgttggtgttggatgagttcggaaacatcgaggccgggtatttccacggcgacggccagcttcatcaccagttcgtcgcgtccgcgttgttccggggtaatgggggagcgccaccatcggtcaagctcttgggcgccggaattggtcaatcgccataatggtgcggccgctgcggtgccgacatcattggatccgctagtagtcggcgcggtctcttcaatcagtccgtcgcggttcaaccgctgcagcgtagtggaaacttgccccatattgagcggccaagtcagaccgatggtgcggtcgaagtccttcttaagctgataggcgctggccgggcctcgctccaacagtgctaatagcgcttctctgattgccataccgcatcccctttgcatagacggtttgccttgggcgaaggttactgagtaactatcgttggatatcaggttactcagtaactacccatgacggtgctgtactcagggatgattcaggggagattcaggggatacacttggcgcccctcagttgcccacggcgacagctcccctcagggaggggagtcgagagtgtggaatacaacaagtctcgcaagccagatgacatgtgactaattctcagaaagccgggcccgttgtgtgtcaaggtgtgccagtaacatcgtgacggtttgtgtgtaggtacaggttgatatccaagagcaagtactcgagaacgcaagtaccgaacgattacgcaagaaaatcagtattaagagaggtttcgatggcggttcgtggagatatccgtaatgtggcgattgtggctcacgtcgatcacggcaagaccaccctggtcaatgccatgcttcagcagtcgcacgtgttttccgagcgtgaggaagtgccggatcgtgtgatggattccaacgatctggaacgcgagaagggtatcaccatcctcgccaagaacacggccgtggaatacaccggtccgctggccgccaagtacggccacccggagggcatcaccctcaacatcatcgatacccccggccacgccgacttcggcggcgaggtcgagcgcggcatctccatggtcgacggcgtcgtgctgctcgtggacgcctccgaaggcccgctgccgcagacccgattcgtgctgcgcaaggccctggaggccaagctgccggtcatcctgtgcgtgaacaaggtcgaccgccccgacgcccgtatcgaagaggtcgtcggcgaaacctccgacctgctgctcggcctggccgacgacgtgcagcacgagggcatcgacctgaacctcgaccagctgctggagatgccggtcatctactgcgccgccaaggccggctacgcctccgtgaaccagcccgccgacggtggcctgccggacaacgacaacctcgagccgctgttcgaggccatcatctccaccatcccggcccccgaatacgaggaaggcgccccgctgcaggctcacgtggccaacatcgactcctccgacttcctcggccgactcggtttggtccgtatctacaacggcacccttgagaagggcaagacctacggcctgtcccgtgtggacggctccctcgagaacttccgcgtctccgaactgctgcgcacgcagggcctcgagcgcaccccggtcgagtccgcgggccccggcgacatcgtggccgtcgccggcgtcaacgacatcatgatcggcgagaccatcgtcgaccccaacgacccgaagccgctgccgctcatccacgtggacgatccggccatctccatgaccttcggcaccaacgactccccgctggccggcaccgagggcaaggaccacaagctcaccgcccgcatgatcaaggaccgtctggaccgcgagctcatcggcaacgtctccatcaaggtgctgcccaccgaccgccccgacgcttgggaggtccagggccgtggcgagctggcgctggccgtgctcgccgagcagatgcgccgcgaaggctacgagctgaccgtcggccgcccgcaggtggtcaccaagaagatcgacggtgtggtcaacgagccgatggaaaacaccaccatcgacgtgccggaagagtacatgggtaccgtcacccagctcatggccgaccgtaagggccgtatggacggcatgaccaaccacggctccggttgggtccgcctgcagttcaccgtgccgtcccgtggtctgatcggcttccgcactgctctgctgtccgccactcgcggcaccggcatttcctcctccatctccgctggctatgctccgtgggctggtgccatcaccattcgtcagaacggttccatggtttccgatcgtcagggtgtggccactccgtatgccatgcagcgtctgcaggcccgtggcaacttcttcgtcgaaccgcagtccccggtgtacgagggtcaggtcgtgggcgtgaacaacaagcccgacgagctggatgtgaacatcacgctggccaagcacatgaccaacatgcgttcctccaccgctgacgtgctcgaaaccctgaccccgccgatcaagatgagccttgaggagtccctggacttcgccaacgaggacgagtgcgtggaagtcaccccggagtccatccgcgtgcgcaagatcatcctcggccgtgaggactggtacaagtggcgcgccaagcagcgccgccagaacgccgcccagcagggtaagtgatctggtgcgactgtagccgaccattctctctggctcccctctctgaggggagccaagtttattcctcgccaagtcatatccccacctatactgaaacgcatgactgtgaagagcactactgaactgcgtccgtggtcgtatcgccagaacgcgctggtcaaatcgttgatcacgattgcggcgggcgtggcttccgcctttgtgggcacgttcgcccaccgtatgggtgcagaactgagtattccgtatggtctggtgctggcatttctgctgatcggcctatcgacatggtgcgcccgttcgcgcatgggcgcggtcggactggccctgcacctcatcgcctcctcgctgaccgcatggggcatggcactgaccaccacatccggcaaggcggtcatcgtcgccggattccaaggcgacatgccgttcttctcccagcatgccggctacatctggctgtacggcctgatactggtccaagtcgtcctgctcattcttcccgcccgctggttcgttattcccactcattctgaatcgcgcgcgtaactatatatggcggcacatttccgggaatgcgtcgcgtatcggcgggcgtaggggattacggccgctaccatagaaccttatggcacgcatgaaactgttttacttgggcccggaaggcaccttcacccatcaggcggcaatgacggccgccgaccagttcgccacactcggcgacttcgacctcaccgccctgcccgacgtgcccgcgatcatgcaggccgtacagtcgcgccaaggctggggcgtcatcgcatgggaaaacaacgtcgaaggctatgtggtcccgaatctcgatgcgctgatcgacgcccccgacgcggccggcttcgcccggatcagtgtggacgtggccttcaacgccttcaccgtgcgcggccacagcatctgcgactgcaccggcaaccccgtcagcgcccacccgcacggcctggcccaatgcacccggttcatcaccgaacaccatttgcagcccgaacccgcatcctccaacgccgccgcctgccgcgacctgaagcccggccgcgtggcgctcggccccagcatctgcggcgaactctacgatctcgacaccctcgccgaacatgtgcaggatttcgatggcgcgcacaccgaattccttgtcatcgccccgcgtgatgtggtccaggaattcaacgcccgcgcccaccgcaatgacgccggcgacttcgaaaccatcatcaccttcatcccgctggtcaccggccccggcgtgctcgccgacctgctggacgtcctgcgtgatgcggggctgaacatgaccagcttcatctcgcgcccgatcaaaggccacgacggaacctacagcttcatcgccacccttgacgccgccccctgggagccaagattccgcaccgcactggaagagatcgccggacacggcgactgggcaaaaaccttggccgtctacccacgccgcgaacgcccgaacccgccggtcgacgcctggatgctgcccgagggcggcgtccacatcaccaatcgcgcgtcggaaggctggcagtacgccgagggagcaaggaaggaactgctgtggtagacacagtcggaatcgtcggactcggattgattggcggctcgctcgcacgccgcctgaccgagcgcggcgtacgcgtcatcgcgtggaaccatcgctcgcacccctacgcccaggccgaagccgatggcattttctgcaagagcacgctctccgaactcatggatgccgagccggatgtggtcgtgctgtgcaatccgctcaaggcgatgccctcaatcctcgccgccctagccccgcttatgggcgaccatccgaacaccacgctcaccgacgtgggctcagtcaagggcatggtccgcgatcaggtcaaggctgccgcgctggggaagtgctacgtcggcgcccatccgatggccggcaacgaactgtccggctggcaggccgccgacccgcatctgtacgacggtgccctatgggccatcaccgtggacgagtccacggactaccgccgcttcctcgacgtcgccgcgatgatcaccaaggacgtcggcaaccgcgtcatcgtcgtggacgacgagacgcatgacaaggccgcggcgatgatctcccacatgccgcatgtggtgtccaccgcgctgatcaacgaactggtcgccaacccggaccgcaacatcgccgccgcgctggctgccggctgctggagggacatgacccgcgtgtccctgaccgacccggaccgcacgcgcgcgatggtcgaggaagactcgctgaacgtcgaagtgctgctgcgccgcatggcggcacgtctgaccgatatggccgaccaactgcacgctggtgccgacggcgagcaggatgtgatgggattcttcgccgaaggcgaccccttccgccggtacaaggccgccgtgacgcgagccggcatcaccgctgcacaagctggtacggccaccgcgcagcaagccggcacaactgccgccggattcccggaacgcgagctcgccgtccccgaagccggctggcagcagaccttgctgttctccgcacgccggggagaagccatcaccggtttcatccatccgcgtcaggccatcgtccaactgcgccccgccatgtaactgcgccccgccatgcagcccgtgtgcaggttcccctcgccgcctgtcacgaagaaggctgcgcgagggggatgaagttcccgcttgttttcgtgagaagaccgtgtggctccgctgttcgaaagacccaaaggagtaaggtagtctgtaccgtttttcgggaaacgcatcgaagtgaatgcggcggatggttaaggggatgatgacgtatgacgttaccaaggcagattccggccggtgcccgcgtggtggtgcgcatcaccgacggcattgacccggtcgaccaccgtatgaagttccgcgactatgtggggcatgtggtttcctgggatggatacacgttggagatggtgcgtgacgccgccgccaatggttcgcgcccggcccagaacgtgaccatccatcaggaacagattgccacattgaaacccgtgccggagcggcgcaacacgccaccccggccgtaagccaaggccataaagaattcggaggagaacgagagtgtcatctacgcagttcgacggcgatatcgactccttcgtctcctatctgaagtccaaccgcggcctgtcagcgaatacgctcaaagcgtatcgcgcggatctcacggcatgcctgcacctgttcgagctgcgcggcgtgaccgatctgaacgagatcacgctggatgatctgcgtagctggatggcggtggaatcgcgcgatcacgcccgcagcagcatggcccgcaaaaccgtggccgtgcgcgggttcttcgcgtgggcctatgagcatgggctgaccaccaccgacccggccgccacactgatgactccctcgattcccagcacgctgcccgcggtgctcaccgaatcccaggccgagcaattattggatgtcgctgaacatgccgttgcaacaaaccagtacaaggacgatgggggagcggcagccgcgtccggcagcggcagcggcaagacagctgataagtcggccgataccgtaaaccgcagtgaggcacccgcccgtgcagacaagcgcgacaacgcccgagtcaccgccgaatcgcagcgcaacgccgcgattctcgaactgctgtatgccaccggcatccgtgtcgccgaactggtgtcgatggatatcgccgacatcgacttctccaatcgcaccatcaaagtcaccggcaaaggcaacaagcaacgcgtggtgccgttcggactacccgcccagcgtgcgctggagacttggctggaacaggggcggccggtactggcccgtacggcaacggatgcagtcaagtcccgtgctgccaacgccctgttcctcggcgcacgaggcggccgtatcgaccaacgcatagcccgtgacatcgtgcacagagcggcccgagaggccggcgtgccggacatcagcccccatgcgttgcgtcattccgccgccacgcacatactggacggcggtgccgatttgagggaggtgcaggagatgctcgggcattcctccttgaaaactacacaacgctatacgcacgtctccatcgagcagctcaagaaccgttacggacaggcctttccgcgggcatgaccactatgtggacattggttaacaaactcagcaaagactgaacctagccggcaagaacccctgaattttacatgggtgtaacaaaaaatacactgcttgtctcccaagtgcgcaaaaatgacaggtaatcagcaacgggggtggattgttcgagacatcgtgagatgcaagtctcacggtgacggggaatccagccccgtttgcatgaggcggggctgagacgtcctgcaacctaatgaataggagaaatcatatgaagaagaaagctcttgctttcgctgccatggcttgctccgtggccatgctgctgagcgcctgcggcggctccaacagcaacgctgcctccggtaacaccgctggctccaacatcatcactgcgtacaactccgaaccgcagaacccgctgatcccgggcaacaccaacgaaaccggcggcggcaagccggtcgacctgctgttctcccgtctggtctccttcgacaaggacggcaaggcttccaacgaagtggccgagtccatcaccccgaacgatgacgccacccagtacaccatcaagatcaagtctggctggaagttcaccgacggcactccggtgaccgctgagtccttcaccaaggcctggtcctacgtggccaacgccaagaacgcccagaagtgctcctctccaccatcgccggctatgacgatctgcagaaggatggcctcaagggtgacgagcagctctccggcctcaaggtcgtggacgacaccaccttcaccgtcgacctgagccagtccgactccgtgttcccgattaaggtcggctactcggccttcgccccgctgcccgagtccttctacaaggatccgaaggccttcggcgaggctcctgtgggcaacggcccgtacaagttctccaagtgggaccacaacaaggaaatcgccctcgtcaagaaccctgactacaagggcaacgaggacgtcaagaacgacggcgtgaccttcaaggtctacaccgacgactccgccgcctaccgtgacattcaggccggcaacctcgacgtgatggaatccgtcccggctgccttcaccaagaccttcaagaccgacaagaaggtccaggcttactccgaggccggctccgtcatccagaccttcaccatcccgtcctcccttgaccacttcaagaacgacgaggaaggccagctgcgtcgtcaggccatctccatggccatcaaccgtgaccagctcatcgacaaggtgctcaacggcaacgccacc

SEQ ID NO: 1985 - DNA, 21059 bp, Unknown
  R17_18m  MAG No. k141_24000
agtggcgcgcaaagagtgtcaggcgcgtcgctcgatgagtgcgcggccggatgcgaggcggtcgagcacaccggttttggcgatggccagcatcagataccaggccatcacgccgctgataagcacgccgccggtgacctcggaaatcatgtgcacgatgccacgcgggctgacgaatgacacacccacgtagcgaaacagcatcagatatgtgccgtattccaaggcgaccaacgcaccggatgcaatggaaatcggcagattgaacatgcggtaacgggtcaaagcgaacggaatctcagcgaaaacaccctgcagcagcgccgagataatcacgaagcccaaatcgaactggctaccaatcaccgtttcgaccagcgtgccgataaggttcacgtacagcgccgctccgggtttgcgcagaatcagcaccgccagcgtaccggagaaataccagacggcgtgcacgatgctggcgaaaccgggcagaatcgcaccaaacaccgaagagatcggcatgtacgcgaagttgaatccccagaagatcacgccgcaggccgcgcccagtgtggcaccgaccgcgatgtccaacggctgccatttcagcgacgatacggcgaccgaacgtttcggaagagtatgaatggtggttgcaggcatggtgatctcctagccttaaaggccgcacacagtaatcgaatcacgggcgttccttgacctgtgcggctcgggcgggaacgccacaccacagtgtagccgctcggttcacggctggaagtacccttggaggttatgaagcttaccgatatttcccccgcaatcgcattgaccccgctcgacggccgttaccacaaggccaccgccccgctcgtcgaatacatgagcgaacctgccctgaaccgcgaacgcatgcgtgtcgaagtcgaatggatgattcttctggccaacggctttgagggcaacggcaaccagccaatcgttgacggcgtcaagccgttcactgccgaagagcaggccttcctgcgcgccattcccgaggacttcggcgccgaaggcatcaagcagcacgccgctcatgaggccatcacccaccacgatgtgaaggccgtggagtactacatcgatgatcagatcgacaaggctccggccgagctggccaacatcaacgacgagctgaagaccctcgtgcacttcgcctgcacgtccgaagacattaacaacctctccatcgcccgttgcgtcaagaacgcgatggaaaacgtgtggaccccggagttcaagcgcatcatcgaccacctcgccggcaaggccgaggaattcaaggatatgccgctgctctccctcacccacggccagccggccacgccgaccacgctcggcaaggagctcgccgtctacgtctaccgtctgaaccgtcaactcaagcacatcgaaaaccaggagtacttgggcaagatcaacggcgcgaccggcacgttcggcgcccacctggccgcatgcccggatgtcgactgggtcgccgtctcccgcgaattcgtcaccaaccgcatgggcctgacctggaacccgctgaccacgcagatcgaaagccacgactggcaggccgagctgtactccaccgtctcccacgccaaccgcatcatgcacaacctgtgtgtggacgtgtggatgtacatctcccgtggagtgttcgcccaggtgccggtcaagggtgccactggttcctccaccatgccgcacaaggtcaacccgattcgtttcgagaacgccgaagccaacttcgaaatcagctgctcgctgctcgacaccctctccgccacgctggtggaatcccgttggcagcgcgatctgaccgattcgaccacccagcgcaacatcggttccgcgctcggctactccttgctcgccctgaccaacctcatgggcggccttgagtccatccacccgaacacccacgtcatcgagcgtgagcttgatgagaactgggaggtgcttggcgagccgatccaaaccgccatgcgcgcctgcgagctcaagggcctgccgggcatggacaagccgtacgagaaggtcaaggagcttatgcgcggccacaccatcaacaaggaacaggtcgagcagttcatcgaccagcagtccttcgacccggaaaccgccgctcgcttgaaggctctgacccccgccacctacaccggtgtggccagccagctcgtcgctttcgaccgctgaaataggtgcgatgcgagtccctcgagcccatcgcatccaccacactactgcgctgagtcacaaaccaaaccgcaaactgaaccgaacaaggacaggcgtcaggtaaccatttcatgactactgaacaggagcagtccactacggaagatcgcccggacaaggcgacctcctccactaccgaccggccgatcgcctctggtgacggccggtcggccagttttgctgtcaacggaccggacagcccggcaaccgacgacagcaacgattccggaccgtacatcgacgacatcgctccgcgccgcacgcgcgacttcggcgatctgacccgggccggtctgtcgctgttgatggccgccgtggtcatggtgttcgccgtgtatctgggcggcatgacgcgcggcgtcgaatccgacgcacacaccgcagcccaggtcatcaactggttggctgacttcccctccaccgtgctgacgcagctggccaccatcgtcatcgtgatcatcgtgctcgctcaattgctactggcccgggaatggctgcaggccgcggtgtccgcgctggccatgttcgccggctacggcatggtgtgggtcgtatcgacggcaatcagcagtctgaacgatttcaccctgccaatggcactagtctcagccgccacctcatacggctccgggctgttgcccgacatctacgccggcatggcgtccttcctgaccgccgccgggccacgccgcacccgctccacggtcaaatggagctggaatatcctgtatgccatcgctgcggtgatggtggtgctgtcgtggcattcggtcaccggcatgctggtgtcgatggccgccggccgcacagtgggcatgctgatccgattcgtggtcggcacgcagaacaagggcgtgtggggccaagatctggtcgccgccctgaaaggcatcggactggacaccgcctcgctgattcggcatcaggagcccggcgtcggccacggttcactggccgtcacgctggacgacgatctggccgaaggctcgcgcatctacgatctggataccacggacaaccgtcgtttcatcgtttccgtcatcgacgcgcagacccataccgtcggctatctgaagcagttgtgggactgggtgcgtttcaccagtgtgtccatccgacgtgaccgttccgtgcgtgacgccgtccagcatcatttcgccatgctgctgggtctgcacaatatcaaactgcccgcgcccgcaccctacggcatcgccgataccgacgaatccgcgattctggtgctggatgcacacaccatcgaactgcccgccaacctgaacacgcttaccaaggcggatgccgtggcctacatgcgctacctgtccgtggcgagccggcgcggctatacgcaccggcgcatcacgccggaaacgctcgcccggcttgaagacggcaccgtcgtgattgccggctggctcaacggcgacaacgcttccggtccggccaacaccgcgctcgacaaagttcagctgctagtgctgttcgccgcgctgatcggcgtggaaccggcggtggaggccgcccgcgaggcgtggggagacacgactctgacggccttggccccgttcattcagaaggtcgcggtcccctcccccacgcgcgcgctggaatcctgggacaagcagctgctcaagggcctgaggagtcgtatcaccgcgctggctgacgaggagacggtggaatccgccgaaccggtgacgctggcccgattctcctggcgttcgatgatcaccatgctgctggtcatcgtggccgtggtcgtggtcttcacccaactgaagcccgaggagatcatcaccgcgctgaccaacgccaacccgttgatggcggtggtgacgctcgcgttcggtgtctgcggctggatcggctcgtcgatttcgctcggttccctgatggcgcggcacaagcgtgacaatatgggcgtcttcatgagccaggtggcaggcggcttcgccaccgtatccatgccagccggcgtgggcccctcgttcgtcaacctgcagttcctgcgcaaatccggctatcgcaacacccaggcgaccgcaattatgagcgccgtgctcgtggtgtattacgccgtgtacttctccatgctggtcatcatcggcctgttcaccggccgcaacatgttctccggcgcaatcccgacaaacacgttggttatcgtgctgggcgttgtggtcgtggtgctgtccattgcgatgatgattccgccgttgcgccactgggtgacccgtcgtcttatgccgctggccaagacgtatatcaaccagctgctggacgtgctttcccagccccgacagctcacagtcagctgcctgggcgcgctgttccagaacgcgaccactgggctcgctttctgggcggccctgcaagcgttcggccattcatcgaatccgattgaaacgacgttcgtcttcctgctggcctatgcattgggttccgcagtgcccactccaggcggtctgggcggtgtggaagcggcgctgacattcgcgttcgtggcggtcggagtgccgcagggcgtggcgctttccgccactttgctgcaccgcgtggtgttctactggctgcgcattccgctgggcgcggcggccatgaagtggcttgacaagcataatcttgtctgattcgtctattttcatacccccttcggggaaatagatgtgaaaacccttataaaacgcgggttttcacagaaacatgcgctagtatcattgatgacaacatggactaagcaaaagtgcttgtcccctgacccaagaaggatgctttatggcatacaacaagtctgacctcgtttcgaagatcgcccagaagtccaacctgaccaaggctcaggccgaggctgctgttaacgccttccaggatgtgttcgtcgaggccatgaagtccggcgaaggcctgaagctcaccggcctgttctccgctgagcgcgtcaagcgcgccgctcgcaccggccgcaacccgcgcactggcgagcagattgacattccggcttcctacggcgttcgtatctccgctggctccctgctgaagaaggccgtcaccgagtgaccttctgctcgtagcgattacttcgagcattactgacgacaaagaccccgaccgagatggtcggggtctttttgttgtggtgctgtgacgtgttgtccaaccgtattattccggactagttcagcgcttccataagctgctcgaatcccagggtgggctcggcctcgaagggatcgaggagtatggcttcccggcgttcgggggcggtcagggtcaggtgggtccagtcggcggagaactgggctccgacgttcagggccgcgtccacgaaccggccacgcagggcggcacgggtgtcggtcggcggattgtgcacggcgtattccacgttgtctcctgtcagcagctcacgcatctggttgcgggctacgagcgaaccgtacaggcgaccgttggcgatgtcgtggtagtcgagctcaagctgttccatctgggcgaaggtgacgtccgggcgacggcgtttgagcgcgtcgaacagacgcttcttggcggcccagtccacgcggtcggcgagcgcatcgtatgcaccacgctccagcgcgtccagaacgcggctccactcccccataatcgtgtcgatcgtggtggccggcagcgaacttgccagcgcatcgccatgggtttcgatgaaggccttgaccgccgcataataccggcgctgcagacccagtgcggacacggattcgcctgattcgagcgtcagttcggcgcgcggattgtcaaggaatcgactgaccgtgcgattggcggcagccggatcagcaaaggcatactgctcgaatccggacggaacgccatggcggaaggcgtcttcgatcgcgcacagcacaaggtgcgtgacggcaagcttcatccatgtggaccattgcgaacggttcgagtcgccgatgatcacatgcagccggcggaaggagtcggggtcggcgtgcggttcgtcgcgcgtgttgaccatcgggcgggagcgggtggtggccgaggagacggcctcgtccaggaagtccgcgcgctgggtgatctggaagccgtccggggtcatgcggccggcaccggtgtacagctggcgggtgatgaggaacggcagcagctggtgttcgatggtctccaacggcacgaagcggcggaccaggtagttttcgtggcagccgaaggcgtggccggcggagtcgacgttgtttttgaacacatggatcgtggcgtgtgcgccgtaggattcgcgcagcttgcgctgggccttcagggctaggttgcgcatcacgtgttcgccggcgaggtcctgggccagggcctcgcgcgggtcgcgcgcttcggcggtggcgtattcggggtgggatccgacgtccagatacagacgtgagccattggccagatacgtgttggtggagcgggaacgggagacgatgggctggaacatggtcatcgccacctggccggcgtccacggggcgttcggcaccggtgaccgccacgccgtattcggtttcgacgccgaaaatacggcagaacccgtccatctcggcggatggtacgggttccgtggcgtgcagggagcgggtgccgctgtcacgcagttggggcatcactcgccgcctttttgcacgaagctgttgacgtattcctcggcgttggtttccaaggcggattcgatgtcgtcgaggatgtcgtccaacacgtcggcttggtcggtggactcggtttgggcggcggcctgcgtggtggcgagggcgtcgtcttcctgggtcgcggcctgctgtgcttgaggttgttcgaattgttgtggcatgttgtcttctttttgggctgtcaaactcccctcagtcagccttcggccgacggctcccctcacccgaggggagccggaggagtcaaaaaattatcgctggttgatggagtcgagccacggatactgctgcaggtaatgctgcagttcgcggatgatgagtccattggaggccactacatcgttatcgtgacgccagtggatgcgttcgccgtcccaacggctcagcgtgccctgtgcctcccagaccactacggtgccggcggcgatgcccgcgatatcccacacgtgcagcatcggctcgaagtaggcgtcataggtgccgtcggccactttgcacaggtcgagcgagacggggcccacgcgcttgatgtcggccgggcgtccggcgagcgaggaggccacgtcgagcgcacgctgcgattcgctggggatgaaggacatgccgtagctcagcacagaaccatccagcgaggaggtcatcgacggcacgaccttgtcgcgcttctcgccgaccgcggttttgtggatgcgcacggcacccgctcccctggcggccaggtaggtcaggccgagggccggggcgtgcacgatgccgatgatcggcttgggctcgttgtccgggccgaattcgaacagggcggcggtcaccgtccattcgctcatgcgacgtacgtagttgatcacaccgtcgatcttgccgatgtaccagtaacgctggccagggcggctttcggcggggcgggtggtccagaagccgtcgaagtgggcgatgtcggcgattctggcgctcatgaagcgcatgatcttgttgtccacttcaagcttgtagcgggggccacggtccgcgttctcggtgctcggctgggcgaggttacgcggattgagttggtcgtggagggcatgctggccggcttcttcgagcaggccggcgactttgagcgcaaggttgcgcaggtcctgtggggtctcttcgcgtgtttcttccatagctaccaagtctatcgttcggcgttgatggccagcgacttcagcagatcgatggcgtgttcggctgaattgagttcggtttcgcagtgcgccttggtgaaggcgagcggatcggagatgtcgagggagaacaggtgatgggcggtagcggccatatggccggcattgccgtagaattcgaccgcctcgccctcgtctgcggcgcgcgggtcgcgaacagtgagtcgggaccagctggcggcggccacctcatcgccgaattgcgccacgagttttgccctgagccaggcgcgggtgtcttccggcggttcggtggtggcgcgtgcgatgtcggcggcgctcaccacccgttcggtgcggggttcgagtttggtgaagatgctgtccgcggggtcgagcgccgcccatttcaggtcgatgaccttcagtcgcggatcattccatccgttggccacgccgggtgcggacgttgtggtgattttgcggcgcagtttttcgagcagctgccatttgagcagccattcgatgcggctggcctcgccggtcatggccagacgttcgtcatcgtcggcggcatggcggatggaggcgcagtcgatgagcgcctgctgccacatcgccataatggatgtggtggatttgtccggccaggcgggttcgccggcggtgtcggtaccttcgaccagtgcggcaacctggtagacggcttggcgcagtttgagctggataagccatgcgttggtttcgccgccgttggccagcggcaagattgcccccagcgtcaggtcgcgggaaacggtgtgtatggcctcgactgggtcagacagttcgagttcgtcgaggaaggcgttcaggtcgaatccggcctcgtccgcatgttcgagcagccacagcagcatgctcgtggtgccgagtttcagtgcctgcggcacctccatgcgattggcgtcgccgacgatgacgtgcagacggcggtatgcatcggtggagtgggattcgtcgcgcgtattgatgatcgggcgttcgaaggtggtttgcaggccgactttggcgtggatgtagtcggcgcgctggctgagctggtagcccgggatctcgctgttctcgccaatccctacgcggccggagccggcgtagatctggcgggtgacgaagtggagggtcatcaggcgtgtgaccaagtcgaatggcaccgcgcgggccatcatatagttctcgtgcgtgccccagcaggagcccttgccatccacattgttgcgatgcagggcaatgggagtgccagtctgtttgcgggcgcgttcggtggcggcctgcatgatgaggtctccggcgtggtcgtatcggaccgcttcgaacgggtcggtggtttccggcgccgagtattcggggtgggcgtggtccacatagacgcggccgccgttgggggcgatcacgttggtgatgttgagctgcggggcgtcggtgagcatgtccgggcgggcggcggcgcgttcgagacgggtgccgcgcgcgtcgttgaccgggtcctcctgccggtagtcccagcggatggatttgctgtggctgtccgcggcgccgttcaccacgtcgaaggacagttgcaccggattgtagcggtccggggtgttcagggataccgcgtattcggtttcggtgcccatcactcgtttaacggtcatgtagtgctccttgagcttgagctattcggcggtgcggatgcggcggatcgggtccatgccgttgatgcgcgaccattgttcggggtccacgtcggccatggaatcgcgggtctcgcggtattcgtcttccacggcggcagcgagcagcggcacggtgagtgccacgtccaagccggtttcgatggattccttgaccgctcgggtcttggcccggtccacgatgttcttgagcatcgcgccggagaccacgtcggccaggaacaacgcatgccactggccgttctcctcctgcacgtcgcatagatggcggcgttcggaggttccgtagatgtcatgcaccagcacggcggacaaggcgtgcgcgtcgacgccatcttccagaggcaggtcgtcggtgaggtaatggtccacgatggcgatggcctgattggttttgggccggccgacgcgaatcttgacgtcgagacgccccggtcgcaacacagccggatcgatcatgtccacgcggttggaggcaccgattaccatcacattgtcgagtgattccacgccgtcgagttcggagaggaactggggcacaatcgtggtctccacatcggaggagacgccggagccgcgggtgcgtagcagcgaatccatctcatcgatgaacacgaccaccggattgccgtccgcggcgcgttcacgggcgcgctggaaaatcaggcgaatcagtcgttcggattcaccgacgtatttgttgagcagttccgggcccttgacggacaggaacacgcccttgacatgggtttcggccggactgattgcgccgtcgccattcgaatcgtaaccaccctcgcatagggcgttcgccacggccttggcaatcatcgtcttgccgttgccgggcggaccgtacagcagcacgccctttggcggcttcaaatcgtagcgctcaaacagcgcacgatgctggaacggcagttggacggcgtccctgatacgaccgatctcactatccaggccgccgatgtcggcgaacgtgacatccggggtctcctccagcaccagatccttgtcgccctcggcgggcagcacttcgatggcgaggcggacggacggatcgacgataatacggtcgccctgattgatgcccgcatacgcgagcgcgccggaacggcgtatgagcacgggattgccggaggcgtcggtaacgatcagtcgaccgtcgtcaagtacctgcttgacactgcgaatctggcccacggtgtcagcatcgcgctgctcgaccagcacgagcttctcgttgagcatcacggtggccccggcggtcaggcgggcggcgttgacgttggaggccacaggcaccaccatgcggcgggtgccggaaatgacttcggccgacgcgtgctggatgccgtcttcatcggtgcgggtggaatcgaccttgaccatggtggcgaaggtgagcggcggctgagcgagctgggcgagctgtgacttcgccttggtcagttccttgccggcgcggctcagcgcttcggcgagcgcatggttcttggccatcaggcgatcgttcagcgcggcgagatcttcggtgtcgctcatgcgggttcttcgcttcccttctatccgggattttcggcaacttatggcagtcggcagaccctattcgttgccgtcggcggatttcctgttacgtataacagtacgcacttttcgcaccacgaaccatacgatgaccacaatcacggccgcgatgaccacgtcctcgaacacgccgagcgcgccttgaatcgagcaccactggtcgccgagtaggtaaccggcggaaacgaggatggtgttccacacggccgagccgagcagggtccagccggtgaagtgcaggaagttcatgcggttgaacccggcgggaatcgaaatcagcgagcgtaccacgggaatcacacggccgatgagcaccgaccatgtgccgtatttggtgaaccagtcgttggctttgctcacgtctttgcggctgacgccggggattttgtctgccgcgagattgatgcgatgcaggcccacccagcgggagatgccgtacaaggtccaggcacccagtacggagccgatggtggcccagatgattgcgcccggcagactcaaggtgccgcgtgcggcggtgaagccggcaagcggaagaatgacttcggacgggatgggcgggaagatggattcgagggcgatggccaaggccacgccgataccgccgatggtttccatcagcatgatcagccagtcggtgatggtgccgatcaggccgggttcggtggtggtgcagatgggtgtggggtcggtcgcaagaatagtggcggctgccatggaaaaactcatagagggcattgtcccaaggttttcccagaatcagaagcatgacgcaagaagatgtgcattttgttgacaagtccgccgagagcgaagttgggagcccggctgattctgcggtttctgtgccgacgctgagcaagcccggcctgctggttatggatgtggactccacgctcattgacgaagaggttatcgacgagttgggcgtggtggctggctgcggtgaggagattgccggagtgaccgcacgcgccatgcgcggcgaactggagttctgcgatgcgctgcgcgcacgagtggccctgttggagggcctgccgatctccgtgttcgacacggtgcatgacaagctgcatttcaccaagggtgcgctggagcttatcgacacgctgcatgaacacggttggaaggtcggcgtggtgtccggcggcttccatgaagtggttgacatgctggcggccgagggccatatcgactattggattgccaaccggcttgaggttgccgatgggtgcttgaccggcaaggtgctcggcgaaatcgtgagcaagaccgtgaagctgcacgccttgcaagcgtgggcggaccgtttgggtattccgatgagccagaccgtggctgtgggcgatggcgccaacgacattccgatgattcaggccgccggtctgggtctcgcgttctgtgccaagccaaagacccagctcgccgccgacaaagccatcaacgaccgcgacctaacccacgtgctcgattatctgcgccggtaaaattttaccgacctcggctccggcacttatagttgagccatgactacttcaggcgcagaacagttgacgcttgcggggctggctccccgcaagcggcgtaaacgtgcgcctgcggagcatacgccggccgagcagcatcccatagcgcaagtcgtgttggatgtgcaggcgctccacctcggccagacattcgattacttcattgatgaaaaagacagcgaggccgcacaaccgggtgtgctggtgcgcgtgcggtttggcggtcaaagggtcagcggcgtgatctgggcacgcaccgataccagcgataccccgcgctcttcgattcgctatatcgaacgggtgttgagccccgatgtgctggttcccgcatcgatgcgtgaggatatcggtctgattgccaaagcctatggcggcacacgggccaatattctgcgtttcgctgtgccaccgcgcgtggccaaggtggaggccgaacagcggttagccgcgtcgttccgccgaccggtcggcggctccctaccagataatacgcagggtggttttgccgggcgtggcaccaatcccgatgggaccatgcctgctggctctacctttgccgttgccagtaccgtttcggagggggctgcgcaggggtatcgtcgtctgaccgccaattacgccgacgtcaatgtgcttcatgatgcgcttaccggtcagcgtttccaatcttttgtgtttgattcgctgcccggtgcacaggagtggcaacggaacatggcatggatggtggccactgcgctgagtgccggtaaagctgccgtggttgaattgcccaccatgcgcgaggtcgaagacctgatgcctatgctgcgcaattatgggctcaaaccgttcgcccctgctccggccggcggctgggtgggcgacgtcgccgtgcttaacgcggagaccatgcccgcggccgaccggtatcgcacctatctggctgtggcgttgggacaggtgaaggtggtgatcggcacccgtgcggtgatgtatgcgccggttgaaggcccggcgctgttcgccattctggaggatgccgcctatcagaacatggacggtatgatgccatatccacaggcccgtggcgtgatgcggctgcgctccaagtcccatggcggcgtgttcgtggccatggccaatgcgcgcaccccgcaaagccagtgggaaaacaccggcccggatacggtggagaccccggtgagcggctattccaccgcgattcacccgctcgcctcgccgctgaaggatgcgacgccttgggtacgttggctcaatcgcgatgagcttgcgcgtcttgccgacccgtccatcggcgcacgtgtgccgcatacggctgtccgcgtgctatctaaggctttggagagcggccccgtgctgctgtccattccgcaagacagcgtcagtgagactctgagttgtgcgaaatgccatcgtcaggtgcgctgcgccaagtgttccggaccattgcaactaccggccgaccgccgggactccacaccgcgatgccgctggtgcggggctgccgccatcaactggaagtgtccgggctgtggacatgaacgtatgcgcgtggtgcgcgtgggtgctgcaggcactgcggcggagctggccggattgttccgtggcgtgccagtagttttgtccagcaagacgcagggtctggtgcgcgatgtggcttgccagccgatgattgtcatcgccactcccggtttcgaaccgcgcgtgcgtccgatcagtgccgagcagggatcggctggccatgagtatcgtgccgtggccgtgctcgacgcttggaccagcctgtatgcgttgggcgtggatgctcggttggatacgttgaccgcgtggatgcgtgcggtgtcgttgtgcgcgccgcgttcccgtggcggccaagcgttgattctcggcgaaaccgacccggccatcgcccaatcgctgatgctctgggattcgaggattcttgcagccaaggatcttgaggagcgtgtggagaccggtatgccgccggccgtggccgccgcctgcgtgtggggccgccgtgatgcggtgatgatgctgatgcagcgtatcggcgccctgggcggcgattggacggcctgcggcgagctgcccggcatgttgggcccggtgccgatcgcgcaaccggacacggtcgacgcccgggagctcgaagccacggccgaccgggtgaaggcagtaatccgtgtgccgcagagtcggcgagccgagctggcggcccgactgcaccgggaaaccgctcgtcatgtggcgtcccgcgaacccggcgagcttcgcttccgagtagatcccaaggacctgatctaatcgtcttcaacacgtgaaacgataattacagaatgaacatcgctagaaggaggacactatgaagggttggcctggagagccggatatggattacgacgtgctggtcgcggatggcgaggccgctgcgaacgccggcaagccgatcaccgacgtgatcttcgatttcggcaacgtgctgatttactgggatccggtcgccgtactcatcccccgctacagccagaagaccatcgacgaattcctcgacaacgacatctccggcttctacgatgtcaacgacctgatggacggcggcaccagcaccgacgaggccatcgccatcatgcgccgtgacaagggcgataagtgggcggacatcctcgactactacatcaagaacttccgcgactccctgaccggcatcgtgccgggcgcgcgcgtgctggtcaatgacctgaaggctgccggcatcggcgtgtggggcctgagcaactgggaatccagtctgttccacgtggccgaggaacagtgcgatattctgcagcagcttgatggcaagctcgtctccggttttgtcaagctgcgcaagccacacaaggaaatctacgaggccgcgttgaaccagttcggcatcaaggccgatggcgcgttgttcatcgacgacaaggccatgaacatcgtcggctcgaatgcggccggcatccgtggcgtacgtttccaggatccggtcaagctgcgtgaactgctcatcgccaatggcgtgaacattccggccgtgcagtgagcatcgacatttcaaggaggaccatgctcaaactcgtgttcgccggcacccccgacgtggcggtgccctcgctcaaggcctttgccaccgatccacgttttgatgtggtcggcgtcattacccgccccgatgcgcctaccggtcgcggccgcaagctcacgcccagcccggtcaaggcgacggctctggagctcgggttgcccgtcatcgatctcaaaccccgctcccccgaattcatggaggcgttgaacgacctgcatgcggatatcgccgctgtcatcgcctatggcaatatcctgcccaagaacgtgcttgatgcggtgcccatgggctggtacaacctgcatttctccaacctgccgaagtggcgtggcgccgctcccgcccagcgtgcgatttgggcgggcgacccgaccaccggcgccgacgtgttcaaggtgggcgagggtttggatgatggcccgatcgtcgcttccctgaccatcgaactgaccggccgtgagacttccggcgaactgcttgaccgtctggccgaggaaggcgcgcccatgtatgtggatgcgctggccgccgtaggtgaaggcaccgccacattcaccgcgcagccggccgagagcctggaatacgcgcacaagatcacggtgaaggacgcccgcatcagttggacggacgaggccgaggccatcgaccgtcagattcgcgcctgcacgccacatcccggggcatggaccgaactgtttgcggaagggccaatcgccgataatgacgagtcaaccgctaaatccctcgccctgcatattctcgccgcacaaccggccgaccagtccaatcccaacactccggccgagcttcagcccggcgagctgaaggtgggcaagaagaacgtgtgggttggtaccggcagcacgccgctggaactcacccaagtcaaggcgcaaggcaagaaggccatgcgcgccgccgactgggcccgaggcgcacgcctctcccccgccgcctgcgtgcgataacaagcaatatcgctcccgccttcggaagcacagtaaaggcccggcatcttcataaagaagatgccgggcctttcagctatgcaatcggcgatcagttgagaccggagagcttgttgatcagctccgggtcacgcgtcgcacccttgtcggccgagcgggcgaaggcggcgtacgccttcagcgcctgggagacgtggcggttgcggtgagccacgtagccgtcgccagcctcaagctcgcgacgacgctcgtccagctgctcgtcagtcagttcgacgttcacggaacgggcttcgatatcgatatcgatgatgtcgccgttcttgatgagcgccaccgggcccttgttggcagcctcaggcgccatgtggccgatggccagaccggaggaaccgccggagtagcgaccgtcggtgagcatggcgacctgtttgccgatgcccttgcccttgacgaaggaggtcgggtacagcatttcctgcatacccgggccgcccttcggaccctcgtaacgaatcacaagcgccatgccaggcttcagggtgtcgttcagaatgacctcgatggcctgctcctgggagtcgaccaccagagccggtccacggaacttccagatctccggcggaacaccggcggtcttgaccacgcagccgtcgggggccaggttgccgcgcagcacggcgaggccgccttcgtgaatctccgggtggttgatgtcgtggatggcgccgttggtgcggtcgcggtcgagcgagtcgaacagggtggtgtgcgtccacggctccggggagatgatgtggccaggagcggccttgtacatctgctgggcttcctcggtgcaggtcgggcgcatgatgtcccaatcggccagcttggcttccagcgtcgggtagtcgatggaatgcacgttggtgtgcagcttgccggcgcggtcgagctcgccgaggatgccggtgatgccaccggcgcgatgcacgtcggaaatctcccacttgccggacggcgaggccttgcagatgcacggcacggtgtgggaaatacgctcgatgtcgtccagggtgaagtccacgtcggcggactgggccatggcgaggatgtgcagcacggtgttggtggaaccgcccatggccacatccatggtcatggcgttctcgaaggcttccttggtggcgatggagcgcggcagcacggaatcgtcggaatcgtcgtagtactggtgagcgatcttgacgacttgcttggcggcacgcttgaacaggtccttgcggtaggagtgggaggcgaggatggtgccgttgccgggcagagccaggccgatggcctcggtcaggcagttcatcgagttggcggtgaacatgccggcgcaggagccgcaggtcgggcagacggtcttctcatagttgagcagttcctcatcggagacgctgtcgtcagcggtggcgtacatcacgtcgataaggtcggtgctcttgactgtgccgtcggcgagcaccgtggtgccggcctccatcgggccaccggagacgaacacggtcggaatgttgaggcgcagggctgccatcagcatgcccggcacgaccttgtcgcagttcggaatgcagatcagggcgtcggcgcagtgcgcgttgcactggtattcgacggtgtcggcgatgatgtcgcgggaaggcagggagtagagcatgccagtgtgccccatggcgatgccgtcgtccacggccatcgtgttgaactcgcgcggaatgccgccggcttccttgatagcctcggaaacgatgcggccgaccttgttgaggtggacgtggccgggcaggaactcatcgaacgagttggcgatggcgatgatgggcttcttgcccatgtcgtctccgctgacgcccgcagcacggtagagggctcgggcgcctgcaaagacgcgccctgacataatttttgcagatcgcatttcagtcatggctctattcaagcctttgcgagggacacgccacttgtcaagagtcgaataatggaatctgcaaaaacgtaacgtttcttacacatattttttggaatacattcctctggcgagagtccggtatagggctgacagaagtccccccaaacggctacacttgcttcggttgagatagattttccaatgtttggagataagaacaatggcttttggtactgacccgacacccgacggtcttgcgaacccgccgatcgacgatctgatgaagcacgccgattccaagtacgcgctggccattttcgccgctaagcgcgcacgccagatcaactcctacttcacgcagctcaacgagggcctgctgcagaacgtcggcccactggtcgaataccagaacaacgagaagcctctgtccatcgccttccgcgagatcgacgagggtctgcttgaggagaccttgggcgaggacgacgccaacgagggcaactgatcgattcagacgattcgtttggattgtttggacagattgtcgccgaatgatggtgtgagagttctctcacaactgattttgagcgacacgcttgcctgagttatcgcaatcagctataactcatcatcaggagcgaacaagacgtaaggctcgagccaccgcgctggttggcacgagcctttatttatgcccgtttccgcagtgacaagtaaaaattgacaccgtatcattgtgcctcgcatcccgcggggcgataagtcctgaagaaagggatgatatgacagaagaacatcggcttatctccgccgaatccgtgaccgaaggccaccctgacaaggtctgcgatcaaatctccgacgccattcttgatgatctgctggcccaggatccgtccagccatgtggccgtggagacctccgccgccaccggcgtgttcctggtcttcggcgaagtcacgtccaaggggtactgcgacgtgcagtccaaggtccgcgaaaccctgcgcaacatcggctacacctcctccgaagtcggccttgacgccgattcctgcggcgttgtggtggccatcaccgagcaaagcgccgaaatcaaccagggcgttgcccgtctgactggcgatcaggagaccgccgccagccgcgaagaacgttacgaagcacagggtgccggcgatcagggcgtgatgttcggctacgccaccgacgagactccgacgctgatgccgcttccgatctatttggcacatcgcctcgccttccgtctgaccgaggtccgcaagtccggtgaagtgccgcacctgcgcccggacggcaagacccaggtaaccattgagtatgacgataacgataagcccgttcgtctggacaccgtgctgatctccacccagcacgatcctgaggttacgcaggattggcttgctgttgagctgaagaagcacgtgattgacccggtgcttgatgaggtgctgggttccaaggtgccgcatgacaactaccgccagctggtcaacccgaccggttcgttcatcctgggcggcccggcggccgacgccggtctgaccggccgcaagatcatcgtcgacacctacggtggcgccgcccaccacggcggtggcgcgttctccggcaaggacccgtccaaggtcgatcgttccgccgcgtacgccacccgttgggttgcgaagaacatcgtagctgccggcttggctcacaaagtcgagatccagatcgcctacgctattggcgttgccgacccggtgtccgtcaacgtggagaccttcggcaccgagcaaggcgtgacgcgcggccagatcgccgccgccgtacgcaaggtcttcgacctgcgccccgccgcaatcatcgacaagctcgacctgaagcgcccgatctacctgaagaccgccgcttacggccacttcggccgtaccgacgttgagttcccgtgggaaaagaccaacaaggtcgaggagctcaaggccgcgattgctgcggagtgaggtgctctaattaggacagagagatcataagaataccataagaatagggtgctttccgctgttgatggcggaaagcaccctatttgtttttcgcagtgtc

SEQ ID NO: 1986 - DNA, 25132 bp, Unknown
  R17_18m  MAG No. k141_24181
ggtttggcggatgaccagccccttgaaacggaagtagacctcccggaacacgcaaatcagcccctcgaaatcgaaaaagctcacgatgtttggtatgtatccgaacatcgtgagcttcaagagcctgtgctggtgtgtctggtgtgtattgctgccggacagatcagatcttgaagagtgtgtcggctgcttcagcgagctcgcgcgacgcagtgagcacgataacgcaatgcttcgggtcgccggtgtgcgccagcttggccagcgcggcgaacacggtcacctcgtcatccgcgttcagccctcgtgtcggctcgtcgaggatcagcacttcggcctcggtgctgattgcacgggcgatggccaccaaacgctgctgcaccaaaggcaacgtgccgacggccacgccgctggtggcctcggagaagccgaccttggccagcagttcgcgggcgatcaccggcttgggcttcaggaagttgcggttggacgcatccatggcgtacagcacgttttgttcggcgtcgagattcggctgcacggcgtgcagctgcggtacgatgcccagacggtggccgcgcagttccacgggctcgagctcaacaatgttggcgctcttgttcatcaccgtgccagacaccggcgtggccaaaccgctcatcacgcccatcagcgcgcgacgtttggcgtcggcggtgatgcccgaatcggggtcgtcgctgatcagcagcgcgtatgcgtgtccggagtagcagaagaaattcgcgccatcgaggatgttgaccttgcccttggggccggcgaccgtcaccttgttcagggcaaaggtcgggtaggtcttgagcagaatgtcgtcggaaccgccgcccaccaacacgcgatcgatacgcgaggccagcgtcatggtgggttcggccgctttgccctgaggctccgcatgctcggccaatgcgtctttgtgatcggttttggccagtcggagtgtttcgttgacgcgggcggcattgcgctcggtcacttcggcggatgcgttggccgaagcgatggcgtctgcttcggcctcgctggtctcgtcggttgctccggtttcggcagatgccagtgcgctgtaaataccatcgtcaacagtgccttcgtcatcaacgtcatcgaaggtcacgctgaactgcacggagtcagccggaacggattcaatggcgtcgttcgtctcagtctcagaagtcacttcgtcagccgttgcgtcagtggtcttctcgagttcctgatcgttgttcttgtcgctcatgcctgtgcctccgcatcgtcggttgtggtggtcgtcttattggcctcgccagcatcatgagcggtggtctcagcagcttcatcggtctcagcagcgccagtggtttcggccgtttcaatcgcctcagtctcgctcacggtgccccagtcgccatcggcggcgaacagcttgttcgcgctgaagaacgcaaggcgcagggcggcaagaatcgccaggatcaggattgaacccagtccataccagaccatggtccaaatcaggtccgatgtcaccgggatggcatggccggatgccagagcaggtccgatcggcttggcggcgaacgcgcctccgaccagaccaattacgtagaagggcagggtgacgatgaacacttccagcatgaactgccatcccaaacgcccgcgagtgacgccggacaccagtgccatgccgatctcgtcgtcacgcttgggcgcccacacgcctgacagcacgaggatgagcaacagcacgccgcccacggcaaccaacgcaatggtgccggtcttcgcgcgcgaggatagcgtatccagcggctccagagaagcgttgtaggattccagcgaaggggaagacacctcgtatcccttggcgggcagcttggacttcttgagggtggataccaaggacttgtatgtagcgggatcaccggtgtcgaacaccacgtccagatccggcaccgcccagccggaggcggtcttgtcgttggactgtgggtcgagtccggccttggcgaaggtctgatagttggtgaagatcgcgttctcgcggttgcgggcggccgtcaccggattggcgacggcagattcggatgtgtacttgtagatgccgcgcaccttgagctcggccgtggtctgggcgtccgaggcggccgccaccttgagcgtatcgcccaccttcaggttgttggcggaggcaaacgcttcagagaccagtgcgccggtggtgttcgggttggaggacttgttgtcgtagctcaggtccttgccgtccacgatttcgaaggtaccgaggtcgctggccttggcggcatcctcggtccagaaggctcgccaaatgagctggccgccggtctcatcatcggaggccgagcccagcgatccgccgtccagggccttcaaatcaccgctcacgtgggccggcacggtttcggtaaccgtaaagttcaacgagttggtggccgaccggacgagcgtggcgtattcggtgtatgaggtccacgtcatgtaatgcttggtggaagccgagtccgtagcggagaccttcttccacgtagccgcagtcgggcgaatggccaacgtggccttctgctgatcgtacgcggtggtgtgtgcgttggtatcttcttgaatgatggccagtccggcgactgtgccgaaggtgaccgccaaggtgatgaacgcggtcagggccgtacgtcctttagaacgtgtcagggcccgccaggcgttgctgaggacgaacatctaattgcctctcccgttctcctaagccgaacaaatcaatacggctttaactattgttgcgtttagtgaccgttttcttgcgcaatactgttatactcctcaatgaagtctgagaacattctgacagcgatgtggtggtcatgaggggatttgcacccggtatgggataaaccctcggtctatttcggtggcatcggtacactggcatgagatatgcgtggcgtcacgtgtgctccggcatgtctgcgattccggattcgcccggagtccggcatccggaagcgtggccttgcgccgttggataagagtatgagctgagcagattttcgggtaggataagtatgcgattcacttcagggcattcgagccataaggctgtggggcgtaggagaagccgccatgccggtaacgggaaatccaatcgctccgcatctacgaatagcgttgcaaatcagcagacgggtcccgtaaacctgaagactccccagcacgtgggtggcgacggccgttcgctgatcagccgtacaccgatatgggtgcgagtggtggttgtactgctgctgacgttgctggccagcgtcacctgtgtgggcacgctctacgcggcatccgtctcgagaatggccacggatgcgcagcgtgtgctgacatccgccgaaagtctggccaattcggcacttggctgcggcagcgataagagtctgtcggacatctcccaagagttggtcaatgccaccagtgatctcaacgaggagctgaacggcccgcagtgggacttcttccgcgaccattcgcgatttggcagcgacatcaccgctgctcgcgaaatgctggcttccgtggatacgctggtcaacggtccgttcactgatctgctgaacctgtccaaacgattgcagggcttctccctgaagaatggctcggtggacgtcagcgccctgatggatatgccggatatcgtcaagcaggtgcataaggatatctcgcagcagctcaccaagctcaacaaggtgccgactccgagcgtcgccaaggtggccaccgtgctcgaatccgaaaaggctgcgctcaagaccgtggattcgatgctcagcgaatacgatggcctcattaacttgctaccgcaactgcttggcgaggacggcaagcgcacgtatctggtgatggtgcagaacccggccgagctgcgttcggcgggcggcatggtgggcaccatcgccgcaatcacggcagataagggcacgattaccatcggtgatttcgccaccacttctggttgggacattcctgagaagccaatggatgctacggtgctgaaggagcgccaggtatttggcgacacttttgaccagtacccggccaccacgaccatcgaccccgaattccagcgtgtggcacagatgaacaaatacatgtggctgtatcagaaaggcaacgaagacgagaacgtagcgggtgtattgtcattcgatcccgtattcctccaggcattgctgggagccacaggcaaggtcaagctttcggacggccgagtgctggatggcaccaccacggtgccgttcttcgcttcagacctgtacacggattacccggacttcgagcagcagaacaacttcgtttccgaagcggctcaagcaattatgaaccatgtgcttggcaacgcgaatgcttccaccgcatccccgctgttgaaggcaatcagagataccagcgctagcggtcatttcaagctatggatggctgatccggatgagcaggaggcgctgattgccaccggacttatcgacgataaggccagtggcgagttgtctgctgacagtcaggtacctgaaaccggcatctatctttcggagctgcagcaaggcaagcaggattggtatctgaagacctccaccacggtcacaaaaacctgcggcgacgcctcggccagccggaacgccctgtattctggcgtgctggataagcgcatcacgacagctgtgcgtaacacgcagctgggtcagtttacggaagatcagctcggtgacgaatacacggtcaccttcaccatgaagaacacgctgactaaggctaaggccgaatcgttgcctgatttcgttaatggcggctcggagaatccagtgctcggtggcatgctgtaccgcgtggtgcttaccgccccgtacggtggcgaaatcaccgctgtgcaggctgatatagattcatggggtaccaacaccgcgagcctgtatgaccgtcagtacattatgttcaaccagcagtggatcgagcccggaaaagaattgacgattgcctataccgttcgggtcagcagcgatgccacacatccactgaacgtggtaaccacgccggtggtgaatgcggatggcgtcgagacgggctccaacggtaaggtgacggatgagtgcccggccgatacgaacggcgccgatggtgcgaacggcgccgatggtgcgaacggcggcaagaacgacgcgcataagggcgcgtcctccgatccctcggccggcctggacaccttggacaagctgaagagccagatcagctgcccggtcgatctgaagtccctgacgggatccatgtgatgaccatgcccgattccgtttccggcgtcgccgtttccgacgccaccgtttccggcgtcgccggcaggccgcgcgacgtgaactacgatctgctgcgcgtggtggcgatgtgcctggtcatcggcgtccacgtgatcaacaactacatgcccgtcaagatggccctcgccggcagcgcggaaacggtgcgatccgtgctgttcgcgttgttcatggtctgcaatccgctgttcattatggtgtcgggccggttcaacctgacattcgatgccgaccggccggtgagcacccactcagcgggccgtctgccgggctctggctctgatgcccggacaggcggcggtgccggccaagccgatcccggtagcctcgcgccgtacgtgcgctactactacaaacgtttcgtctcgctgattgtgccgtatctgctgtatgcgggcggcatgggattcgtcgcctacctggtgatcgatcatcgttcggttggcggcgctgtgtctggaacgttgttcgatctgttttccgggtatgacgattccgtctattggttcgtgttcatgctcgccggtttcgtgctggcgacgccgttcctggccgcgatgatgcgcgcgataggccggtcgggtgcctggctgctgatcggtctggccgccgccgtggccgccgccgagcagatctgcaatcttgccggatacccgttgacgttcctgcagtcgttcccctggcggggactgctggtctactatctgttgggattcgtgttggaatactatccgccgtccgcgcgtatacggcacggtgtgtatgcgttggcaccattcgtcctggcctggaccgtcgccacgccgtacctgttcgccggccagcagatgcaggttggccgcacggtcacggttgcgtttgcgatggtggtaatggcgacgttcctgttcttccggtacgacgtgcacatcacgtcggcgcgggtgcgtaaggcgattatctggctggccggatattcctacacgatttacttggtgcactcaccgctgtccaaggtgctgatcggcccgcggattcccgcgcccacggacggatggtcgtatgcgggtatcagcgtgttgatgtttggcgctacgttgctggcggcgctgctatttgcggtgattgccgataccgtggtgctcaagcccgtgcagcgtctactgcggaaggtacggctgtagatttggatacggcgctatgccacggtatcaaagccaggaatcccagcagcagaagcggggtgaacgtgaatttcgacatgcccatcagcacgcctacggtcatgagcgcggtcaatcgtccgttgccggcacgcggatcggccatgcaggaaaacagcagacacgcgaacaataggcacagcgcctgtgccatggaatcggccgagatggcgaacgaatagcggaagatcaacggcggtgagaccaagagtagggccgtaggcaagcgccagcgggggagtgcggctacggcggcgaacatacaaccggcgtacaccagcaacatgattacttccgcgagtacgtatgtggtgccaggggtgagcgttgagtctgctcctatggcaaaggcggccaattgcggcagataggcgaagggtgaattaaccgctgcattgttgtagggcgtgtccacgcaggtggtgtttgcggtgctggtgctgttcgtgccgctgcccgctgcagtgctgcccgtgccgtaccgttcaagaaaatcggcattgacggcagccggatcgtaaccgtcgtaatggtcgatggagaaccggatccaatcacggctcacgcacccgcccacattgccgctgcccgaatgcaggatgctggtcgagtcgaccggccgagccagcacatccccgttaacgatgccgtcaatgcgatatgtgtgcgcccatacgtctggaatatgcccggcaggcgtcaccgcaatcagcacgaaacccatcagcagaatcaccgcttccacgcagcgttcgccgccactcgtgagaacacagtcaaaggagcagaaacagcatcagaggcatcggaagcatcagacatatgtcccactatatgtgaggtgttggtggtagtagtgatgcataaaagaaatcggcctttcgctgtttggtgtgggtgaagcgggttaggcggtgacgacggtagggtagttttggtggcatggataccacaatgctgttctttctgcttttctattgtttttcacagtctgagctagacgctaaaagatggggacacaacaaccgtaggttgcgctccccatcacgtttctatatggcgcttagtcagtgtcttttgttgtatgcgaatctgttggtgccaatgaggaaggtcttgcggtcgttcttggccatgacgtcgaggatgatgccggcgatgatgagcagcagccccgtgatgaccagcatcaccgcgccgatcagcgtggggaagtgcgtggccacgccggccttggcgaattcgaaggtgacggtgccgcacagcacaatgccgacgatgccgatgattaggcccaatccgccgaagaaggggaggggcttgtattcgcggaccatgcggaagatggtgctcatgaccttgatgccgtcacctacggtgtccagcttggacactgagccttcgtgggcggtcacggtactggatcggcatctcgtagagtcgcaggttgttgttcagcgagtggatggtcatttccatctcgacctcgaagccgcgcgacagcacggggtaggttttgacgaacgtgaagctgaacgtgcggtatccggtcatgatgtcggtgacgtgcgcgcggaacaggtggttgatggagccgcgcacgaggcggttgccgaagttgtggaacgggcgcttgttctcctggaagtatgtggaggagaggcggtcgccgatgaccatatcgtagccttcgagcaccttggcgaccatgtcgggcgcggcggcgatttcggccgtgcggtcggtggagttgttgtcgtacacgtagatggccgcgtcgggcagcgccgcacggaagtcgcgcaccaccttgccaatggtcacctcttcgttatagcaaggcaggagaacggcgacggtctcatttctgcctcaagcagggggcattgctatacgcgttgactcgtgtgatgaggacaaaatagatataatccaagcactgtaggaggggccgtccgctggccgccggcccctcctacagtgtggtttcgatgcggtaacgggggcgatgtttggattccatataaattttgccgacgtattcgccgacgatgccgagggagagcatgatgagtccgccgatgagccagatggagatcatcatggacccccagccggcgatggcgtggccgaacccgagcgagacgagcacgtacacgaacatgccaatcgctaccaggatagacagcagtccggcaccggtgacgaagctcagcggtttcgtggagaacgagctgatgccctgaatcgcgaaggcgatcatcttcttcaacgggtatttggattcgcccgcttcgcgctcgccgcgctcgtagtagactttgctggtctggtagccgagtgtgggcacgatgccacgtaggaacaggttgacttcgtggtattcgctgagcgcgtcgagcgtctcgcggctcatgagacggtaatcggcgtggtcgggtaccgtctcggcacccatccactcgaacaccttgtagaaggcttcggcggtggtgcgcttgaaccatgtgtccttcttgcgtgcggaacgcactccgtagacaacctcgtcgccgttgcagaatccgtcgatgaacccgtcgaccgcgttcacatcgtcctgcaggtcggcgtccatggagatggcggcgtcgcagccgtaggcgcgcgcggtcatgagcccggcgaggagcgcgttctgatggccgcggttgtgggagagctttacgccgccgaacaagtgtgcgtcgcgttcgtgcagattgcggatgatgctccaggtgccgtctttggaaccgtcatcgacgaacaggatgcggctttgtttgctgatccgtccggtttcggtaagatgtgcgactttggcggccagcacgtcggccgtgtgcacgagcccttccgcctcgttgtagcagggaagcacgaaatacacgaccggctggtcgcggcggtcggcgcgctcgccggaaccatcgccaccggcgctcgtgatgtccgatttctgcgtgtttgtctcgaagatcatcttcccatcctcatactcagttcgaagccgtctcatcccggtcccggcccatactcatgtgctatagatagtttacccgcgtaatgtcgtgcgtgatttcccgtgattttcttggttcggtcaatttcggtatttacatgttgatgcttgcgttcaggttcctgttgctgttcggcatgcgtgttcgtgccgcttgtcataaaccggttcttgatgtcatgagcttatcatgatgcaatcatgataagctcatcatagagtatttatcttcacgttatcatgagatttcagacgtgggtttgaagtcgattggaggcgaccgcttggatccatgtggccgcaacaaataagacaaatgagctgatcaagggggatgatgatgtggacgaatgacgatatcgccgaggtgctggaacatctacgcgtccaaggcaacgatgatgcccgtttcgaggcgaaatcctgtgctcggaccatcggcgccagcgtgtgggagagtgtgagcgcgttcgccaacaccaagggcggcgtgctgttgttgggaatcagcgaggacggggatttctcgcctgttccgggattcgacgccaaccatattgcatcgcagttcatggatggtatgggagatggcaatccgcaaggagcacggttgacgaatcctccggagtatgacgtttcccgatgcgagcagaacggctcgtcgttcctggtcatcgacatccatgaaaacggcattcagcacaaaccctgctatcttacggcgagagggccgcaaaccggtgggtaccgccgtgtggacgacaaggatttgagattgtcgccaaccgaagtgttcgaaatgacccatgccctgacgctcagttccgcggatcgtatggttgtccctgaagccgacgtctccgatctgaatgccgaggcggtggacagggtgcttgctgagcatcgtaattccaagacgctgcgcgggactgatactcgtcttgagcgcatgaccagattgaatatggtgaacaaggttggagaggtgcgtcttgcgggactgttggccgccggacagtacccgcagcagtactatcccaagctgatcattgacgtcgtcgcacatccgggtgtcgagaaatcggcggttgagggtccgcgtttcgtggatcgtgtgcaatgcgacggcaatatgccggaggcaatcgaacaggcggtggagaccatcgccaaaaacctgcgggctcccacgttcgtcgtgggggtcggagcccgtaccgatagcgagattccaaaggaggtgctgcgcgaggtcgtcgccaatgccgtggttcacagggaatatgatgcgcaattcctcggagaatccgtgaccgtggacatctaccccgatcgggtggaggtgtcgaatcctggcggattatggggtggggtcacgctggccacgatcggcagcggcgtgtcatgctgccgcaatgcgacgttgatgcagctgcttcatcagataccgtatgacgatgcgaatgatgtgaccgtggaaggcggtggctccggcatccctctggtgattcgcgagatgaaatcccacgcactgggggaacctgtgttccgcgcgactcccgatcggttcacggtcgttcttggacgctacggcgtggagcagcaggagaaccgtgactggcttgatcatgtgggcgtccccttgactcgtcatgaacgtatggcgttgctcttgttgaagaggcatggcgatatgacggttccgcagttgcatgtcgcgctgtatctggattccgacgacatcagggtgattctgcatagattggtccaagcggggttggccgatgaaatcggccctgatcggtacgcactagcggagaaggtcgatggtggggagccgaatgggggccgtaaggggcttacggcatcggaatccgcgatactgtccgtattgtcggcggatacgccacttgatgtccacgaaatcggccgtcgctcggggagaggccttcctacgacgcgtaaggcgttgagccggctcgttgagcgtggagtcgttctcgccactgcgccgccgcgcagcagaaacaggaagtatcttctcaaaagataggatgatgccgtcgccggaatgtgcggtggagttccgctgattttgtccgcttcgctccgcccgccttatccgccgcgcacattagactgagacgcggttgaaaacgttgggattacgcctattcccgcctgcctgttcccgcgtgtgagagtccggtcgaccatcggaacgcgtggcggtgtacgggtgcgcgggatgggtgcgtcaaggagttacgcatggtggaaaagaagtggctcgacggctcggattcgaagggcgcgacgggtgcggcgcgtgcgacgggcatgctgcgtgcgttgcgtgcgcgtgcggcggcgtccggtgcggggcgcggcgtgatcgcggcggtgacgtccgtcgcggcggcggcgatgttgggcacggtgtgcgtcactccggccagcgcgctcgcggatgtgaacgccgatgcggacgcgtccggcgtccggtccgcggcctccgtgacggcctccgcggccgcctcggacggaacctcatccgacgcgcgctcgcaggcgcggtccgcgacttccgcgacgcgtccggtcgcgaacggtgtgacggtcgccgatgagacggctgccgacgcgatgccggacaatccgaatgccgagctgccggataaggtgtccgccgagatctccgatgacgcgacggtggtgtccgagcaatatgcggctacgccggaaggcgagttgaaggacatcgagacgggcgagacggtcaccgatccgaagatcgtgggcacggagagcaagcagcccgatccgttggcgaagacggatggcgagtcgttcattccggtgagcgccgcggatgtgaaagagaaggtcgctgcgaacggcggtgacgtgaacgcggtctcctcgaagacgcgtgccgacaacgcgtcggtgaagctcgccgcgttgcagaacaacgagtacggtgcgcactggggcacgtacaacggcacgcaggcgttcttcgacgcgcgcaacaacctgttcgcccagcaggcgaagggcgtgatcgacgtgtccgcgtggcagaacacgattgactggcaggcggtgaagaacgcgggcgtcgagggcgcgatcatccgtctgagctacggctggggcaatggcttcgacgtgcaggcgaagcgcaacatcagcgaatgcaagcgtctcggcatcccgttcggcgtgtacgtcttctcgtatgcggaaagtgcggccgacggcgcatccgagggtgcggacgtggtggacctgctgcgccaggcaggcgtgaatccgggcgacctgagttacccggtgttctacgatctggagaactggacgtacacggggcacaagagcccaacgagtccgagcgtgtacgacggtatggtgaactcctggtacggcaaactgcaggcggccggttacaacaatctgagcgtctactcgtacacaagctacctgaacagtgcgctcaacagcggcaacatccacggcaagacccgctgggtggcgcagtacggctccaccatgcagtacaccgcgttccccacgaacgaccgcggctggcagtacacgagcagtggacagattagcggaatcacggggaacgtggatttaaacgcgttcgggtaccggactccggccacacgatatcgggaagtgctcattgacggaaagtggtattacatcgacgcgacgacgggcaagaaggtcaccggttggcagtggttgtcgtcgagcggcggcaaatgggtgtactacgatccgaccgatggacacatgctgtatggcgagcagaagattgccggcaaatggtattacctggacccgggcacgggggcgcgcgtgacggggtggacgtacctcaagggtgacgtgaacaagtggacctactatgatcaagatggtgccatgctgtatggcgagcagaagattgccggcaaatggtattacctaaacccggttagcggtgcgaggatgaccggttgggttgtattgccggacggcaggaatgtatactactccccctacatggtttatggggagcagaagattaatggtgcttggtattacctggatccggtgaccggcgctcgcaagcagggctggcagcggctgaaatccaacggcggtaagaccgtgtattacggttccgacggaaagatggcatacggagaacagacgattgacgggaaacagtattatctgaaacttggtaccggtgcacgtttcgccggatggcgacgagtcgtgactacgcgtgaccatcgtggcgataagtgggtgtactacggttcggatggcgcgatgctgcacggagaaggaaaggtgtcgggttactggtacttcttcgatgatggcacctccaagtcgaacggacgtgtgacgtacggttggaagaacctcggctccaaaatcgtgtattacagctggcctgagggcaagatgcagtatggggagcagaagattggcggtgcttggtattacctgaatccggtgaccggcgctcgtaagacaggctggcagtatctgaattccaatgggggcaagaccgtatactatggctccgatggaaagatggtgtatggcacgcagtatatcgacgggcaaaagtactacttcgacccggtgaccggagcgaagcggtaggagtgtgcaaggggttctgggccgttatctcggtttcaaaccccttgcaataagtggaattatttagattgtacttgcttaagttggctgtaaatcattttgcgattagtgaagatgatatcatgccatcctgcagctgcgtaaggtatcagcagcaagaaataggggagcacataatccgatttagtttcccagaataggtggaaagtgaatccaccaagaaatatcacaatcagagtaatttgtttagtggtcaagcccctccatctaaagataagacaataggatgcgccaatatagataatattctgtataatgtcgcaatatactatatatatggcgtgcaacctgccacgcattatctcatgctctagctttgattgtgttaggtccgcacgctctccgccggtgccgccatatgaaatccatagggactgaaatgttggctcagcccatgtagtggctacctttcgagtgaaaaaatgcgcagcatatagggggtcctgtgtgaatgcttggatgcgttgggctatagcctcctttgccattgcatctacctgattattgtcgtgaggagcttccttgtaaatgtttacaacataattgttgtaccatcctggcgcacgctcgcgagactcttgtaggcccatggcaatccaagccgttttgggggtcgggttgtccaaaggaacgttgattcgactttccataaggaagatcggtatcgccgaagccgctatatatgcgactgcccccaatatgatgaatgtgatgactagaacgcgtttatgcgcaaacaagatgacaagccatataagttcgatcccgataaggaagatgagactgttgggcttaaaccagagtgcaacgaagagacaagccgctgacaatgtgccgtacgcaagacgttttcttatgtcgtcgcttgcttgaatggcagccatctggagcaggcaggcaaggagacaaaacgcgagcgacggtatgttgccgtaaataaatgtcgcgaataaaatgagggggaggaatgccgtggacaatacaatggtcgctttggtgacggcatcattcttgaacattctctccgtgattttacatagagttttcaatgaaactataatcatcaggagattaaaaaggcgaatcggcaacatgttgttcatgccgaaaagttgccccattagagtgcagaataatatatacccggactggaatggatattgttgtaggtagtcatttgcatgcagatttcccaaatcgttgttttgtagccatattgataacgtgattgaggtgccttgatctgcgactggagatgtggttgcaattgatagccaagtcaatccgatgaaaagagctgtataggtctgtatcctatagaacgttttcaacgagggaagtctcttgaattttaaatgtttgcccgtatagtaggctgcccccgcgagaatgaagaagcctacggttcccacgatgctgtatttgagagaatttgtaggcttttcagagtaatccaaggggaaaatcatcgtatgaaatagagcggcaattcctagacaggtgacaatcagtgcggcaaggagtgtgataaatcgattgaaaatgtcttctattttaagatgcgtgttttcttgcgtcgttttattcattaatgttgctcttcacatctgtataattatcatgttgtcttataggggaacgtgttgtgtaagggctgattgggattgctgccaaatcctcgattgccgttaacctgaaccgtgttaagccaactcatggcatcgcgtttattggttgttgcgatatggtgcagcatcgcgaggcggaagaggatggggccaatgcctttttgcataggcgaacctgttggcatccactataaaggttttgcggtcgttcttggcgatcacgtcgaggatgatgccggtgacgatgagcaggaggcctacgatgacgagcatgatggcaccgatcagcgtggggaagtggacgaccatgccggtgcctacgaattcggcggtgacccatccgcacaacatgatgccgatgatgccgatgatcaggccgagggtgccgaagaacggcagcggcttgtattcgcggatcatgcggaagatggtgctcatcaccttgatgccgtcgcctaccgtgtccagcttggagacggaaccttccggcctgtcgcggtactggatgggcatctcgtagagtcgcaggttgttgttcagcgagtggatggtcatctcggtctcgacctcgaagcctcgcgaaagcacggggtaggtcttgacgaaagtgaagctgaacgcgcggtacccggtcatgatgtcggtgacgtgcgcgcggaacaggtggttgatggagccgcgcacgagacggttgccgaagttgtggaacgggcgcttgttctcctggaagtatgtggaggagaggcggtcgccgatcaccatgtcgtagccttcgagcaccttggcgaccatgtcgggcgcggcgtcggcgggataggtgtcgtcgccgtcggccatcacgtacacgtccgcgtcgatgtcttcgaacatggagcggatgacgttgcccttgccttgacgcggctctttgcgtacgatggcgccttccgctgtggcgatctcggcggtgcggtcggtggagttgttgtcgtacacgtagatggccgcgtcgggcagcgccgcatggaagtcgcgcaccaccttgccgatagttacctcttcgttatagcagggcaggagaacggcgatggatggattcttctcttcaagcatgggtaccactatatccttcatgctggagtatcttgcagattgctacgccgagaaaaggggtgcgctacaacgttatcagtggcccgcatcgcatatgtggagagtggaattctccgtatccattggagattgtgggtagagaatggatacgaagaacccccgacgtcgtgaactaaagctcgggtatcgtctagtcacaattccttaagcgtaagtaagggaatggtggcaatcagcggtagcgtgaagaaaagcggcactacatagcgcacgcacatcactggcgccaaagccaatgtcgcccaatacaggagcgggaaagcccaagcgatgagcaggaccttattccctttgcgcttgatcagaagaatcacggaaagcagtaatgccaaaaacggcagagccggggatacccaaaccgtcaacaacgggtgtccgcggaacatgttccaggttccggcatagagccatgcaagatatcccggcaatttggtggtctcattgtagtcggacacctgattcgttgatccgccggcatcaatggttttgccgaattcattccacggagacaatccggtccaacggttcactgccgagctcgtagggtataggtacccgatttcaccccaaaggaaagcacggacgtaatcggacatgtgacctttcatcacagagaagtacatcctgacgtatcccaagggatccgagttgaaagcctcatccaacaatgccgctttagcggggtcggaaatcggagccaaatagccggaccccgtttccgtatcgtagaacatgccaataggggtaggatcccaaggcttgtctgtggtgcgtccagcctcgagggcatccaagtcataataggcgccgatgccctgtatctgctcgttcgtcaacgtgtcatagtcgtacatataggtacgtgcaatttgctgagaaggcacggacagcatctctcgtgcggaatccgcgcgcgtggttgcggtattcgcgaccacaccggagaaggcggccgataagatgaaaaccattgcgatagagatcaacgcggtcagtcgtcggcgccactgcctcaagaatggcagagcaatgagcatcacgatgatggccacatatacaccctgcttacgcataaggcacatgccgagtacggagagtacccacttcgtggcaaatggcactgaagctagtgcttccggagtgcggagcatctcaatcagtaacgtcaccgtaaggatgaagaagacagcgaatagggaatccttggcagtggtcaccgcatatgtctgaatcacgggattgaacaccgtgattccattcgcgagcaggaccagccatataggagcgccccattcgataattttattggccgcatacgccatcgcgaaagcaagggccaacgcctgcaacaggcagaatagtgatactcccgcgttgtatgagccgaacaacagattgccaagctgcataagaccgacaagcaacaatgtatgcgctgccggccaatgcagatcgacaacgccatcattcagaagatacgttgcctgaatcgggccgtcgctcgaatagttgccgggatagaatgcaagaaatgcgggtatccacaagacgaagatagtgatgccgaacagcgcaacgcgtttgtatgcggtgagattcgtcaaccacaatgagaatcttgacggaggtacctcgatgcctttatggccgtcttgataccaattccacagaaccagtatcgcggcaattgctatggctgcggcgcagccatagcaaaagccgcgaatccaaagccaactgtctttgaaggacatcagtcctaaagacccataaaaggacctgcctacggaaaacaccataccgagggcaaaaccaataatggctgacgctacgacatcgatgctcgtgagtgaagccttggcctgagaaagaatctgattgcttgttttcagaatcaacggttctccctcttatactcacggttaagcgtctgatagataatgccgaattgcagattcggattctcaaacggcgctttcacagtgaaggcttccggccaacggctcatgaactcgccgcgctccttcttgaagcggatggccttctcgccggaggcatccgatccgcgggacacggactcgtaatggtggagttcggccgtgggcacgaacaccacgcgcaactgttcacgaatcaccttcaggcagaagtcgacatcgttgtagttcaccgcaagctcctcggtcatgccatgaaccttgtcgaaggcctccttgctgaccataaggcatgcgccagtgaccgctcccagatcacgagccagcatggtggcttcgaaattgccgggatagttgcgggacatctggtagtacaggtggccggggccgtccgggccgaagctgatgccggcatgctggatggtgttgtccgggaacaacagcttggcgccggtgattcccacatcctcacgcatgcaaggtccaagcagctcctcaatccagttcggagtgatgacctcggtatcgttgttgagcagcaggtagtagtcgcctcgtgcctgctcggctccgaagttgatgatgcgggagaagttgaaggacgtcataccttccaacttcacaaccctcacatgcgggtcatcctgttgtgccatctcatagtattcgaaggtgaacgggtccacgctgttgttctccacgattacgatctcgtagttgtcgtaggtcgtgaatttacgaatcgaggacaggcagttgtgcagaaccggcacagcatccttgttcgggatgatgatggacaccaacgggtggtcggcgaggctgtaatcgaccttgaaacgacgcggcataagtggtgaatcaacgaccttgcccttgatgccgcatcgctccaaatgcgtttcgacagaaagacggctgctgtcgagcgtatagtccttctggtcggcacgagcggcagtcgactggctgtggacgcgccaatgataaagcacgcgaggctcatgatgcacgtaccgcgactgctcgccgatacggaacgtcatatgccaatcctgcgagccgtcatactccttgtccggcaattcgagcttgtccatgatggacttgcgtacggtaaggaaatggcacacgtagttcatgcccaacagcagatcgggattccactcggtcttgaagaacggctctcgatacttgccgttgtccagcttgtcctcatcgcaatacagcatgtccgtgtcgggatgctcgttgatggctcgcgtgtagcagaacagcgcatccggctccagtacgtcatcatgatccaggaagcacagaaaatcacccgaagcgattttgattccctcattggtgttcagtgtgatgccctggttcttctccaaagtcacatgctgaatacgatggtccttcgcgcacagtttgtccacggcctgattgaggtcggcgacttccggagaagcgttcaccagaagcagctcccaattccggtaggtctgcttcatgacggagtcggccatggcatgcaggaactgaatcggcgtcttatacaacggcacgatgatggaatacttcggctggacatcgaaaaccgtgcgctgctgaatctccagctcgttagccgaagcgcgctggcgggtacggaaccacttatcgtaatcgccagcggcacaggccggctccgtctgtgtggcccactggtggtgcatcaagtgcgtttgcagcggcaaagagcacaggaacgaatcctgacggtcgctgtccgggaacttcacccagacgatgaacgtatcgacttgggggatatgcagcgaataggagatcttacgcacgcgcaatccgggaagagccggatcggtgtcgagctcttcgcccatgcaaatccaatcgcccatggaaatctggttgccttggccgtcgagcgcgatgatatccacataatccttcgcgctttcgtcgcctaccagcggaacggagacatggccgtggatgatgtctgtggcatcgaggttattgataagcgcatccacaacgacatgtgaatcacccaatagcatcgctttatcgcaattgtgaatcgtcgaagcctccgcgttatgcgacagcctattggcataggacatcagctgcgcggctcgcctgttgaacgttttggaaccctgcgcgcgcgtgcgtccatccgagtctaccgcgctcacggacaccgtctgagattgcgcgacgatgggaaacaccgcgaccgggtcgctggcggcctgtacgaccttcgcaggaacctgcttgccgtcggacgtggtcgagctgatgcggaactgccaatcgtcggagagatgttccgcatgaatcgcggaatagattttgcccggtccacgcaccgtcgcgccaaaattcagcgtttcgatttcgccggtggtgccggttgcagtggcaggccgctgtccgtcatcggtgttgcggaagtagacgcgctgcagatcgatgccgtcatagcccttgtcatacagatacgtgaggtacatgccgcaaatgcgctctccaaggtagccggagacacggcgagccaccggagaataatgagagaagtcgcgcatcttttcgtgcgtggacagcacgtcgaacaggaacgcggagtatgcgcggaacagttcgcgacgcatcacgaacatattgcagacatataccttcgtctggttgagatacttctgcgcgctcggccagatatccgggtacttcagacggatgttatccatcacggtatcaaggtcttcgatatggtggccgaaggaatcccggtactgttcgtagacggtggttttctccaacgcttcgatcggttcgggggcgatgaaatcatgggcggtgatgaccttgcgcatggcttcctcattgaagtcgattcgctgcaacgtctcatcgtcattgcggtcgaacgtcacatcaccgaaaatgaacggctcgtgatgaatcggatattcggttttggagaagttgaagtacctgcggtagtgcaggaagccgtaataatccgcgtcggtgttctgccaagcccaatactggccggtcagctcgcagtaggagcggttcttctcggagatggaatcgccctcatcatcatgcagcagattgggcatccgggaagcggcgagagccgctcccacctgaatgggctgcagcagggcattgtcgggaatatgcgtgtccagtttatgacaggagacgaacagcttgatgtcttcagacatggatgagctactttctttcgctgacagatgctgtgtctaggatacgtcgttccctctatgtgaggaatcgaccggagcaacggccacagaggctacacgtcaccgatgtcgtccgtacgggcgcaacggtaccatagtgcccatggctgatgaagtgtttactcctcataacatcattgtgaccggtggctgtgggttcatcgggtcgaatttcgttcattacgtgtacaacaaccatccggacgtgcatgtcacggtgctggacgcgctgacgtatgcgggcaacctggagaacatcaagggcatcttgggtgaccgcgtggagttcgtgcatgggaacatctgcgacgccgagctgctcgacaagatcgtgccgggtcatgacgcgatcgtgcactacgcggcggaatcccacaacgacaactcgatcgcgaacccggagccgttcctgaagacgaatgtggagggcacgttccgcctgttggaggcggcccgcaagtacgatgtgcgctaccaccacgtgagcacggacgaggtgtacggcgacctggccctggatgatccgaacaagttcacggaggagaccccgtaccatccctcgagcccgtattcgtcgacgaaggcgagctcggacctgctggtgcgcgcctggcaccgcacgttcggcatccgcgccacgatcagcaactgcagcaacaactacggcccataccagcatgtggagaagttcatcccccgccagatcacgaacatcctcgagggattgcgcccgaagctgtacggcaacggggagaacgtgcgcgactggatccacacggacgaccactccaccggcgtgtggaccatcctgaccaagggacgcttgggtgagacgtatctgatcggcgcgaacggggagcgcaacaacatcacggtgctgcgcgacatcctgaccgtgatgggccaggatcctgactcattcgactgggtcaaggaccgtcccggccacgaccgccgctacgcgatcgacagcacgaagctgcggaccgagctcggctggaagccgacgcacacggacttccagaagggcctggaacagaccatcaagtggtacacggacaaccgcgactggtgggagcccgcgaaggccgctaccgaagccaagtacaagcagcagggccagtgagcggaatatgaaaatggccacacctcgaaggtgtggcccctatagcactaagaaagatacacatatgaatttgaaaaagcaagcggacaatgccgtgatggcgagtcgttttcttgctgacgcgcggttccaagtgtatctcgattatgcaagacggcatgtggatacagtcgatcgggaacggctggtcgatctggcggtgaggctgtaccgctggaacgtggaggcatccgccatcacaatcggttatatcggctatatcgagatattcgtcagaaacgcaatcgatcaccggctttgcgaatgggtgtccgggcagcagataacgggcatcccggactggcttgaagccggcaaaagcgatccgatcgggaggatacgggctttgatcaacagccccgagcgcgactatatcgcggaggcccggaacacggcattgcgcaagcagcggcattggcgttccgaccagacgcatccaaggcacggggatgtgatcacccgcgacgacgtgttctcccaattgacattgggcacgtgggatggcatgttgtcccgttccggcaaggaccctgaactcgcccatgtcctcatgggcgcgttccccaacatcgcggatgcatgggcgtcggaactgcgtcgtatgccgaagggaaggcttcccggcaacgacggcgacccgtttgaggacaggctgcgcaaggaactggtggaccgcctcaaatcggttcgtaccatccgcaaccgtatcggtcatgatgagaaccttctgcgggtcgagttcgcgaaactgagatacgacatgttcttcatcctcgatgccttgggccccgaatgcccgaattgggctttccccgataaaggggaggccttgaaaacgcttaatcctgcacgctgcatagcaacgtggcaaaacgattctgaagatagaaagtagggaacgtatgtcgttcgaattcgagaaggacttgaaggtcgaggagacgaacatcccgggcctgttggtgttcgacctgccggtgcatggtgacaatcgtggctggttcaaggagaactggcagcgtgcgaagatgaccgcgttgggtctgccggatttcggtccggtgcagaacaatatctcgtttaacgcgacgaagggcgtgacgcgcggcatccacgcggagccatgggacaagtacatcagcatcgcggccggtgagatcttcggcgcgtgggtggacctgcggccgggggagagcttcggccaggtgtacacgacccgcctggacccgtctcgcgcaatctatgtgccgcgtggcgtgggcaacagctttcaggcattggccgatggcaccgtgtacacgtatctggtgaacgcgcactggtcgttagagcagaagaagacgtacacgttcgtcaacctcgccgacccggagctgaacatccactggcccatcccgctggaggagagcgaacgctccgaggcggacctgcatcatccgatgctcaaggacgccaagccgatggagccgaagcgcacgctggtgacgggctgcaacggccagttgggccgtgcggtccgcgcgtacgcggaggcgcatggtctgcgtggtttcgagtacacggacatcgacgagttcgacttctccga

SEQ ID NO: 1987 - DNA, 5933 bp, Unknown
  R17_18m  MAG No. k141_24374
cggagcggcctggttgaagtccggggttgcgggagcgccgtacggtgcgccgtaagcaccctgaggcatcggggcagctactgcgtcatcgtcgaaacgtgcgccttccggcttgctgggcatagccatgaacacgatgtagacgattgaaccagcgagcgtaatcagtccgccaatggccatggcaccgaggccgccggttgccatggctccatagctggagttgctaaggctgccgaaggcgccatacagtgctgcgccaccgccggcaaccatgatgatcatgccgagggccatcgcgccatagaagatggcgacccaccagccgggcttgtccgtgtcatgcagacggcgaacggcgagcgccagactgggaatcaggatggccagactccaaatgctggaaaggaacccgagcttgtcgtccgtggcactgctgaggaggctcagcaggacgctgatgccgacagaggccaacgtccaccaccagaactcgctgcgggaggcacgtcccttgaagaccacatacttcttccagaaacggaggaatgcctcagggaaggggcagtcgtaatacggcttgttcaacggcacggctgctgtggcagtgggagcggcgtactggttgtatgcgggtggcacctgaccgtaagcgttggcgtccggtccgggctggccgtaggtaggagccgcgccgggagcggggaattgcggagccgcattcgccgcgtacgggtcggcggcgggctgaccataggcgggagttgcaccgggcgctgcgccgggtgcggaagaatcgggagcgggctgcccgtatgcgggctggccgtaggccggctgtgcgggggccggagcgttgaattgcccataatctggctgtgcgggggccggagcaggtgcgccgtattgcggcgtgctgggattctgctgggccggggtgccgttgggcgcgggcatctgcggcaacggcacgttgttgggatcggtcattgattcccctttcataagacgattgcgtcgactcctattcttccatcgtttgggtaaaaaactcaacaattgcgccaaatggtgtcgaagccttgcgtgcgggcgtgtggatggcgccaaagtaggtgtcaaaacaggtgtgaagacaggcatcaagatatcgggcactaccaaagacaggcaaaagagatttcgttggaaaatggccgttttgggatggtgttggcccgaaatgtcaataacgaagcaaaagagcgaggagcgctgctctccgcgtccggcgcgcgcggcacaataggggattatgactgatgctgaaaacaccaaacccgaactccccgcgaacgtccgcgtccgcttctgcccgtcgccgaccggcaccccgcacgtcggcatgattcgtaccgccctgttcaactgggcggaagctcgcgccaccggcggcacgctgatcttccgtatcgaagacaccgacgccgtgcgcgactccgaagaaagctacaaccagattctcgaatccctgcgttggctgggtatcgactgggacgagggcatcgatgtgggtggccctcacggcccgtaccgccagtccgagcgtaccgccatctacaaggatgttgccgccaagctgctcgaagccggctacgcctacgagtccttctccactcccgaggaaatcaaggagcgcaaccttgccgccggccgtccggccgagttcggctacgatggctacgaccgcaacctgaccgatgagcagaaggccgccttccgcgccgagggccgcaagcctgcgctacgtatcaagatgcctgatgaagacatcgccttcgacgatctgattcgtggcaccatcgagttcaaggccggctccgtgccggactacgtgatcgtgcgcccgaacggcgacccgctgtacacgctgaccaacccggtcgacgacgcgatgatggaagtcaacgtcgtgctgcgtggcgaggacctcctgagctccaccccgcgccagatcgtgctctaccgttaccttatggaactcggcatcgccaaggagatgccgctgttcggccacatgccgtacgtgatgggccagggcaacaagaagctctccaagcgcgacccggagtccaacctgttcaaccaccgcgacaacggcttcatccgcgagggcctgctcaactacctggccctgctcggctggtccattgcaccggaccgcgacgtgttctccatggacgagatgatcgagaagttcgacgtgcgcgacgtcaaggccaacccggcccgcttcgacatcgacaaggccatctccatcaacgccgagcacatccgtatgctcgagcccgaggacttcctgcgccgctcggtgccgtacctgcaccgcgatggtgtggtttccgccgacaactgggatgccctgaccgaccgtgagcgtgaggtgctgaccgccgccgctccgctggttcagccgcgcgtgcgcctgctgggcgaggtcgccggcatggtcggctccctgctgtccaccgaggagtatctggagcctgcggacgacgccaagaagcagctgaaggattctgccggcgaggtgctggacaaggccatcgccgcactcgaggctgtggatgaagctgactggaagaccgacaacctgcatgagaccctgaacaaggccctggttgaggagggcggctacaagccgcgcctcgccttcggcccggtgcgtgtggccatgtccggccgccgcgtctccccgccgctgttcgaatcgatggagatcgtcggcaagccgatcaccgtcgcccgtctcaagggcctgcgggcgcatctgtgatgcgtcgtccaccgcacgccggcggatgatgggagcgtgacgcatggcgggcatccgtacatacggatgcccgctttcgcgttgcatggggtgttcccgcagaacggcggaaaatggcgcgacacgccgggatttgcgtgagagcagggtagcgcgtaatatatctacctgttgcgcggttcgccgcgcagccggttgaaaaactgaatatgcccccatcgtctagcggtctaggactacgccctctcacggcgccaacaccggttcaaatccggttgggggtacgacgaacaactcttcggagttgctacgccaagccaaattggggtgtggtgtaattggcaacacagctgattctggttcagccattcttggttcgagtccaggcaccccagccaataaccctcgcggattagcgagggttttttgtttttacacgtcctgctcatgagatacggccgagagggtaatcctgaatagacaactctggggcaaagactgggctatagtcccaatccgtgactcaaaaacggcagaaatcccgcgtccgaacgtaaggggcgcgggatttctgccgtttcgggccgtgcaggaccggccgacatcgcgcgttgccgcgacttgagcgctgtccgatcctgaaaacgtgagggagaccgacctcgtcttacttcttgaccgcgttgacggcgtcaacagccttctgcagcgacgtggtgtgctcgtggtaccacgtgacctgctgttcgagtttcttggtcgcggcctggtagcccttggtgtcgtcggccacgcagccttcgtacgtcggcagttccacggtcagttccttggacagcgcgtcgagagcggaggcgtccgagacgtctgccttggtcagagcggcggcttctgcagcatcgccattgaccaagttgttgtagtcgttggtggcgttacgtacgtcttccgagacggcggcgcaggcggccactgcgctatcgtactgagacgcgctgtatgcgcgggtgccgaacaccgcgaccgcggcgataatcgccaccgccacgatggcaatcactatagcgacccacttcgtcactcgcttgttgtgcggctgtgccgtcgcttctgcttggttctgggattctggctggttgccgttcgcctgctgtgcgtcagtcatatttacctctccttctcactgcccctgtttgtatcttgcggagggcctgtttcaaacaacgggtatccaacatatcgaggagagccgagattgccgggcgtttcctactggttgcgctgtggcgtggccgtttttgtctcatatggcgaaagtatgcgccagaggctattgccggccggtgacccacggcgcatccgaatggacgtgcggaatcatcatcgcgatgaccgccagcagacacccgagcatcaccatcaagatgatgttctcgtgtccgtgcgcctgcagaagcgcgccggtcagcgcgccagacgccagcgccagcattacgaccgcacgccgcccgagcttcgactgctggtggccgtgtgccgaagcgtctgcgacgacgccggtcagcgtcatcgtgagcacggtggtgggcaggtccggcaccgacagcttgcgggcggtggagttctggatgcccattgccggggcgagcagcacgatcagcaggatgatgtgcaggtcgatgtgccgtgcggtggggaagttcaggctcggctgtgaggcctgtgaggcctgggtggtctgtgcaagccgtgcaatcgaggagacgccggacgcatcgtctgcggggccggtgatgagctggttcaaaagatagacgccgattagcgcggcgagtacgaacgacgcctgcacgcaggtagaaaccaacagatgcttggcccggttctcctcgaatcgccggatgatgcgcccgccgataagcgcgccgaccatgaaggagacgagcgtcagcgccgacgtccaccagacgaagccttgggcatgggcgatcgaaaacccaagaaacacgatgttgccggtcacgttggccacaaacacatgccccagcgacaggtagctcagcgcgtccaccagcccggcgacgaacgtcagcaccaccaaggcgggggagagcagaccgtatctgtcttccttgcggggaaccaacgtgcgtcctgcttcggcaagatgtgatgtcatggttgcgacgaggctccttttcgggattgaaattatggcgagaacgtgcgtcggtcgacgccgccactctactccctactcccgtacggttcctccggtttccgctcgtgcgcagatcgtcggggcggagaagacgccggtgatgcagatcgatgtgccgaaatcccgcagcgtggtctcgaccaagtcgggcaaggtgttgcgacgccgtatgaaggtggatggtacgccggagagcgtgccgatgtacccgtacgagatcgccacgcgcctgtccgatttgggacgtttggacttttccgcgcagccggtgccggatgcgacccgtgatgatttcgatccccttgaacgcgaccgtctgcgccggattatcggcacctaccaatccagtgaccgtaatttgttggaactgaccgatgaggagctggagaaatccctgcaattgacggtgaccgtcgatggcaagaccatgccgacgctgaccggtttgctgctgctgggcaagggggagtctctgaaacgcttcgttccgactcatcgggcgtctttccaagtcatgtctggtacggatatcaaagtcaaccaagactatgccggaccgttgctgaagaccatcgagcaaatcaacgacatgttctctccttggaatccaagcgtcgagctatccgtcggtctgttctcaatgatggtgccggaattcgaccatcgggcgttccgagaggcgctggtgaacgccttcggccatcgtgactacaccctgctgggacgtgtgcgcgtgcagttggatgatgcggggcttaccatcgccaatcccggcgggttcgtggagggcatcaacatccataatctgcttaccgccgaaccgcatggtcgcaatccctgcctgatggatgctctgaaacgaaccggattggccgagcgtacggggcgcggcatcga

SEQ ID NO: 1988 - DNA, 13111 bp, Unknown
  R17_18m  MAG No. k141_24411
cacggtatgacggcaatggtgccgcaggtttttcgacgcgatacacccgcaacgcaagaccagaatcgacaatctgctgaatcgcggattcatattgcgccgcccgagcgccacgagcgatgtggccaaaaataaatttataccgcaatacacacttttcctagggttgcaattcgcgtatcctacatttttcctagggttgcgattgtccaaaattacatttttcctagggttaataatgcagaatactgcacttttcccagggttagtaccctgaccttccctaatcacacggtgttgtaaaggcgtcgcggtattggccgggggtgagtccggtgcggcgcttgaagacgagcataatagaatatctcaagcatcgatgaatacggagatgatcacaatggctgattacatcggaacagtcaacaaccaatcttcaacacagcccaacggtcacagttcacatagcaacaccaccgagtcgctatggcgcggcacggattatggcaaatggttcgtagcggattcatgcacgtcgctgtcatcaagtatccaaggtttcgcaatgccactcatcgcgcagaccgtcacgggctcaccggcacaggcgacgctgctggattcaatcatgaccatgatatcgtcggtattgcggctgccaggtggcgtggtacaagataagtacgaccgcaaaaaacttatgattgcgttcggcctgattggtttcgcactgttcggcatatgcgcggccctaggatgggcgggattactcatatacccggtgctgatggtacttgcgatatgcctcggcatacgctcaggcctcctaggaaccacgagcaacacgatgctacgaggcatcgttcccgatcaattgctgcccaaggcgtcaagcctcaatgatggccgcgatgccgccctcgaactcgccggcgcaccagtaggtggcgtattgatcggcggcggtctatggctgccattcgcagtcagcgcgctgctgaatctattggaaaccgcggcggcgatgcggatcacaaaatactggcatcgtggcgggcggaccaatacggagggccgcgcccttgccgacgatgaggccgatgagaatggcgatgcggccaacatcactcaggccgctgacgagcagacaacgaccacgacatcatccgcgtcacagtattggcgtgagatgttttccggattccgctggcttcttagcgagcgattcgaacgtcgcctgattttgtcgagcgcgctggcgttcgcgtgcttcaactcgttcctgctgattacggtgctctcgatcggctccgacccatcacatgtggtgtcagccagtttcatgaacgtttctgtgtctgtgggcgtcatcgttggctcgctcatctcttccgtgctggttcagcatgtgcgcggcggcatagtcgccgtatcgttctacgtgctgatgagcatcggcgcgctcggcgcagcgctggctccgtggattcttgcgcgtatggcgtttctggcaatttcgctgctggccctaccggccggcaatgcggtaatcaacggattccaatcattgctcatcaacaaggagcatatgggccgcgtattcgccggcatgggcatgattgagacgattgctgccccggtgatcacatttctgtccggcatcgccatgcaacactggggttactcagtcacgtccgtggctttgggcttgtgcatcgtggcggccgcgatccctgccgtgacaatgagggaactggtcacactgcctaagccggatggctgggaggaccatatccgcaaatccgggctcaccaagttctgacaacaagtaagggcgactatctcccggatttgtgacgctcggcaaccgtcagcgtcacaaatccgggaagaggaaggtggatacggtttcagccgcgcgggcagcaaggtggacaaatcgttgccggggtggaatcgcggcaagtatgcaaaagcctcccattcgcgcgcgacgcataagcgcgcaaacgggaggcttcccaaccgcagcatcatatgcagaaataaggagagtaaggcatatgctgccgcggtcacaccccgccgggaacctgtcgcaggccgcgtccggcatcgaaagccttgcagtcgatgcgtgcggccggccgttcccggcgcggtggccatgtcagacgtcagtcagacgtcatcacttctgccagccgatgtcctgcggcaggttgccggcgaagccggacgggccgtagttggccagacccttcttcgcaccgaggtacgaagccgggttggagaccgggatggtgccgtacagcttgagggcttccttctcggcggcgttcacagccttggtctgctcgtcatagtcggagaggctgccagccttcttgacgagctcgtcgatcttcttgctgcccacgtaggagaagttggacgggccgtcggaggtgtacagctgcggggcggacaccacgaaggtcatggcgctcggagcctgccaagccatcggcagcacctggtagttgccggaagacacggtgtcggagaacttggactcggccacgttcacgaccttgaccttgatgccggccttcttcatcatcgcctggtaggcgttggcgagggcctgctgggtggcgttgtcaccgaagaaagtgaaggagatctcaagggtcttgccgcccttggcgtagtagccgtccttgcccatcttgtagccgtcggcctcaagggttttcttggcgttgtccacgttgtacttggcctcggcgggcaggttgttctcgtagcccttctggaacggcagcagcagctcggagcccggctgctcggccttccagttcaggccctggaactgcacgttgttgtaggtgttcacgtcgaaggcctgagtgatggccttacgcacctgcaggtcgtcaagcggcttggacttgctgttgtactccagcacgcgggtcttggtgctgtagccgatgcgcagctgggcgtccttgacggaacggatggccttgatgtcgtccttggtgttggcctccacggcgtcgatctcgccgttctggaaggcgttgagggaggcggtgtcggccatctgcttgtagacgatcttgtccagcttcggcttgtcgccccaccacttctcgttcggcacgaaggtgacctgggagtcggagaaggagtcgaccttgtacggaccggcggcccactcgttgtgcgggttcttcacccagccctgggtgaaggtcttcgggtcggcggccttcgggttcaccagagcgccgaagacttcctgccacgggtagtacggggtcttgtaggtcaccttgacctgcttcgggctgtcgccctgctcaacgctggcgatacggtcgaagccgtcggtgctcggcgggttgtagtccgggttggagccgttgttggcttcccacgtggccttgaaggcggtccagtcgatgtcggagccgtcgttccacttggccttcgggttgatgtcgtactgcacgaccatcgggtccttgctcacgagcttcatgtcggtcaggaagtccgggttcaccttaatcggggagccattgacctggtcggtcatgagcaggctgggctggtaccagctccacagctcggacatgtagccggtgttgccgtcggaagacaggtagttccagttcgggccgatttcgacgatggacagggtcagcgtgccgccgtccttgacgttgtcacggctctggtggttgtcgtaacgctcggtgaccttcggcatgggcaggtcgccggtgtacgacgaatcgatgccggccggcggttcggtggcgctcgaggcattgctggaaccgttgccattgcccgcgccgcagccggcaagcagcatggcaagcgccgcagtggccgcggcgagcgcggtcagcttacgtgtcttgttcattgttatttcctcctctatatggttccgaccgtcatgcgaaatggcatgcaacctgatggccgctcggtcgggaagtgtcatacggccgcagcgccgggcgttcgccgcggcagcgggcctgttgttcggcgctcagcttgggcatgagcgggcagcggcccatgaacgggcagccttcgaacgtctcggtggggctgggcacctcgccctgcagcacgatgcgctggcgggtgcgttccgccttcgggtccggcaccggcacggcgctgatgagcgcctgggtgtacgggtgcaacgggtgctcgaacacgtcttcggtgtcgccggattccacgatgcggcccaggtacatcaccgccacgcggctggagatatggcgcaccaccgacaggttatgggccacgaacaggtaggccacgcccagcttgttctgcaggtcctcaagcaggttgatcacgccggcctggatggacacgtccagtgcggagaccggctcgtcgagcagcacgagcttcgggttgaccgacagcgcacgcgcgatggcgatgcgctggcgctgaccgccggagaactgcgtggggaagcggtccacctggtcggggttcagctccaccagacgcatgagttcaccgatgcgttcgcggatctgctctttggagtagtgctggaccttcatcggctcggccaggatgtcgtagatcggcaggcgcgggtcgagcgaactcatcgggtcctggaagacatactgcacggccgaacgcagctcgcggcgcttctcgcgcggaatcttgtgttcgagcttggtgccgaacatctcgatctcgccgtcctgcggctgcttgaactccatgatctccatgagcgtggtggacttgcccgagccggactcgcccacgagcgccacggtctcgccttcgcgcacgtccagcgtcacgtcgtccacggccttgacctcgccgatcttacggcgcaggaatccgccggcggtcagcgggaaggtcttgcgcatgtgcttgacgtcgagcaccatcttgcgttcgtcgcgcgggatgccggcgaacttcgacttggcggcctcggccaccgtgtacacgtcgtggaaagtcaggcccttgtccacgatctcctgggtgcggtggcaggccacgaactggcccgggcggcccggcaccggctccatggccggctcggtggtgtggcatatgtcggtggccagcgggcagcgcggcgcgaacgggcagcccttgggcatgttgaccaggttcatcggggagcccggaatcggcaccagacggctgttgcgttcgcggtcggaacgcggcacggcacccagcaggcccatggtgtacggcatggccgggtggtcgaagatggagtcgacgtccgccttctcgaccgggcggccggcgtacatgacgacgatgtcgtcggccacgccggcgatcacgcccagatcgtgggtgatgaagatgacggccgcgccggtttcacgctgggccttgcgcagcacttcgagcacctgggcctggatcgtcacgtccagtgcggtggtcggttcgtcggcgatgatcacgtccgggtcgttggcaatggccatggcgatcatcacgcgctggcgcatgccgccggagaactcgtgcgggaaggacttcaggcggtcctccgggtccgggatgccgaccaggttcatgagctcgatggagcggtcgtgaatctgctgttcggtcatcttcggattgtgggtgaccagcgcttccttgatctggtcgccgatggagaacaccggggtcagagcggagagcgggtcctggaagaccatggcgatgcccttgccacggatctcgctcatctcaagatcggacttgctgagcaattcctcgccgtggtaggtgatggagcccttgacgctggcgttcttgtccagcaggcccatgatggccatggaggtcacggacttgccggagccggactcgcccacgatgccgagggtcttgccggggtacaggtcgaagttcatgccgcgcaccgcgtgcacggtgccggcttcggaggcgaagctgacggtgaggtcgcgtactgaaatcaccggttcggatgccatgccttgcgctcctgtggtgttggggttggtgttggttgttacgttgcttgcgttgcgttcgtcgctcatgatgcccgtctcccctctcactcggccttgccgccggaacgggagtacgggtcgatggcgtcacgcagtccgtcgccgatcagctgcacggagaaggtcaggacgaccagcaccacggacgggaagatcagcacccatggcgaggtctgcaccacggactggccggcgttgagcagcgtaccgagcgaggtgtcgggcgccttgatgcccaggcccaggaagctcagcgaggtttcgctgttgaccgcaccgatcacgccgagcacggtgttgatgaccagcaccgaacccaggttcggcaccagatgacgcacgatgatggtgaaggacggcacacccatgaacttcgccgcgcggatgtattcgcgatcgcgcaggctcagggtcagcgtgcgcagcgtacgggcgtagccgatccaaccgaatgcggtcaggccgatggccagccacagccagtcgctgccgccggccgccatgccgacgatcagggcgatgagcaggaaggacggcacgacgagcagcatatccagcagccacatgcccacgcgctcgaaccagccttcgaagaacgccacggccgtgcccaccagggcggcgatgatcgtggtgccgaacgagctgaagataccgatggtcaacgaacggccgaggccgcggatgatcatcgcgtacatatccgagccaccgaccgtggtgcccagccagtgctgggcggacggcggcgaggcgagggcggcgaaatcgggctcatcgtagctccactgggagaatttcgagccgaaaatcgccaaaagaatcagcagaatcagcaccaccagacccaccacggccgagggacggcgcatgaagcggcgcacgtacagctgcatgcggccggtgcggtggaagtcgtcggcgctggaagcctcctgggcgttcctggcgtcggcggactgcggttcgctgccctgcggatcggtgagttccatatcctgggcggcggcgtcggagaccatgttttcgttgtcgttcatcatgttagatcgtcctttgcgcggggctcagctcagtcggatacgcgggtcaagccaggcggagaagatatccgccagcagcgcgccggacagcgtgcacacgccaccgaacgcggccacggccacggcaccgttgatgtcgttgttggcgatggtctgggtgaagtacatgcccaggccgttgatggcgaacacgttttcggtgatcacggcgccggtgaacacgccggcgatggagaaggccacatccacggcggtcggaatcagcgaggtgcgcagtgcgtggcggcgaatggccgcgttgagcgtcaggcccttggcgcgggcggtgcgtacgtagtcggcgttcatggtgtcgagcagatacgtacgctgggtgagatggtagcccaccatgcccggaatcgtcatcacgatggtgggcaggatcaggtgctgcagatagtcaaacacccaaagcaccgggttggagccttggtaggagtgcaggccggtcacgtagaacgcgcggctgcccacgatgttgttgaagttgatggccagcagcaccaccatcaggcccatgacggcggccgggaccaccaggaagaacgttgcggtggtgttgagcacgcggtcctgccacttgtactggcggatggccgtgtacacgccgatgctcacgccgaagaggatggagagcacggtggcgagcgtcaccagctgcagcgaagcggagatacgggaggcgatggccggcgccaccggcgactggtccgggctcaggccccagttccactgggtgaggatgcccttgagccagcggaaatagcggatgacgaccggcgtctggtcgttgatgttggccagatcgagcgaccggttaatcgacgcgatcggcggatgcggattgcgcgacatgtagttcgaacgcggatccatgaatgcgctggccaggaaatacgtcatcgatactgccacgaacagcatgatcacgtagttcacaatgcgcttgatgatgtacttgaacacccaaccacctcccagataactgggaaagtgatacccccccccgctcaaaaccacaaattgagtccaatatatggaatatgggtattgacttttccgactttttcctgtacagaaaactgcgaaaacacttactgtgtattgggcaaacatccgtttgttaattttgtatttcctgagcctttgctggacatgccttatactttcgtgtcagcagtccgccggcccggatggtgacagtccccgccgccggcaacggattatccatcagcatcatcagcatcagacaggggcatcatgacgacagacgccagcgcacgggccatcaaacccgaacttctgcgtacgtacaccgaggatttcaacaaggaccgcgccaacctgatcgcggcggacgcggcggtttcggccggcgtgctcaaggcggccaccgactatcgcggcgtgcgtgcgctgccgcgcgacttctccatcgaacttaagcaaggttcgatcaccaatcaggagcgttccggccgctgctggatgttcgcctccctgaacacgctgcgttacgaactcatgcatcgctggaatcttgaggatttcgagttctccgagacctacctgttcttctgggacgcgatggagaagtcgaacacctacctggagaatgtgctgcgcacgctcgacgagcccaccgactcgcgcctgttcgaggccatcaactggggcccgtccgatgacggcggctggtggcagatgttcgccgcgctggtgaacaagtacggtctggtgcccaagagcgcctacccggagtccgagaactcccgtaattccgatgatttcaagcagtacctcaactccaagctgcgcgagttcgcagccgagctgcgccgccgttcggctgcgggcgctggcgaggacgagctgcgcacgctgaaggacgagtacatgggcaccgtgtaccgcatctgcgccgtgtcgcttggcgagccgccggagaagttcgacttcttcgcgcgcaccaaggatgacgatgaggataagaagggcgaggcctgcaagtgcaaggccgaggccgacgcagacggcaaggccgaatcctgcaagtgcggcgactcctgcaaatgcgagggcaaatccgacgccaaggcctgcaagtgcgataaggacaagtccgacaagccgaaaaccggtaaggacgagcgcccgcagattcgcgagatcggcatcaccccgcttgagttctacaagaagtacgtgccggtggacgtcaacgatttcgcgacgctggccaacgccccactcaagaaccgcccgttcaaccggcgctaccgcatccgcttcagcgcgaacgtggccgaggcgggcgatatggagttcgtcaacgtgccgctggacgtgttcaagaaggccgcgcttgaccagctcaccgccggtcacccgatctggttcgcctgcgactgcacgcagttcgccctgcgcaaggacggtttcttcgaccagtccgtggtgcgcgtcgaccagctgttcggcaccgagttcaccggcgacaaggcccacggcctcgaatacggcgacagcccgagcaaccacgccatgaccttcaccggcgtgaacctcggcgaggacggcaagccgaaccgctggaaggtggagaacagctggggcaaggacgccggcaaggacggctactacgtcatgtccgacgcctggttcgaccgctacgtcaccgagctcatcatccgcaaggaatacctcgacgacgccacccgcgccctgctcaccgccgaaccggtcgagctcgacccttggcagcccctcacccgccgctgccgctgacgttccgctggcgggagcatatattcgaatgccccttctctctgttcagagagaaggggcattacgttatgcgagtacgcccggccgcacctattcgagactatcgcggctgagctgagcaaaagtgccgtcatcatcggccaattgccggtaggttccggcctcgctaattgttccgaactagttatccacagagttatccacatctcacgcaagctagagccacataccccggttttcatagcgagcatgtgaccgctgcgctacggtggcgtcatgaacgacatattgcccactccaccgcccggcgtattcgacgacgaaccgtccggctggacccggccccacacaccgggcgttgcgtctgcgcgcaccatcaatcctgagctacgttcatcaccacgtatggcgagttccgcgccaactgtgattacaggccctgtgtcgccagcaatgagcgaaaccctcacccaacgtaagcgggaaatgcttaaacgatgcacggacgccgcgcaacagctcgggcaaccggtgctcttcggcatggccacatcgctgatactccaatccgtgccgcttcccaaggattgcgatatcgaccccgccgagctccataccgtctccgactcacaccgcacacgaatacgtgccatcgtgccgccaacgacaccacacatctggaagccgctgagcgatgcgcacaatgtgcgtatcaacaaacatgtgtacgcactggatctgatacacacttgggcacaactcgccgctcatatatcgctcgaatcgctggtcatacttggcgacgcaatccttacggcaatcgcccgcaagccgggtctggcgaacggccgcactgctgacggcatttatcaggacttcgtgcggcaagtcaccgaactcccgaaattcaacgcaaaatccaagtgcatgatcgctcttgcattcattacgccccgcgtggactctccgatggaatcaaagacccgcatcgcgacgacgaaatacgggcttccgccagccgtgacaaattacacggtgcccggcgcgacattcagcaacggtgcgccgataacgctcgatctcgcttggcccgaatttcgcgtcgccatcgaatatgacggcgatcatcatcgcaccgacaaaaaccagtggcggcgggacaacgacaagcgcgaactgctgcgacatcatcattggatcatcatcatcgccactgccgcgaacatggccgatgagccatcccaagccgaactcgcctaccgggtcgggcggcagttggcattgcgaggtgccgtattcgatttcactttgacggcaacgccactcgatgagatcgcccggcggaggcgacgaagaatataacgtttatcgcgaaagtcgtacagtatccatgttgcgccgacgctgcgcgactcggtgtccgtgtccgatgtcccggtagcgatgtcaatcgatttatgtgtggaccgggccagatttcgctgtcccggttctccatttcgcccctttttgagcaaccaagacaaaatttcattcacctatcaccccaccgtgcaatattcgccatcgtacatcggcggaattccggggttttgggattacggataatgggcgtttacaagggggggctgtcccggttcccaaaaagaagccgaaatcacgaaccgggacagcgaaatctgtcccggtaatcgcgtcaatcggttgccgtcatcaccggaacatcaactgcgcataggtcgaacgcttcaatgcgcaacaggcatgcgaccatatcgcgatagcgatattccgacggaagtatgggactcaccacgcgaccaatattatttgccgagctttggagcctcgtgcttggcgtggcggatcacggcatcggggaaaccggcgtggatgtagtcggacagcatccgcaatagcctctcgtcaaaggtgtgccgctcatcgctgctggcatcgaccaggatgaaatcccatgagtattcggtgtcaccgtcgttgatgatgagtccgcggccagtgatttttgcggccagcaacgcggcgatctgtatggcgcctcgcttgaccaaggccgattccgcttgagtcaggttgcccgaaaatgtgacggtatacatcatcagtccccccttctttgttattttctagaacagcaatgccttattgtaaacagacagcactctgccataatccttttttcaatatgcggcccatggcattcccagcattaaaaaaaaagaaacccggcggagggggccgccgggtgagagagaagagagaagaagggttcagttatggggttcgaagaacctcgccaccggtatgaacttcattccgttgacatcttctatataaccgccccatgcttggcgaattgatgtgcttgtctgggaaaagtcttggcggagtgtgacgaatttgtgacgcccgccgacaaccggcctcgcattgtcggggcttgaccgcacatacggcaacgggccacctcgcaacacttcatgtgcgaggtggcccgtcagctacgagctagcaatgccgaatcactcggcggcgagtttggccttctcggcggccagacgctcggcttcggcggcacggcgagcagccagcgcttcatcgaagcgagccagctcctcttccacggcctcggtcgggatcttggcgaagatcggcgtgggcttaggcaccacggcgccgacctcgatcgcctcgctcttccacgggtgcacgttcacaccgagctcgtaatcgccggtgatgatcgggtacgtgaagccgggcttgtcgagatcctcgacttccttgagctcaggcagcggcgagaaggtgccggtgccgccgagcgcctcccacaccctctgtgcggagtgcggcaggaacggcgcgagcaggtggttcgcgtcagacacggcctgggcggccacgtgcagcacggtgccgagacgagcctggtcgtccttaatcttccatggttcggtggcggaaatgtacttgttgatgtcgccgaccacacgcatcgcctcggacagggcgtgcttctggtggtgggtttcgatggaggagccgaccacgtcgaacgcggcggaagcctcttccagaaggccacggtcttcgttggtcatcgaatcctcgtccagcggcggaatctcgccgaagttcttgttgatg

SEQ ID NO: 1989 - DNA, 11134 bp, Unknown
  R17_18m  MAG No. k141_24708
ctggccccactgggagcggacggcggcgcgcgtgacatacagccgctgcttggcgcgtgtgatgcccacataggcgagtcggcgttcctcctgcagttcagtggtgtcttccatcgaacgcgaatgcgggaaggtgccctgttccatgccggtcaggaacaccaccgggtattcgaggcccttggcggtgtgcaaggtcatgagcgtcaccttgccggagtcctccgcctcgccgggtagttggtcggagtcggccacgagcgcggtggtctccaggaatgcggacaacgtggcgtcaggcgtgttctgttcgaattcggctgcggtggactgcagctgggagaggttctccagacgggaggcgtcctgcggatccacggatttctcaagttcggcccttaagcccgacttctccaatacttcggccacgatctcgctgggcttggagtcgtgcgcgtgcgtgaactgcgagagcgcgcccatcagatcgcggaatgctcgtagcgaggtggcggtgcgggtcggcacctcgatctcatccaagtgcatgagtgcgtagaagaagctggtgccatgctcgcgcgcgtaggcgagcagcacgccttcggcgcggtcgccaagcccgcgcttgggcacgttgagaatacgacgtagattcacatcgtcgtccggattgacgagcgcctgcaaataggccagcgcatccttgatttcgcgacgttcgtagaacttggtgccgccgacgagctgatacggctgattcgtgttgatcagcgcctcttcgagcgagcgggattgggcgttggcgcggtacatgatcgccatgtcggagtaggagatgccctcttcggcgtgcaggcgcgcgatttcggtggccacccactgggcctcctgctgggcgttgtccgccgcgtagccgacgatcggctcgcccttgccgagcgcggtccacagtttcttgggcttgcggccctcgttgttgctgatcaccgcgttggccgcgtccagaatggtctgcgtcgaacgatagttctgttcgagcatgatggtcttggcgttcgggaagtcctgctcgaagtcctggatgttgcggatgtcggcgccacggaacgcgtagatggactggtcggaatcgcccaccacggtgatccaggcggggccggacttgccggcgtttggcgcgcccgggatggccttctcccccgtgtccacgccggccagctcgcgcacaagcacgtactgggcgtggttggtgtcctgatactcgtcgacgagaatgtaacggaagcggtgatggtagtactcggcgacggccgggtcggtgcgcagcaactcgaccgtgcggccgatcagatcgtcgaagtcgacggcgttggccagggccaagcgatgctcgtattcggcgtagatcaccgcatagatggcttcaaggtcgcccaccgtgccgaactggtagccgcgctggccaggcgtgaagtcgggcgcgtgaacggcgaggttttccttccaaccggtcagattgttcttgaggtcggagatatggccgaggatcgagcgtggagtgtagcgcttgatgtcgaggttgaattcggtggcgatgattttgacgagtcgctcggagtcggcggaatcataaatggagaagccggacttgagcccgatggacttgccgtcgcgcctcagaatgcgcacgcaggcggaatggaaggtggagacccacatgcgctgggccaccgggccgatcagcgagccgagtcgttcgcgcatttcggcggcggccttgttggtgaaggtgatggccagaatctggctcggccatgcgccgaactggctcaagatccaggcgatgcggcgggtcagcacacgggttttgccggagccggcaccggcgccgatcagtagcgcctgaccgcggtattgcacggcttccgcctgctgcgggttcagatcgcctacgagttcctgcgcgctgcgtgcgatgacttccggctcgtcgtacactgttgcctccctttgaatcgcgacattcatgtttaccacatgcacgggtcagcgcaggacaacgtacacttacaagtatccatatcattcactgacatacagcaatgggaggtctaatgcaggaacttgaggagcgaatccagagcgagggaacggtgaaggcgggtgatgtgctcaaggtggacgcgtttctgaaccaccagtgcgacgtgcgtctgttcgaccgcatgggttcggcatgggccgctcatttcgccggcaagcacatcaccaagattctgaccatcgaggcgtccggcatcggcattgcgtgtgtggcggcccagcatttcggcaatgtgccggtggtgttcgccaagaaggcgcagtccatcaaccttgacggcgaccagtacaccaccacggtctattccttcaccaagcagaaggagttcccggtgatcgtggccaagaagtatctgaacgccggcgaccatgtgctgcttattgacgattttctggccaacggcaaggcgttgcgcggtctgattgacctgtgcgaggcggccggtgtcacggtcgagggcattggcatcgccgtggagaagggcttccagggcggcggtgacgcgctgcgtgccgaaggctacgatgtggattcgctggccatcgtcgagtccatgaatcccgagaccggcgaaatcacatttaggcactgagcacattgactgctcccgccagcgggagcaacagagcgaagaaaagaatcatgtcagagaagaaaaccaagaattccgtatcctttgaggcgctgtcttcgctgaacgcgccagtatccttctggaagggcattccgttcggcctgcagcatgtgatggccatgttcgtggcgaacctcgccccgatcttcatcgtcgcctcggccgcgaaaatgaccccggcccaatcggccaccatcatccaggccggccttctggtggcgggcctgggcacctgcctgcaactgtacggcgcgtggctcatcggctcgcgtctgccgatggtcaccggcatctccttcacctacgtggcggccgccgtggcgatctgcgcagacaagggctatggcgcagtggccggcgcggtaatggtcggtggcctgctggaactcgtgctgggtttgacggccaagtattggcgtcggttcgtgccgcccatcgtctccgccatcgtggtcacgtcgatcggcttctcgctgcttaacgtgggtgccacgagcttcggcggcggcagcggagccaaggacttcggaagctggcagaacctgacgctcgggcttatatctttggtcgcctgcctggcgttccagctgttgatgaagggcacggccaagcagctgtccgtgctgttcggcctggtggtcggctatgtggcggccatctgcatgggcaaggtcgatttctccggtttccagaacctcgctattgtgtccgtgccgcagttcatgccgttcaagcctgagttcgactggggttcgatcatctccatcggcctgctctacgtcgtctcctcggtcgaggtgctgggtgacaccgccgcgctgaccaaggtgggcctgaaccgtacgcccaccgaacgcgagaccgcgggcgccatcgccggcgacggcctgatctccaccgtatccggcctgttcggatgcctgccgctgacctcgttcgcacagaacatcggattggtggccatgaccaaggtcgtcaaccgcaaggtgattctctccggcggactgattctggtgctggcgagcttcgtgccggccatcgccgaggtgttcaactcgctgccgcaggcggtgctcggcggctgcacgatcatgatgttcggcaacatcattctttcgggcttccagatgatcgccgaagcgggcttcacgcagcgcaacatcacgattgcggcgctttcgctgaccatcggcatcggcttcacccaggtgagcgacatcttcgcgcagttcccggcactgttccaacaaatcttcgcctcgaactgcatcgccgtgtcgttcgtggtggccgtaatcctgaacgccgtgctgcccagcgaggagcacttcctctccgcgcccaaggaggcaccggccgcggacgccgagtgataacaacgcgacatatcagctgcgcatagtcacatgctgatgccctatcgtcttgcaggatgatagggcatcattgattttgagagagactacaagttgaaccatgagttcgagccggtggcgtgtcgatcaatcgacatcttcccattcgaggatgtctccgggttggcagtcgagtgccttgcagatggcgtccaatgtggtgaagcggacggctttggcacgtccgttcttcagaatggacacgttggcaggcgtgatgccaatttgttcggcgagctcgccgacgccaatcttgcgtttggccatcatgacgtcgagattgatgcgaatcgtcatctcaaatcacctgctcaagttcgcgcccgatccggacaaggagaacagtttccatacggccacgaacgccgcttcgatgcagagcaggaacagcacgcccataatgagatatgaccagtgcatcgacgtctggctcgggcagaggccggccagcgcgccgctcaatcccggtacggcgaatagttggccccataggcaggccagccagaccagaatcacgatggctttcaacgcgagcaacacccatcggttcatgtagtttttcatagcccggtcctttcaggtgccgacgtttttggcgacaccgcgaacatcgatatgactatatcgaaaaacgatataccttgcaaggcgtattgcgtcaaccggcattggtcgctcatatgcatataggcttcggcagactgtcagcagaccgtcagctcaacggaacgaacgccatatgagccacccattcgcgcacgagcgtgatgacggcttcgggttggtcgatgtgcgcgttgtgaccggcattatccagagtcacgaaggtggcgttgggatagtgcggcaacagggcttgctggtcttcgcatccgacgatctggtcttgcttgccggtgacgatgagcaccggaccagcatatgtgccgagcatttcctcgggattatcggccagccaataacgctgatccagccgttcgcatgccgcacggtcgcacaacgccacgccgggcaggatgaaccgttggtagcgccgccacgcgtcgaatgactggttgacgcccatggtaatgaaatcgaacacctgttcctgtggcaaggagtgcgtcagcttgggattgggctgtgcaaccacatgttcggccacatgccggccggcatgctgcgggtccacgaccggcgcgatcaatgccataccggccactcggcgaggttcgcgcgccaatacttcgcggacaagcgcaccgcccatcgagttgccgaccatggcgaatggagccgctttaccgacaaggccgtcaatggccgtttgcagccaatccgccatttccggcagcccgcaggcatgctcgggcaatgccggcgtacggccgaaaccgggcagatccagatatatacggcgaattgaatcattgccgtcaaacgccttgtcgagcatcatcagcgaacgatggtccacacccatgccatgcacgaacacgacgggcaatccatcatcattgccctcaatcgcgcagtacggctgcaattgtgccatgtgttcctctccttcaacccggtacaaatcgcctttcacacaatagcggcagcagctcccctggtgtcggagcaatcccgaccgccattctcggtttcgaggggctgatttcgtggtttggggacatccacttccgtttcaaggggctggtcattggccaaagcccaagtacgaatggcttcatgccaacgtcatttcgccgttttggagctgttgctactcggccatcagcccctcgaaacggaagtggatgtctcggaacgagcaaatcagccccttgaaacgcaaatagacgattgcgaatcggcttatcagccgcgtcaaccttgcaatacagatgtcggcgtatcattccccggtctgattgcgcggatgtcatgaagcgtgaagaattgtcacgaagtcgcgtgatggcgcagccgccattcaggtggatatgccacgctgtcatgatgacggccgagccggaacacggcaaatctcgcatgctgcataggccagccggtcacggtcagccatgacaccgaaatattggaggcgcaatgggacaacaggtgcggtgcggcagacgccgctcccatggcgcgggcgcgctgattgcagccgtcatacttgttgttgcggcgctgatcgcggcatggacgctgctgccacggctattcacgcctcacgagaccgcgcgcacggccgaggaagcatattgcgcggcggtgtcgcccgacggagcccgccgcaccttgacgcctgatcaggcgcagaacgcggcgctgattgcgaacatcgccgtcacgcgcggactgccggatcacgcggcgacggtggccatcgccacggccatgcaggagtcgaggctgacgaatctggactacggcgacttggattcgctcggcctgttccaacagcggcccagccaaggctggggcacggcggagcaggtgtccgacatgacctatgcgacaaacatcttctacgaccatctgctgcaggtgccggattgggagacgattccggtggaggacgccgcgcaggaggtgcagcgctcaggctacccggaactatatgccacatgggatgcgatggcacgcgcttgggcctcggggctgaccggcgaacggtcggcggacgtcacgtgcgcgttggagccagcaatctcctcggacgcggacgggttggttgcagccataggcggtacactgccgaatgtcaaggtctcggttatgcccctaaatggcaaaaccggcacgaacaacggcgctgcgaccaatacggccagcacaacgttgacgatcacgctgccggacggcctgtccgccgacaaccgcactcgactttgctggcagacggcaggctggctggtcacgcatgcacgtcaatacggcattgacgcactgcacgcggacggcatggattggaaccgcaaagccggcacatggaccggcaccgaaaccgccgagcagaccgtcaccgtcacgcttgcgtgatgtgacctataacgccgtcacgaccacaaatccgactgactggagcctacgccgtcgatgctgcctgaggcacgacacggatatgttttttactcgttcgaatgagcccaatccacgacggcttcgatgttattgccatccgggtccagcacgaatgcggagtaatagccgggatggtacgggcgcggaccgggagcgccgttgtctcggccgccggcggcgagcgcggctacatggaacgcctgcacggtttgctggctgtcagccaggaacgcgatgtgtgtgaccggcgtgaccggcgaagcctccgcctccggcccgtcaatcggcgacacgtagaaatcggagtgcagggttccgtcatccacgccgaatccgagcgtgggctcatgatgcgccttgacgatatagccgagcggtgcgagcgcctgtttgtagaatgtgatgctacggtcgatgtctttcacgtgcaacgtcagatggtccagcatggtcttggtcaccctcccctggttcttgtattcgattgctgcttgcagtgtaagcccgaacgtttcccacagggccgcgcatggctatgatgagagcaatcgcacgtcgagttcgagacaatattcaaaacgaatccaaggcaatagggggaatgatgatgaccaaggcactgattgtggtggatgtgcagccgacgttctgtgaaggcggcgaactgggagtcgaaggcggcaacgcggtcgccgagcggatcgccgattatgtgaacgcgcatcgcagtgagtacgcgtatatcgcaaccacgcaggactggcatatcgagccgggcgcgcactggtcggcggaaccggatttcgtggacacgtggccgaagcatggtgcggccggcacgccgaacgccgaattgcatccggcgatcaaggcgctgattatccatcatcatttcaagaagggccagtattcggcggcatattccggttttgagggcatcgaggacaataccgaccgtatccagacccgcgaggaggttgcggccgagcaatccgccggcaagacgctggccaatgcgctgaaggccgccggcgtgagtcgcgtggatgtggtgggcatcgccgaatcgcattgcgtcaaggacaccgcgctcgatgccaggaagttcggtttcgaggtcaccgtgttcgaggacctgaccgtaccggtcagcgaggagctcggtgtcgcggcccgcaaacagatgacggcggccggcatcacattggccgagtcccgctgatcaggccggatatacccagagcgagcgcacgaacacttccgtatattcaaggccgacactgccgcatagtcgcctagtcgatatgtgaagaaggcttttatggttacgatgctgctgacttcgatattccgcaacgcctcgtccgccgtgcatgaagtcgaaccgcatccgcaaggcaagcgggtcgcgttcatcccgacggcgagcgccgtggaaccgtgggggccggttcactcggcgttgagcaaacacgcgctgcaacgcctcggtttcgaggtggagcaactggatgtggaagatgtgccgagcgggtccgccgaacgcgtcacgcgtagcatcgccgaggccgactgcatctatgtgggcggcggcaacacgttctttctcctgcaggagttgcgccgcaccggtgccgaccgggccatcatcgagcaggtgcgcgccggcacgccgtacatcggcgagtccgcgggctcggtcatcacggcacctgacatcggctatatcaagctcatggaccgcacggacaaagcccccgatctcaccgattacgcaggattgggcttggctgatttccgcgtggtcccccaccatcatgcaacggccatgggccacgccgcacaacgcattctcgaccggtatggtgccgatctcagtctcaagcccctcaccaaccggcaggccctgcttgtcaaggatggcaaaacccggctgctgcgatgatgcgggtcgtcggcccgtcgcccattcggcatcgccgtggtgtgtccggcctgacatgcctatcgagcggcatcaatcacacagcaatgtggctgggaacctcgccgaacgtcaacacctgcatacatcagcacggcaaaatctgccgaaatcgtccggcgcacgagatgccagccggccccatccgtcacctcagtgccgtaccgggccaggcatggccttgagcaacgggatgaatccggcgcacagtaccagggccacgacggcgagtatctgccagtgggcggagccgagccagccgccccacgtgccgacggcaccgccgatcgcatacgcgaacctggcacggccgctgaatttggccaggtcaccaccgctcagcagcagttgtcgcgatacgatcacgccatgcgccagcaggccatagccgaggttgttgatgagccatccgacgcacaccgcggcaaactcgggaaccagtacggcggcaagggaaatcgccgtggcgattgccccgatggcggacacggcgcacatgccgagttttgcggagagccgcatgtagacaaacgatccgacgatgctgcccacgccgccgaatgcgtagaccacggtcagcatatcgctgccgtaccgggagccgatgcccagcaacgcatagcttgcccacagcgacggaatcagcgcaagcagcagcgatgcgatcagcagtctgacccgggtcgagcgggtgaccggagtgcgctgcggcgcgtgtgacgtgtcggccgccgtggattcgtcggcggagccgtcgccgtcatcgccgcccgcaccatcgttgccgaatcccggcatgaacttgcgggtgcggaatcgcgtcagcgcgcaggcaaatgacagtgccgacgaggtgagcagcatggccatgatggaggcgttggccaaggccgatccggcaacctggcccagcaacgtaccggccacgctggcaatcacggcgacgtagccgctgtacttgacgagcatgtcatcgtcgtcgccggccgcatccacctcgaacacttcggaggccacgtcgatgacctgcccggtcatcagcagcaggcatgacagggccagcagcagccacttccaatacgtccaaccgttgggcaccagcgcgaccgccaggcacagtacgcctttcacgccctccgtggtcgcaagcgaacggaacgagccgaaccgctgcacgatccatgcggataccggagaagcgaagtcgatgaccagattgaacgtcttgcggaacgcgatcacccatgccggcagtccgacgatcagaatcgaaggaatcaccgacccctcgaaaatcgcgttggacagcatcgaaaacgtcatacccaccaacgcccatcgcaacgccctgctcaataccgacaatccgcgcataccttagttcctcgtccttgccagtgtaacggaattatgacttctcaatcgtccccccgctgtctaaatgaaagtgcaacaccctttcactggttatctggacaatctccaatctaaagggtgttgcactttcatttagacagcgccccccatatccgcatgtcactgctgccatcataaggagccagtagacgcctttaagcgttctgacaaccatggaatcgaaaatcgctatgcacatcatagaacaacactgccaaggcaagaggtctgaccagtcgctcaatgaggacgggctgatcatcaccgatggtttcgcggcagtggtggatggggtgaccagcaaaagtgtgcaccaccctgccggccgtgttcttggccgcgtccagcaccggggtgatgtcagcggcccattttcacgcaccgaacggccggcgagcatgtcgttgccgcccacgcacacgatcagcacatccggccggtcattgatatcgccgatcatccggtagcgcacacgtcgagcggtcgcgccgagcttgccgaccgtacgccaggccacc

SEQ ID NO: 1990 - DNA, 38179 bp, Unknown
  R17_18m  MAG No. k141_24764
gcggacagggcgagattcgaactcgcggagggttgcccctcaacggttttcaagaccgtctctttaggccgctcagacacctgtcctgatgcgcgttcacacgcgcaagtattcattatacagaagggagggatgttgatattcggcagtgcggtcggtcttggattcgcctgctggctattagcgatctctccctcagtcagctacgctgacagctcccccattaaagggagctaaagcacgatgagactcaggcctcccacttagtgggctcgatgacttccttgccgcccatgtaggcgcgcatggcctgcggaatctcgatggagccgtccttctgctggtggttctccatgatggcgaccagccaacgggtggtggccagcgtgccgttgagcgtggagaccggacgggtgccgccatcttccatacgctcgcggatgttcagacggcgagcctggtactcggtgcagttcgaggtggaggtgagctcgcggtagcggccctgggtcgggacccaggcctcgcagtcgaacttgcgggcggcggaggagccgaggtcgccggctgcggtgtcgatgatgcggtagggcacttcgaccttggcgagcatctcctgctccatggccagcaggtgctcgtgctccttgtaggagtcctcctgcttggcgtagacgaacatctccaccttgtcgaactggtggacgcggatgatgccggaagtgtccttgcctgcggcgccggcctcgcggcggtagcaggaggaccaaccgcagtagcgcagcgggccgttgccgaggtcgaggatctcgttctcgtgcatgccggcgagcgccacttcggaagtgccgaccaggtactggtcgtcgggctcgcgcagacggtagatctcgtcggcgtgggagttcaggaagccggtgccgcgcatgacctcggggcgcaccagcgtcggggtgatggccagcgtgaagccgtgctcctcggcctggtccacggccatggtgagcatggcgatctgcatacgggccacctggccacgcaggaagtagaagcgggagccgccgaccttgacgccgcggcgcatgtcgatgccggccacgccggtgccgagggtcaggtggtccttgggctcgaagccttcggccgcgaagtcgcgaatctggccgaccttcttgacgaccacgtagtcgtcctcgccgccttcgggagcttcgggctccacgatgttggagagcttccacatggcggtggtgtattcctcggcggcggaatcggccttggacttgtattcggagaccttctgggacagttccttggtctcggcgatgagcttggccttctcgtccgccggggcggaggcgaccttcttgccgatttccttctgctgggcgcgagcctcttcgaaggccttcagcgcctcacgacgtgcggtgtcggaggagagcacttcgtcgacgagttccacggactcgccgcgcttgcgctgggattccttgacgatatcggtgtgttcacggatgaattgaatatcaagcatgggcaccagactagccgcgtaagcagacaccgacaatggccgaatgcgcgggagtcacgcggaaatcacagggaagcccgggaaagtccgcggacgggtccacccggccaatttcgtcagatgagacgcgattgaaccataatcgcgccccacggggctgttgcgtgcaggaaatgttcacgtacggcgcaccatggccgcaaacgacctccccaccgataacaataggagccatgcctcagcctgccctcaccgtgtttctgatcatcgccgcaatcgccattgtggtggtgctcatcgccgtcatcgtcatcgccctgcgcgcgcagcgccgccgcaagctggctcagacgctggagaagcgccgggacgacgaggtgcagtacgccttcatcgtgaatccgtccaaaccgcaggccgaagcccgccggctgcatatccagaggttctgcgaggccaaggggctcaatcgcatccgcttctacgacacccagcttgataaggacggcagggtctgcgcgcttgaggcgctggaggacggcgccgacgtggtgatcgcggtcggcggcgacggcacggtgcgcacggtggcgagcgccgtctccggcaccggccatgcgctgggcatcatccccatcggcaccggcaacctgtttgcccgcaatatgggcgttcccgtggacgatatcgacgccgcgctgaccgtggccacctcccacggctcccgcctggtggacatgggccgtctcaccctgctcgaccacccggaggacgaccacggccacgccttcctcatcatcgccggcatcggcttcgatgcggccatgatcgacgacaccaaccccgagctcaaggcgaacatcagctggctcgcctacttcgtgggcggcgtgaagaacctgttcgcgccgaagttccgcggcacgctgacagtcaccagcgccgacggctcgacccacaccatcaagaatctcgatttccgcacggtgatggccggcaactgcggccagattcccatgttctcgctgatgccggcggcatcctatgacgatggtctgctggacttcgaaatcatcgacaccaccggcggcatcctcggctgggccaacctgttcggcgacgtggtgcaccagacgatcatcggcaagcccgaacagaacccgctgtccacgaactcgaccatcgaacaggtccagggtgtcagtgccgaaatcacattggaaaagccggccaaagcgcaggtggacggtgacatgctgccggaaacccgccacatccgtttctcggtggatcaccgcgcgctgatcgtgcgcgtgcccgacgcctccgcgctggaaaagaccgcgcaggccgctgcctcaaatgccacctcgaatttcgccgaaatgaccggtacactcgagccgattcgctgattcgccaatccgctaatccgttactacgatgcgtggccggtgactcgggcgacatgcatcgccaaataagcgatttcgtcgtcgctgatatccgtgtcgaggcgcagttcgagcagggaggcgatggttcgcgcgcatcgcagcgcagcggggtaggactcacgaatcaccttcatcaccggtgccggctcgtccgtcagttgctggtgctggtggatgcgtacgaacaggtagcgcaggtgggtgatgaaccggcccacgttcacggaactgcggtccaacgtgatgccgtagctgtggtcgatgatgtcaagcagttgctggatcacgcccgtcatcgtgtacgtataggacaggtcgccggtggcgaagccggcgttgaccagatgcatggcaagcgcggtggcctcgccgtccggcagcgtgacgtcgagccgtgcattgagcgatgcgagcatcgcacgcccctgcgcgtattcctgcgggtacaggttgctcacctcgccgagcagcgggtaggtgatgtcgatgccgcgccgcacccgctccaccgcattcgccacgtggtccgacagggccatgaccagcgtggtgctgccggtctcgcgctcccccagtccggtctcctgcatggattcgacgaccacgcggatgatttcgggcggaatgtccgccagcatctgcgccagatggtcagggtcgcgcccgtccgatggcacgaaggtgcgcacaactttcgactcgtcgaccgtctgccccggcttggcctggaaccccagtccgcggccggtgagaatcacctcaccgccgtcgccgcctttggcgagcacgacgttgttgttgaacactcgcagtatttccatggcatcctttcgcaacgtcattgttccacatcgatgatcgggctgccggctgatacggttttgcagtcgccgccgttgtcgtcgccgctaccgtcgccgatcaacggcgtgaccacggtcagttcagcggcgttgaccaccgtcaccaccaccacaacgctgtgcccggccgccgcgactttgccgaaatccacggtggccagtggctctcccgccgcgatccgctcgcctttgcccacggccacgacgaatccctcgccatccatattgacggtgtcaatgccgacatgaaccagcacttcgatgccgtcatcggttttaatgccgaaggcatggccggtccgggccacggttttcagcgtgccactgaccggtgctagcacggccgtctcgccggccgtctccggcacgacgcctacaccctcccccagcgcgcgggaggcgaacaccggatcgccagtcgcttccagattcatcaaccggccggcgaccggcgacaggatggcgttggagtcaggagtccgatcggaggcaggccgcgatggggaatcttccgcagactccgcatccgacgatgtcgcgccaatccctctcaccgcatcctgcgagcgtacgttctcgcccgccgagaccatctgcgcctccgtggcgcgcggcggcgtacggtacccgaacagcaccgtcagcaccatcgccattacaaacgcaacggcgatggacagcgcgtacacccacattctgtcaaacaccgaaatcgtcagcaacgaggagaaggcgaacgccgtagtcgtgacgccccggaccatctgaccggatggcagcacggatgggaacagccagccaagcaccgcgctggtcacgccgccggccgcgcagccggcgagcagccagcggtagacgcggcggtgatgcagatggatgccgtacaggctcagttccgaaacgccacccagcaatcccgcgagcaacgcccccaccgcggtctgccgcatggccgaatccttgccgcgtacggccagcacgagcacgccagcggtggcaccgaagcaggcaaagttccatacacccatcggaccttggacgaaatcgtagccgagcgcctgaatgttcatcagcatcagggcattcaacggccagtgcagaccgagcggcacgagaaacgggtagagcatcgggatgatgagcgcgaataggaacggtacgtgcgcgttaagccatgctgtggccgctcccagcccaccgccgagccatattcccagaggcccgatgaccagtatggtgagcgcaaaaacgacgaccagtgagaggaatggcacgaacaccagctgtacgctgtcgggaatgacgcgcttcaacccgtggtagaccacggcgagcacggcagccatgagcaacggcacgaagacgttgccgccgtagtcgttgagttgaatcggtatgccgaacgccgacacggtgcaggtttcggcgccgaatacggcgttggccgagcattgaatcgccccggagagggcgctggatacggacgtcccggacattccggacattccggacatcacgccagtaaactgcggggtcatcagcgcggccataatcgcgccgccgagccaggggtcgacgtccagtttcttggccgcattgtaggcgatcataatcggcagaacggtgaacacaccctcccaaatcgccttgagtagtatccagccggcggaggtctcgccgtcaggcacgatgccgagtgcaacgatcacgttgacgatggcgatgaccagcgaggcaccgagcagtacacccagaatcgggcggaacgagtcagacaggtagtcgaaaaacgcggcagcccaagcgcggacggcactgccccactcgcggacggtacgaggcgtgaagtgacgggatgtattggatgggccgcaactttgttcggcgtcggtggcagtatcgcgcgatggtgcggcatcgtcggaaaggtacggcgcggactgcgcgggttgcgtgggctgtgtggattgcgctgactgcgcgggctgcgctggctgagtgggctgcattggctgagtgggctgcattgactgagtgggttgcgttgactgcgacgctgactgcatcactgccgatggcaattgcgctgccggcatcaatcgcgccgtccgcagccgaacgatctgctcgtacaccgaggcgaccgctccgccgatgatgacctgataacgattgccggctcgcgggaatgcaccgaggactccggggacggattcaagaccgtgctggttgacatggccggcatcggccagttcgaagtgcagtcgcgtggcgcaatgggtcaggctggtaatgttcgcggggccgccgacggcatcgacgatgcgcgccgcaatcactgcaggcgttgcgttcgatgcgttcgccacggttcctccttgctgccgtatgccactgtgttccattatcggcgctgggtgccccaaaagcacggcaatgccggcaaagcatcgcgaaacggcaactatgcgctacggtgctccgcgatggtgtcccgccataatgttccgcgatgatgcttcgccacacccgttctccgtatttgccgcagcgcccattccgacatcattccaccatgcagaatcctgcaatcgttgtcaaaaatcatcgttttttgccgcctattcggagtgtcgcgactgcggaagtcgtattctatctttcacacacgttgcgtagcagggttgttactcaaaacgaggcaagacctggagcgacgtggaatttgcgtatcgtgatatgcgaattccacgttgttccaggtctttttttgttttcgggcgactgcagacaatcgaagcctgaccttgcacgcggcagaggggccacgcaacaggcgcggtccgtcaacggcgaaaggacaaggcaatgacgacgacaacggcatcacccgtatcgaaacagacggcatccgcggcgcaggaaaccagcgcaaccggtgcggcggccaccgcaaccgaaaccatcgaaaccggcgtggccggagtggcgggcgcggccacaaacgcggcagccaacgcaatcgaggacctcgaagccgccgaatcgcacggcttctccacgcgcttcccgctcaacagcgcattcatcttcaccttcggcgcgctcggcggcatgctgttcggtttcgacaccggcatcatctccggcgcctccccgcttatcgaatcggacttcggcctgagcgtctctcagaccggcttcatcacctcctcggtgctgatcggctcgtgcgcaggcgcgctgtcgatcggcgcactgtctgaccggttcggccgcaagaagctgctcatcgtctccgcgctgctgttcctgctcggctcaggcctgtgcgcctcctccaccggattcgcgatgatggtgtgcgcccgcatcatcctgggtctcgccgtcggcgcggcctccgccctgaccccggcgtacttggccgaactggcgccgaaggagcgtcgcggctcactgtccacgctgttccagctcatggtcaccttcggcattctgctggcctacgcctccaacctcggattcctgaaccacaacctcttcggcatccgcgactggcgctggatgctcggttcggcgctggtgccggccgccttgttgctgctcggcggcctgttgctgcccgaatccccgcgttatctggtgaacaagggcgacacccgcaacgccttcaaagtgcttacgctgattcgcaaggacgtggatcagacccaggtgcagattgagctggacgaaatcaaggccgtggccgcacaggacaccaagggtggtgtgcgcgaactgttccgtatcgctcgtccggcgctggtggccgccatcggtatcatgctgttccagcagctcgtgggcatcaactcggtgatctacttcctgccgcaggtgttcatcaagggcttcggcttccctgaaggcgacgcgatctgggtgtcggtgggcatcggcgtggtgaacttcgtgagcaccatcgtggccacgcttatcatggatcgtttcccgcgcaagggcatgctgatcttcggttccatcgtgatgaccgtttcgctcgcggtgctcgccgtgatgaacttcgtgggcgacgtggccgtactggcagtgccgacgatgattctcatcgctttctatatcctcggctttgcggtctcgtggggcccgatcgcctgggtgcttatcggcgagatcttcccgctgagcgtgcgcggcatcggctcatccttcggctcggcggcgaactggctgggcaacttcatcgtctcccagttcttcctcgtgctgctcgatgcgttcggcaacaatgtgggcggcccgttcgcgattttcggcgtgttctcggccctgtccatcccgttcgtgctgcgcttggtgcccgagaccaagggcaagtcgctggaggaaatcgagaaggaaatgaccaagcgctagacaaccggcacacgattcgcacaaaagttgacaactcttaacataagagtacccaaagtggcgaaaaacgtggcagaatagggaacatggtagcaaacaatgcgggtcagcccgccaccccagcagatctgattaatgtcgatgaggttatcggcaagtactatgacctcgtccccgatcccgaagtccccgagcagcgtgtcatcttcggcacctccggtcaccgcggatcgtccctgaagacctcgttcaacgaggcccacatcatcgccatctcccaggccatcgccgaataccgcaagaaggccggcgtcaccggcccgctgtacctcggctccgacacccacgcgctgtccggcccggccaagaagaccgccatcgaggtgctcgtcgccaacggcgtgcacgtgcgcgtcgactcccgtgacgacttcgtgcccaccccggtggtctcccaggccatcctgacccacaaccgtgcggtcgacggcacccagcgcttcgagggcgagggcctcgccgacggcatcgtcgtcacgccgtcccacaacccgcccaccgacggtggctttaagtacgaccccgtcaccggcggcccggccccggccgagaccaccaacgccatcgccgctcgcgccaacgagctgctcggcgacttcaagtccatcaagcgtgtgccctacgaggaggccatcaagtccgagtacgtcgagggcttcgacttccgcgagcactacgtggacgacctggagaacgtcatcgacttcgacgtgatccgcaactccggcgtgcgtctgggcatcgatccgctcggcggcgcttccgtgaactactggccgctcatcaacgagaagtacggcctgaacatcggcgtggtgcgtcctgaggtcgacccgacctggcgcttcatgaccatcgaccacgacggcaagattcgcatggacccgtcttccccgtacgccatgaagggcctggtcgacgagctcaacgccggcgcctgggacaagtacgatctggtcggcggcaccgacccggacgccgaccgtcacggcatcgtctgcccgaactggggcgtgatgaacccgaaccactacatcgccgtgtgcgtggagtacctgttcggcggcaaccgtccgggctggcctgagggcgcagccgtgggcaagacgctggtctcctcttccctgatcgaccgcgtggccgcatcgatcaacgcgaaggtcatcgaagtgccggtgggcttcaagtggttcgtggacccgctgttcagcggcgaagtcgccttcggcggcgaggagagctccggcatgagcttcctgcgcaaggatggccgcgtgtggaccaccgataaggatggtctgatccccgacctgctggccgccgagatcactgccaagaccggcaagaacccggcccagcttcaccaggagcaggtcgagcgcttcggcgagtcttggtacaagcgcgtcgacaccccgaccacactggagcagaaggccaagttcgcggcactgtccggcgacgacgtgaccgcctccaccctggctggcgaagacatcaccgccaagctgaccgaggcaccgggcaaccacgccaagatcggcggtctgaaggtcaccaccaaggacaactggttcgccgcccgcccctccggcaccgagaacatctacaaggtgtacgccgagtccttcgtctcccccgaggctctggacaaggtactcgacgaggccaccgtcgtggtcgacaaggccctgagcgagtgaaatcgctgcgttagtcgcgttcaccgcaaccaataaggctctgcattggattcatgcaatccactgcagagctttttttagcgcatatgcagttcgcgaccactgaaacacgcaggtcaacggttctcctcatgcaccgtgactgcattttctcaacatcactgcagggcaggacggccagatgaccgcgaaacgttcgcctgcctaccatcatcattgtggggtcacagcggccagatgaccgccgaagcgttcggtcggcttgcatcatggtcgagttttaacatcgttgtgggacgccacgacgaatttgcccattccagagctgccatcccacaaaagcgtgggacaacagctaagtcaatcgttttacatttcccccatcccacacactcaaactggaaaccccggaaagacgccattcctgccacacccgtcacagccattacccgaggggccgtgggacgccacgcaaaaatcggcaaaacatgcgtagcgtcccacacccattggcgcaaatccacgctcaatgcaccgacaacacccccaatcgaccactatgacacatttccctccacaatcgaacactagtcattcacgaaatccatcactacgaggcatcgcaatcgaacggcatgcaatatcaagcacacaccacaacaacaggtcgtacaaatattgcctttacatcagtccgtttcgaacatcatggtcacagcaggctctgcgccaactcttcaagagacatggcaactacatgaaactcgaatacggcaccgcgcgaagcaagcgccctcgccacgttgaaagcgaattcagcacgagcgtcctcgttagcgatacttgccgccgtggcgacgaagaccagccatctccgcccgaccagcacaccccttttctcttggtcacggcgccattgagtcttactcgtacgatgatgatcgccatcatattcaacagcgaccttgaactccggccacgctaagtccaacgttatgggagctccagatgcaaaagccgcgtccggcaccacatagttcgcaaccggccgtggaatcccatgcgctaccagagagagtcgttcttctgattctttgggcgaatcagcaccaggtgatatcagaggcaatgctcgaacgcaggacgggcgccctctgaatcgggtaaactgctccacgaacttcaccaaatcctgatagattgcagcagcatcacgatccttggccaatactggctgtttgctcgtagcagcgatgacggcatccccgagcacaatcagggactcaaaagaaacatacggggcaagttgggcccatacgtgaaacaggtccagcgcaaacacgtgttggttcatttccacattggcggctttagccgcatgtttccaaatatgcgtttgcagtggtgcatggcgtgtacggaaccgcttgctcttaacgctggatacagtgtgcagcttggccgagtcgaggtcgcaatcggcgggaatcggtacggattgcagagcgagggaagtggtcatgccgaaaagcagcttcttgcccgcccgtttcgcttcctcagtgcagcgtgcgaccatgtcgcgtctgcgctgggcgaggctttcgctcatggtcggtgtcgctgcagaatcatgtgcaccactgttcggcgatgacgagtcgcgagaagtcgggtatttcgagtcagtagaaaatgaccccgcaaattcgggcggaacaaaaactgcctccgattcttccggaggctgatcgtatatagagcctggcagagctccatagttggtgatgccgtcggtcatcctgttcatgacaccaccatatgggtagtgggtgcggaaacggaagccgatccgaggtatgtggtcctagcttcacttacgcacattcattgtggataaccatgtggacacctcacttatacacatagtcatccacctcttcaaccccgatttgacacactaactgtatctgatatgattacagtatcataactgtacacatcatagttacagtatcgactcggtaaggaggtcgtttcatgaacggcgaccattcactggcagtgcacgcattggtctaccttgaccatcgcgccacacacctgcccagtcagatcctggccgagaacatatgtaccaatgcggcgcgcgtgcgcaaagtaatgcgaccgctcgcctcagccggactcatcgccactaaagagggtgctgaaggcgggtacgctctggcccggcccgccgccgaaatcactttgcgcgcggtagcggaagccaccggcaccacttttgtgaaagtgaactggacaccgggcgacgtacacgaggactgtctggtgtcatcttcaatgggcgcagtgatgaacgacatctatgccgagctcaaccgcacttgcctcgaacaactcgaacacaccaccatccacgacatcaccgaacagatattcagcgagcgcaaaggctaataatcccgcgcgtttcccctagccagcatcagtcgataacgcttcggcagtcaaagaagaaaacagacgccgcacggcacacaacacatcagcacaacgcactcttatcactcgaatacgtaaggaagtaaccatgtccatcagcacacccaatgccatcagcacacccagcacctcccccactatcaccaccgacgccctgatcattggattcggcaagggcggcaaaaccttggctgccaagctcagtgcagccggccgcaaggtcgtcgtcgccgaggcaagcgccgacatgtacggcggcacctgcatcaatatcggatgcttgccgtccaagtcactgattttgtccgccgaacaggcgcggcgggatggcgcgaacagtactcccgaaacccgcgaagcagcgttcgaggctgctatcaaggagaagcgccgcgtcacttcgatgctgcgcgacaagaactatcacaagctcgccgaccaagacaacatcaccgtaatcaccggccgcgctcacttcaccggccctcatagcgtggaaatcgccaccgctgagggcccggtcgccgtgaccgccagcaagatcttcatcaataccggtgccacgccgcgcattccggatattcccggtatccacactacgcccggcgtctacaccagcactgggctgatggatctcgacgatatgccgcagcgactggtgattatcggttcaggattcattggacttgagtttgcctcgatgtttgccgatttcggcacggcggttaccgtgctgcagcacaatgccgagttcctgccgcgcgaggatgcggatgtggcggccgcgattcgcgcacagttggaagcgcagggcgtcaagttcctgttcaacgcggataccaaggccatcgcgcctgctgctgacggcggcgtcaggttgtccgttgcggtgaagggtatgactcgcggcgcatcgcaagcttgcgattccacccccgccggcaccgggaacgctcataccgatatcaccggtgccaccgacgccaccggcgccaccggcgccaccgacactacaacaaccaccagccccactagcaacccgaccgatcacgccacgatgtcacacgttcaaacgaaaccatcagacgatggcgagccgcggttcgccgagccggctgaagcccgattctgcctgaccaccgacgcggtactggtggccaccggacgtacgccgaacgtcgagggactgcatcttgaggcagctggcgtggagctcaccgaacgcggtgccgtgaaagtcgacgagcttctgcgcaccacagcagccgacatttgggctctgggcgatgtgaacggcggcccgcagcacacgtacatttcgctggatgactatcgcgtggtgtggtcgcagctcaatggttccgaccgtccgtacacggtgaaggaccgcaagcatgtgccgtcgagcacattcctcgccacgccttactcgcgcgtgggattgaatgagcgcgaggcgaaggcggccggattggattatgtggtcaagcgattgccggtggccgctgtgccgaaggcccaggtaatgcggcgaccggatggtctgatgaaggcgattgtggaacgcaatactggccgcattctgggtgcgatgctgctttccgtcgagtcgcacgaggtgatcaatatcgtcaagttggcgatggatcttgacgcgccggccagcacgttgcgcgatatggtgttcacgcatccgacgattgccgaggcactgaacgacttgttcgcgtagtttgtccgcatagcacgcccgcgcagcatgacccgcgtagcgcagcccgcaacagactcccctaatgcgcgcgaaggtcctcatcgacgtaaaccgatgaggaccttcgcgctgtcgtcatgatccgtacgtgacagcaatcacgtccgaaccagccgttacttcaagccgagcttacggtccagaatgtcggaggcatccaatcccaagcggcgtcggatgaaccagccaagaccgagcggcaggccgggagccaaggccatgccgcctggaccgagtgccacggttttggagttgcctgcgataagcatggtgcccttggatgcggccgtggccgtcgaaccatcgctgtccgcctctggtttgaggatttcgatgttgccgtcactggttttgtacagtcccttattctcattccagataccggatgcgccattgttgccggcctcacccgcagagaggaaatgtcttgtttttcttgtgagcgctcacctattcacgcgcgatggcatgtttttcaagcaaagtcaatatgtgtgatgttattcacactcttcactacgttgttttgcctcgcactgggcaaccccacttcagcaagagattgcacagcttgcgttagggtggagaacatgactatcacagtatccacagatgggtccgcattagggaatccaaacgggccaatgggctgggcctgggccgatcatgagcagaacgccggcggcaagcccggccataagcacgacgaccatggttatgatgcgggcggcgcgaccaacggcaccaatcagattggtgagctgtgcgcagtgctggaagctttgcgagcgcacccgggccctgagccattgctcatcgaatcggattcgcagtacgccatcaattgctcgaccaagtgggtcaaaggctggaagaagaacggctggaaaaattcgcagaaaaagcctgtgaagaacaaagagcttattcaggcgatcgaccgtgagatctcacaacgccctggcccggtggatttccgatgggtcaaaggtcacgccggcaacgagggcaatgagttggtcgatgaactggcacgcacctatgcgggcgattgccgttctggtgcgcgcgacggctatctgccgattgaaggctggcagtcgctactgggctccgaatacgcacatggcaccgatgtgcctccagacgtgcagttggtgctggatggcaaggcggatgcggcaagtttgcgcaagccggctgcggcgacggattcgacggatgccacaaggccagagaccaagtcttcgtcacccttagcgacacaatcagcgcaacctgtacaatcagcgcaccccgtacaccccgcaaagccaagcggactgacggtatccggtacgctgaccttctcccccgcgccgaaaacgagcccgtatttcaacgggcagccgatgctgatcaaaggcagcatcgaaatcgaaggctatgtggacggcgacggcaacctgaccatcgccaacgcaccattcgtacgacactaacacccaaacacacgaatatgtaccgcaatcggacacgatgacacaaaatcgctcattcgcgttaggataggagataaggcttcacgccgttgatccatgcggcggaggcaaggatggcaaaggagaaaccatggataaggcacagcaggatgcgctgaagaaggcggccggcatcgaagccgccaagctcgttgaaaacggcatgatcgcaggcctcggcactggttcgaccgtgaagttcctggtggacgagctcggccgccgtcatcaggaggaaggtcttgagttcactggcgtaaccacgtctcgccgcacgcaggtccaggctgaaagctacggcatcaagatcgtggacatcgacgacgtggaccacatcgacgtgaccattgacggcgccgacgaagtcgacaagaacttcaacggtatcaagggcggtggcgctgctctgctgtgggagaagatcgtggccaccaactccaaccagatcgtgtggattgtggacgagtccaaggttgtggacaccatcggcaagttcccgctgccggtcgaggtcattccgttcggcgctggccacgtcatcaagaagttcgaggaccgcggctacaagccggtgcttcgtcttgacgccgatggcaaggaagtgcgcaccgacgagaacaacttcgtggtggacctgcacctggagcgcatcgatcacccgcaggagctggccgaagacctcatcaacacggtcggcgtggtggagcacggcctgttcctcaacatggtcgacaaggtcatcgtcggcgacccgaacggcccgcgcgtgttgaccaacgccaacaagtgatcgtctcacatcactgaacttttccaagcccgcatctgtacatcgcaggtgcgggctttactgttgcccgaacaaggcaaaggagccaaaaagagaaaccccgcgaccataacgatcacggggtttctgatgccttgattgcaggtaagactacttacgctggtggcgggtcttacgcagcagtttgcggtgcttcttcttgctcatccgcttgcggcgcttcttgatgacagaacccatctgaagcctccatttcgattaatcgtaaaagttgcaacttgcaccataatacacgtgttgccagacagaggaaaccagtatgttgtcgatagtccgcatatgccctgaacgcagttggggcatccacatcagcaatgtggatgccccaacgttcataagtttgtgcagcagctgacagccgatactagatactacatcgggaacttctggtagaagcgatcgaccgcttccttggtgccggtagcttggaagaccacggtatcgttctgccagatggcagcggcgttcttgctgttggaggcatcggccttcaccacgtacgcgcccgtgacgttgccggaaaccttgacgttgccggatgccgactcatcgccggtctgcgcagcgaccaacgcatcgtactgggtcttggcattgtccgccgacgaccactgcgcggcgaccagcgtgacatccttggcggcatcaccagtggagtaggtcagagtgtactcctcgagcggcgacgcggaattccacgtcgtggaggcatccgccttggtacgcgcgtaattcagcacgctgtccggcatggccttcaacagctcactggcatcatccggtaaagctgtggcgtcgatggtcggcttgatcggctcggatgattcggttttctgctggctgttttgggtggtagtggaggtgccatcattcttctggatggcccaacccggccacacaaaggccgaaagcactgccaggataatcacaacagctgcggcaaccaccactgcaatcaacttgccatgggattgtgtggtcgaggagttctcactattagtcatgccccgattctctcacagccgcgtgacgctagacggccgtaatcttagtcgttgtgcgccagccgcgtgaaactcttgtgaacggtaaaaatttaccgtccgctggtgtttgggttagggtgagaccatggcgaaatcaagtgtgcagtatgtatgttccgaatgcggttggaacgggccgaagtggtacggccgttgccccgagtgtggtcagtggggcacggtcgaggaatttcacgaggctcggccggcggcaggctctcgcacggccgctcccggccgaacatcacgcacgcagtcggttacggttgccgacaacgccagatctgcagcccgtccgattaccgaagtgggcacggaaagcgtcgagcggctcggtaccgggttttccgaattcgaccgtgtgctcggcggtggcgtggtgccgggttcagtgacgctgatagcgggcgaaccgggtatcggcaagtcgacattgctgttgcagacggccggcaatatcgcgcgcgttgtggcgggagacagtacattccgaggagccggtcagcggtctgcccaacagtcgggccgggcgcagggcggcacatcaaacacggtgtcggtacagggcaacgcaccgtcggtacatgccaataccgtgctgtacatttccggcgaggaatcacaggcgcaggttcgtttgcgcgcttcccgcatcaacgcggtggagccgaacttgttactggcctccaccaccgatctgtccacagtattggggctgatcgaacagaacaagccggccttggccattgtggattcggcgcagaccatcgtctcgcaggaggtcgatggcatttccggcggttcgactcaggtgcgcgaagtggcaagcgcgctgatagataccgctaagacgcttgacattccggtatttctggttggtcatgtgaccaaggacggttcgattgcaggcccgcgcacattggagcatctggtcgatgtggtctgccaattcgaaggcgacagcgagaccgcgctgagaatgttgcgagcggtgaagaatcgttttggtccgaccgatgaagtcggctgtttcgacatgagcggtgagggcatcgaagaggtcaccgatcccgccggattgttcctgtctggagacggccctgatgcggccaacgcggcacccatggaaggcacctgtgtgacgttcacattggatgggcatcgcagtctgcctatcgaagtacaggctctggtcaccacgtcggtgctgcccacacctcgacgtgcggtcaatggcgtggaccccagccgtatcgccatgctggtcgcggtgctctaccgtcacagcaagctcaacctgctgtccaacgacctgtatatctccactattgccgggggccaggccaaggagcccggttccgatttggcgatagtggcggcactggcgagcgccgccacgtcaaaacccattgcgcgagccacgtgcgccattggcgagatttccctgaccggtcaggtgcgcccggtaccgcgtatggaatatcgccttcgcgaggccgcgcgccttggctttacgacggcagtcattcctccgctgcgcaagccggtgcatgtcgagggacttcggctggtggagtccaacacattgtccgacgccttagatgccttgggagtgcgtaaatagccctgagatatgcctcaggcggtaagacgcttggtctcttcgacgttgcgcttgagttcgtcaacgagttggtcgggaccatcaaacttgacctgcgggcgcaggaaaccgacgaattcaacgcgaaccttatggtcgtacagatcaatccactcatcggtgatgcaataggcctccaccacgcgttcgttgagtcctgttttctcgctgaaggtgggtttggtgccaatggagatggcggcaggccagcggttctcaccatctaccagccaaccggcatagacgccgtcgaccggaatgtagcctgcaatgtcggagccaagattggcggtggggaatccgatggtgcggccgcgctcctcaccgtgtaccacttcgccttcgatggcgtgcggagcacccagaatggcgttggcatcctggattcggccatgagccagcaggtagcgcacattggtggagctccaggcgcgcattgccttggcctggttcttcttgctccatgcgcggcgctcggccttggtggcattggccagcgggtcgatgggctctccccattcgctcggggcttccggcttgaaatcgcgcggaatgcgcacttcacccgggccacggtcatcgaccacatcaagttcgaatacaccggtggcggcggcaagattggcgatatgcttcacatcaccttctcgccccttgcccatggcggcatcctgcccgaggaccagcgtacgcatgcccagcttgccggtgagtctgccaaggaagaaaatgtatgacatgtctgcgaaggccagcgtgtagtgcaccaccaacacatggtccacgccgaactgttccatgcggtgcagtcgatcatccacactggtcaaggcttcggcatccacgttctgcaccgcgggttcctcgccatggtgcgaggcggcccagccgtgcacgaatgcggggcgcgggtcaaacagaatcaccacggaaaaagcatcatgctggtgcgcgagttccaccacacgcttgatcaccgcctgatgtcccaagtgcatgccatcaaatgcgcccaatgtcaccacggccttcttgtcgttactgaacgagggccattcaatcgaaccttcggcgtcaggggtcaggtgcgtgatatccatcagtgtgctgttccttttatccgtgcgatgttattcatgcaatataggcgttgttgtgcgcggcctgtatcaagctgcacttttcaccgcgtctactttacgcgagggggaatacggtgaccggcttggcctgatgagcgttggcacgctcgataatcgccgccacatcatgcgtttgcggcacaatggcggcagtgggctcgctgattgtacgctcgatacggcggccgaagcgcaattcgctggcttcctcaggtgtgatgtcaagcgccggcatcgcgcctcgagcggcctgttccatggtgagggcatggtcaagcagccagttgcggcgctcgtcaccggcaagaccttcaggagtgttcaatacgcacttgttgcgcgtgacggtttgcccttcccgattagtgaacgtcttctgatcggtatgtgcggtgacggtatgggttcgcgtgtcaagcatcgcctcagaggcgataagtccgctggtatcgtccggcaacgcgaatcggccgactcgcgtacggcgcaaacgggtcaggtatccgccgacgccaagttcattgccgaggtcgcgggcgagcgcgcggatataggtgcccgatgaacagctgacccgcacgtcaatatcaagtgcgggaatcgttcccgtgttcgcgtcttcccgcaatggttcagcggcctgctcccctgctacgaatccgctgcggatatccagcacggtgaattcgctgatggtcaccaggcggggtttgagttccacatccttgccttcgcgagccaagtcgtaggcacgctggccgttgattttgatggcggagaacgtattgggtacttgttcgatatcgccggtgaaattggtggcgatggtgcgagtgagcaggttttgccatgaggcagttggtgacgccgttggttcgccgctctggccgccctcagtcagctgcgctgacagcgtttgccagcgggagcgggcttcatcatcgacaagcgcctcgccttcggcatcgtcggtagtggtgcgcaggccgaggcgtatggtggcctcgtaggttttgtcatgcgccacgatggcgttgagcagtcgcgtggcgtggccgaaggcgatgaccagcgtgccagtggccatggggtcaagggtgccggcgtgaccgaccttcttgatgtgcaacgcgccgcgcacggcggcgacggcgtcgaaactggtcacgccttgcggcttgtcgatgatgagtaggccgctgggtgttgtatgaagcacactactcctcgtcggactcgaactcatcgccctcggcttcggcctcgtcgtcgtgcttgtacggatcggcgtcgccggcgtactgggcggtggcgcgggcgcgggcgagttcttcgtcacgcttcttggccacggcgagaatgtcttcgatctcgtgagcctcgccgggcacttcatcgaacacgaattggagctgcggagtcaggcgcaggccagccttgtggcccaccagagaacgcaggtgacccttggcctgatcgagcgcctgctgggcgcgcttgcgttcgccttcctcgtggccttcgtggccgagctgggtccagtagaccttggcgatctgcagatcgttggtcacacgaacttcggtgacggtgatgctggcgagtcgcttgtcatgcagttcgcgctcaatggaggaggcgacgacacgctgaatcaaggccgcaatacgtgcggcgcgcgggttggttcctgccataggaatttccttttctagacttgagccccctctgacgaggggctgccgaacgcagtgaggctgggggagagaaaatcatggaactaccatgtctctcccccagtcagcctgcggctgacagcccactcgtcagagagggcttaacaatgactacttgcgctcgacttcctgcatctcgaaggtctcgatgatgtcgccgagttcaatgtcgttgaaggtgccgaggttgataccagcctcgtagccttccttgacggactgaacgtcgtccttgaagcgacgcagcgaggagatctcgaggtcgttgaccgtggccacgccgttgcgcaggatacggcacttcgtaccacgcttgacctcgccgtcctgcaccatgacgccggcgatgttgccgaacttggaggagcggaagatctcgcggatctcggagtgagaggtgacgacctcttcgtattccggcttgagcatgcccttgagggatgcctcgatgtcttcgatcgcacggtagatgaccgagtagtacttgatctccacgccctcgcgctcggcgaggtccgccacctgacggttcgggcgcacgttgaagccgatgataacggccttgtcgaccgtggccaggttgacatcattctgggtgattgcaccgacgccgcggtggatgacctggatgccgacctcgtcggatacctcgatcttcatcaaggaatcctcgagcgcctcgaccgaaccggacgaatcgcccttgatgacaatattgagcatgtcgatctcggactcggcgaacttcttcttgaagtcctcgagggagacgaccttgcgacgcttggccagctgggcggcacgctcggtggcctgacgcttctcggcgatctggcgagcggcacgatcatcggaggcgaccaggaagaggtcaccggcggtcggcacggaggtcaagcccagcacctgaacaggtgtggacggaccggccgcttccatcggctgaccgttctcgtcgagcatggcacgcacgcggccgtacgaagtgccggccacgatggcatcgcccacgtggagcgtaccctgctgaaccagcacggtggccacggcaccacgacccttgtcgagtcgggcttcgacggtggcaccacgggcgtccatgtcggggttggcgcggaggtccagctcagcgtcagccgtgagcagcacggcttcgagcagcttgtcgacgtgcaggttctgcttggcggagatgtcgacgaacatggtgtcgccaccatactcttcagggaccaggccgaactcggtgagctggccgcggaccttctccgggttggcaccgggcacatcgatcttgttgacggccacgacgatcggcaccttggcggcctgagcgtggttgatggcctcaacggtctggggcatcacaccatcgtcggcggcgaccacgaggatcgcgacgtcggtgagctcggcaccacgggcacgcatggcggtgaacgcctcgtggccaggggtatcgaggaaggtgatcttgcgcggttcgccttcaaggttcacggtgacctggtaggcaccgatgcgctgggtaatgccgccggcctcacgtgcgatgacgttggtcttgcggatggtatccagcagtcgtgtcttaccgtggtcgacgtggcccatgaccgtgacgaccggcgggcgaggcttgagatcctcgtcatcctgcagttcttcctcgtcaaggttgatgtcgaactgctggagcagttccttgtcttcctcttctgcggagacgagctggatgttccagccgatctcttcgcccagaatctggaaggtctcctcatccaaggactgggtggcggtagccatctgacccaggtggaagagcacggtgaccagcgcggcctggttgacgttgatcttctccgccagatcggccagggaagcgccctgacgcagacggatggtctgaccgttgccgttggggatgcgaacgccgccgatggtcggtgccttcagctcctcatactcatggcgctttgccaggcggttcttacgggccttcgaggacttaccgccctgacgtccgaatgcacctgcggcaccgccgcgaccgccgcgaccgccgccacgtgcgggaccgttgctcggtgcgccgccgccctggaagttattgccgccgccttggcccccacggaagccgccgcgtgcgccgccctgaccggcaccctgggagccgccgccctgacccggacggttgtggccccactggccgggacgaggaccgccctgaccaccttggcccggacgaccgccacggaagccgcggccctgcccctggccttggccgggacggcccggacgaccgccacgaccgctatcagcagtcggacgagccatcggatgcggacgcggaatatcacccggcgtcggggtgtgcataccctgcttgcgggagaacgggttgttgcccgggcgcgggccctgagcgtgcgggcgcggaatcgcgtttgaagcggcattgccgccattggcaccggcgccgccctgagcgtgcgggcgcggagccgaagcattgtcgcggttgttctgatgctgccccggctggccattgttcggacggccctggttgttacgacgatcattgttacggcgatcgctcgggcgactctgacgaccgttctcgcggccttcgcgattatcgcgaccattctcacggttgtcgtgctgaccgtggcggccgggggtcggcatgccggggcgtgcgccgccctgcggacgcggtgtcggtgcgcccggagtcggagcctgctgatgtgccgaggcgggcgatgcctgacgtgcgggagcggccggagtcggtgcggaagatgaagtggaagccggggccgaaggtgcggccgggcggcgctgctgcacgggcttggcagcaggcttttgtacggaagatgcgggcttggaatcgcccttggcgttgtccttggcgaactctgccttcagacgccgggctaccggcggttcaatcgtagaagaagcggacttgacgaattctcccatgtccttaagcttctcaagcacggttttgctatcgacattcaaaaccttagccagttcgtatacgcgtggtttcgccactaattactcctattctgtgaccacgcgcgtgcatgggcgtggtcagttggtgatgacggcaagcctaccctgtctcatcgtgcgaccatgatcgtgttacctcgtctctggtgtgggcgatttcgcgcacactgcaccagcccacatacgccaatcaagcatactcatagcgctggatagcgtagacgcagcgagccgcgccattgctgacgcggctcgtatcaggaaataatgcgccctgaagatcattcgccttcgagcccggcggccttttcggcggcgaccttcttggcatgggcctcggcggattcgatgccgatcttccagccggtcagcttggctgccagtcgtgcgttctggccttccttgccgatggccagggatagctggtcgtcgtggatgaaggcgatggcggtcttgttcttctcgctgatcacctgtacgccggtggccacagccggggacagcgcggctgccacgaacttggccggatcgtcggagtagtcgacgatgtcgatcttctccgggccaaggttctccataacggcacgcacgcgagcgccgccggggccgatcagcgcacccttcgggttcacgccatcggtgttggccttgaccgcgatcttggtgcgggcgccggcctcacgagcgatggccatgatggacacggcaccggagaccagttccggcacttcacgctcgaacagcttgcggaccagctccgggtgggagcgggacaccacgatttccgggcccttgatgccacgggccacgttcaccacgtacacgcggatgcgttcgccgtggcggtaacgttcgccgggcacctgctcacggcgaggcagaatggcttcgacatcgcccatcgcgacatgcacgttggaggggtcggaagcatcctgttggatgatgccggtgatgagcttgcccttctgaccggagaacgcgccgaataccttctcatcttcggcgcggcggaacagctgggtgatgacctggcgtgcagtggcggcggcgagacggccgaagtcacgcggggtgtcgtcgtattcctcgcccagcttgggagcggggtgcgggtcgtcctcggtgggctcgaccgggatttcgtcggcggcccagacggtgaagttgccggaacgttcgtcaagctccacacgcgcgtgcctggcggcgtgcggggtcttgaggtaggcgaggcgcagggcctctgccagcgcatcatccagggttccggggtcgattccttgctcggcggcgagcttgtgtattcctgtcaggtccagttccatcgatccgtacctcctatgaagttatgtggcgcatggcctatgagtggtcacagttagctattagtgtaggtttccatgcagacacgcttctcttcaggacggtttacccggcgcttggcatccgcactatgcgcgagcgcgatgctgtgttcgctttcggcgtgttcgatgccgcgactggccggacgggccgaggcggaagctcaaatgagcccttgcgagaaagcgatgacgttggcggactacgccacccatccggctgaaggcacgccgttattagagcagtatgccaccggcctggccgctcccctgacttggattgacgttgccgggtattgttcgggtcgttttgccgagggaacgttacgtgacgcgcagaccaagcaatggctggcttttctggccgataaattcgggcagtccgcgcctgaggtgacgccggcgcgtcttgatggcgtcacgtccgccaacgttgaccgaccggtattggatgcgatggccgtggccgaggatcgcgccggattcgctatcgaggtcttggccgcacgaggacagaccgctggggctacgttggcgttgagcgatatgcataagaccgccgggcagcagctggtgtcgctggcgaacggcaattttgatgattccggcgcacagtccagttcttccggccagagcgacccccgccaaaaggtctatgccatcgaccaactactggccaaccccaccaccatcgccgacaaggcaagcggccagaccgtaccgaccgccgccgccatcgaaatggactgcgcccgcgcgcagatcaaggccgtgaccgaatcgaaatcttccaccgagagcgatacgctgctcatcctcgccgcactggccgccaagcacgcctacaccgcgttccaacttggctacccagcgactgaggccacattgttcgagtagacacacactcctcacgaagccgatgcgaacttgttggatgctagtgggcaagtcgagttgaggcacgttccaccaatgtgaaatcggtggtgtacgtacgggccgggcctgagtatccttcgatgcggtcgataagcatgtcaacggcatgcttggcataatcgtcgatatgtggatcaatggtggtcagcgccggcgccgagtactcggcttccggcacgttatcgaagccgaccacttgtacatcgtcaggtacacgcaaaccatgtcgttgattgcggcagcgtgaacgacatgcaccaaaggctcgtcaaggcgcggcgcatgatccgcaggcgcatccgggagggccaaccgttcatgttcctcgacgaggggctcgcggcagccggcccagtgccgtccaccaacaacctcgtcgaatcatggaacgcacgcctgcgcgacatgccgcgccgccaccgcggactgcggctggtcagacggctgaaggcgatctgctggtggtgccaccagcacacggaacgtcccgaaagcgacgcgtggctcgcggccaacgcgatgaccgacgaacgactcgagcgcctctaccggcaggcatgggagagaagcccgcagagcatgcacgagacgttcggcattcccatgagacacggcaccggcatcgactggaacgagttccacaccagggtcgaatggcagtcgaacgactagaccgccggacatacattttggcctataaccccgaatacggacgttcgcatcaaaaacaaaaagggttccgggacaaaccccagaaccctaaaggcggataaggcgagattcgaactcgcggaggctttcacctcacacgctttcgaggcgtgctccttagaccgctcggacacttatccatgctgccaaaatggcaacttgttcattatgccacattctgccgacctggcaaatcggagtttcgctgagcaagtctcgagtgtatgccgcttgagacatgtcagatcacaatcccggaattcgcccgaagcgccggcattgcgtttacgcgccaagcactccgacaggaattacatacactccatcatcgcgttgatacgcgaactcgccgacccccaccaacaccgccaagaactccggttcacgggttcgcgcactcggatttctcagcagcttatctttcagtctgcatagatttgccgatgcctcagggactttatcctcactggacttaatttcgatgccgccccaccgtccatcggacaattcaataatggcatcgcactccagaccggaatcgtcacgataataccgaaccggttctatcccaatatcgaggagagatctcgcatacaccaacagatcacggatgcatagattctcaaacagaaacccaaaagtctgccaatcgccgataagagcggcagggctcatgcccaacattgcggccgcaatggaaggatcggcaaaataccgacgcgccttggtctggagtcgctttggatcccgtgccggcgggacccagccctttatcggatcgatgacgaacatgttctcgaacatggccgtatacccggataccgttctctccgaaatgaaatcgtcaaggttttcttcagtaccgtacatatccttacgtaaggttttgaatgtcacagcttgactgatattgcgcgcaagcgaatccagcagacgacgagccacatcaggatccttgccttgcctgggcacactctcagtcagcgtgagtcgcatgtattcccgaatcagaatctgtgcgtcagatacaggcagagccaccgcctccggcgttttcttcacggctcagctcatcagagggagcttggatctcgtcctttacgccacctgttcgtggacggaggcattgacccattgggtctgctggacgttgtagccggagaagatgccgatgtcgagcatgcagtcgcggtaatcgcggccgtgggcgatggtgatgtagctgtcgtccaccaatcggttatgcgtgggatccagtccgacccatcggccatcctgatacacctcgacccaagcgtgggtcgcgccctctcccccaagcaaaccggcaatgtagcgcgcggtcaatcccacatgccggcacacggacagcattacatgggcataatcctggcatacgcccttgcgctgggccaaggcctgttcggcggtggtgcgaatcgtggtggaaccgggcgtatacacaaacgccttgtagacctcatccatcacttcggcggcctgctgcaccggagtggcgtcggcaggcaacgcagccaagcgttcgcggcatacgtcgatcatcgcctccacgttcgggccgggaatggtgagcgctgaattgaatcggtacagcggtttataggcttccttatggatatgcgcattgtccacgaaggcgatgccggtcaccgaatagctgaatatgtcgtgcggctcggggatgaatccggtcatcaccacggagccaaaggagtcgatggtggtttcgagttcggtttcgggctgaatcttcacttccacgtcaatcacctgttggcgagggccagtggcgggaatacagcgaagctggaacctgtgatcggtgaccggtgcgctgaaggacagcttcatctcatagtcgaacacgagttttttcacaacgtctcctgcacttacacacgagccggcaaccggcacattctcgggataacgacactacagccatggctgaggtatggtccgcgcgctcacagtccacgcatatattccggcaattcgccgatacgcatcggccggcactcgggcgcacggtttttcgccataccaccatagcatttgaacccgtcagggcgaacgtcgggttaggggcgcttggcatccatgttcatggagctcagtgagcccatgtctttgatggccagggcgctgacacggccggaataatcgtcaaggtacttcttcagcaggtcggcgacttcctgatacccgcgagacggcagctgaccgaccagccagctcagcccatcggcgaagcaactaggcaacggcatgccgtcgaggatcatcgagtaggaggcgagcttcctaagcggggcttccatctcctccatcgtcaggccgaagcgcgtgtacaggtcgatgcgctcaagatacttgccgatgaagatgaacgccttcagcgtggggtcgaccggcgaattctcgatgccgccccagaaggcgagcatgtcatcggtaatatcgcgctgcttgtagatgtcctcggcgtcggccgcgtatttggcggcatcggtgatattggtcatcgccaactccacgtactgcaacagacgcgagctcaattccgggcgcagaatcacggcgttgttgaatgcggaggttacggccgaccgcaccgaatcagggttggacccgtcgtacaggaagctgttcacgaacccgtcgaagtcctcgaaatcttcgggcaggtcgagtgcgtgagcgaacggacggaaggcgtccacatcggtgtccatcacacgatcgtagaacgggaagaactggttcagcgtggtgaaggcgcgctcggtgtaccgacccagccaatacaggttgtctgccttggaagcggtgaccagagacaacgagtggcggcgggactggctcagcaggttcgccacctgcacttcagcaccgtattcatgctccacgccggattcgggtgccaacacccacgtatccttgaatccgccaccctgcgacgagttgacgatcatctggccgggcaccgacgagtatcgagtcaagcccgaataccacacgtgcgtgtttttgccggtgaccacaaaggcacgcaaatcgcatttgcgcggcgacatctcaccggtcttcgggtccaccacatcgatatcgcggaactgaatcacctcttgggcgatgaatcgacgaggctcctccttgatccggttggcaagctcctcacgtgcggcagcatccagcgacgaaccgaacaccacgccgtaaccaccggcttcggccacatccttgatgaccagctcgcccatacgattcaggacttccttacggtcggcctcgaacatcggcatatacgtgggcgcgttgttgagaatcggttcctcgccgagatagtacttgatcatctgcggcacgaagtagtagatggccttgtcatcggccgcgccgttgcccggcgcgttgacgatggccacgttgcccgcgcggtaggcggacaggataccgggcacaccgatcaccgaatcaggattgaaggcaaacggatcgaggaattcgtcggacagacggcggtagaccacgcccacacggtggcgtttgccggcgtagtcgaggaagtagaccttgttgtccaccacttcgaggtcttcggggaaggccagtgcggcgccggttttctccgccagataggcgtgctcgaagaacgcggaattgtagcggccgggggtcagtaccacggcgatgccctcagtggacacaaagtccatggccttgcgcagtaggcgcgggtattcgcgattgtcgcggatgtgcacgtcgcggaacaggcgtggggagatgcggcgctcgatgtcgcgcacgaacagcgggtagctggcgcccgaggggatgcgcaggttgtcttccagcacccaccagcggccatcttcaccctggaccaggtcttcgccggcgatgtgcgcgaagatgccgccgggaggggtcacgccgttgacctgcgggaagtagccggccgaggtgtatacgtattcctccggcacgacgccgtcatggatgatggccttgtcggagtagatgtccttcagataggcgttcagggcgttgacgcgctgcttcaggcccttctccaattcgtcgtattcgtcggattcgataatgcgcggcacgggatcgtacgggaagagccggtcatggtattcgccgttcttgtagatgccgaagcgtacgccgttgcgggacagctcgcggttgatcgcctcgcgacggtttaccagttcatgggccagtctgcgtgctgcggattcgatcatcgtgcctgctccttgctgtggcggcttctgtggcctcaagcggttaggcgtttcgagcgcacgctgacgccgcaagccgtaaccgggtttgatggttacaacctaaggcggccccgtttcagcaaacgcgcgagaatgttacaggcaggtcacttcgccgaccgcactcgtctcgccgaccgcgcgcatctcgccgaccgcactcgttacaatgaatggctatgacacgactgcgcattgacttggcctacgacggcggcggattctatggctgggccaaacagcccaatctgcgtacggtgcaaggcaccattgaagatgcgctgcacaaggtgctgcgggtgccggccgatgatgcggccgaaccgttgcgtctgacggtggctgggcgcaccgacaccggtgtgcacgcctcccaccaagtggcgcatttggatgtatccgatgaggtactgaatcgctgcgtaggtcacatgaccattccggtcaccgaggcgctgactcgcagactcaaggctgtgctgccttcggacatcgtcattcatggcattgccgtggcaccggccggtttcgatgccaggttctccgcattggagcgcacttatgtgtatcgggtcgccgatcgttcgtccgagatcgacccgcgcctgcgtggatgcgtgcttaccgtggatgaatcgctggatctggagcttatgaaccacgcagcctcattgaccatcggcctgcacgattttggttccttcgccactccgaatccgggaggcactacgatccgcgaagtcaagaccgcctattggcggcgggtgccgatcactcccctggtgccggatgcgatggcatcgcatgaagcatatcggactccgtcgctggagtccggactggcggtgttcacgattgtggcggacgcctttgcccgcaatatggtgcgctccttggtcggctcatgcatcaaagttggttcgggacgcaaatctctggaatggtttgccggcaaaatggccgagccagtgcgtgaaggctcaagcgggccgattgcgccgcagggcctgactttggagcatatcgcataccccgtcgatgatcagctggccgcaagagccgaggccattcgagccgtacgtacgttgtagtttctatgaaacaacgcaaaagggctggaacccaaacggattccagccctttcagctagcttggcgaaacgctattcagctcactcggccttctcggcgtcagcggcttcctcagcgggagcctcagcctcagcggcggcggtctcctcgaccggagcctcagcggcctcagcctcaacggccggagcctcttcttcggcaaccttggcggcggcttcagcttccttcacaacagccttcttggcaaccggctcggtgacgagctcgatcacagcggccggagcggcatcgccaacgcgcggggcgatcttgacgatacgggtgtagccaccttcacgctgctccatctgctcggcaatctgggtgaacagaatgtgcaccacggacttgttgcggatgacgcgcatcacgcgacgacgggagtgcagatcaccgcgcttggcgaaggtgatcaggcgctcggccagcggacgaaggcgcttggccttcggcagcgtggtggtgatgcggccgttctggaacaggctggtcgccatgtttgccagcatgaggcgctcgtgtgcggggctggaagccagacgcgggcccttcttgggtgtaggcattgggtttactccttatatgtccgttcttcaggcaagcaggtgggcatatgcccgaacatccgcttgcctagtgaacgaacgattggtcaaagaggcagatcactcgtcttccggcgagaagaacgtaccaccttcgagattattggtatcgaaggccatcggcgaggacttgaggctcaggcccagggtctgcagcttctccttgacctcatcgattgacttcataccgaaattgcggatgtcgagcaggtcctgctcggtgtgggagacaagctcaccgatggtgtggatgccctcgcgcttgaggcagttgtaagaacgctgcgtcaggttgaggtcctcgatcggaacggccatctcggggttggtctcctcggccaccggggccggaccgacctcgacgccttcagcctgggcgttgagctcacggcacaggccgaagagctccaccaaggtggaaccggcggaagccaccgcgtcacgcggggagatggcgggcttggtctccacgtccagaatgagcttgtcgaagtccgtgcgctgttccacacgggtggcctcgaccttgtagctcaccttgagtaccggggagtagatggaatcaaccggaatacggccgatctcatcgttgtcctgcttgttcatctgggcaggaacatagccacggccacgctcgacagtgaactcgatctcgagttcgccatcgtcggcgagggtagcgatgtgctgctccgggttggcaatagtgacgccggcaggcggggtgatgtccccagccacggcttcgcccttgccgctcttgcgcagatacatgaccacaggctcgtcatattcgctggtgagcacgatgcccttgatgttcagcaggatctcggtgacgtcttcctggacgcccggcagagtggtgaactcatgcagggcaccggaaatacgcacggaggtcacggcagcacccgggatggagctcagcagcgtgcgacgcagcgagttgccgagcgtgtagccgaagccaggctcgagcggctcgatggtgaagcgggagcgctgcggattcagagattcctcggtaagagtcggacgctgtgcaataagcactgtggttatcctttcagcttgaactcggtggtgcactcaccggtcaggcggttttggatggatttggtattgctgagtgctcagacgcgacgacgcttcggaggacgaacgccgttgtgggcttgcggggtgacgtcggtgatggaaccaacctcgaggcccgcagactgcagggaacggatggcggtctcacgaccggaacccgggcccttgacgaacacgtcgaccttcttgacgccgtgttccatcgccttgcgggcggcggactcggcagccataccagcggcgtacggcgtggacttacgggagcccttgaagccgacatcaccaccggacgcccaggacaccacggcaccggacggatcggtgatcgaaatgatcgtgttgttgaaagtggacttgatgtgagcctggccgaccgggaccgacttgcggtcgcgacgacggggcttacgagcggcttgcttaggcgctgccattgaccctcgtttcctagtaacgaactttgttgttgacgttcgggcgatgggatgaaatcatcccgtggcccgaatcatgccaccgactacttggtggccttcttctttccggcgaccgtgcgcttcgggcccttgcgggtacgagcattggtcttggtgcgctgaccgcgcacaggaagtcccttacggtgacgctggccttggtagcagttgatctgaatcttgcgacgaatatctgcatcgacttcacgacgcaggtcaccctcgatcttgtagttggcttcgaggtagtcacgcagcgtaatcagctgctcgtcggtgagatccttgacgcggatgtccgggctgataccggtcgcggcaagcgtttccttggcacgagtgcgacccacaccgaaaatgtaggtgagggcgatctcgatgcgcttctcattggggatgtcgactccggcaagacgtgccattgcgattccttcttgttgccgtaggtcttgcacccgctcgcccggttacccggcacgggcctacgtacccgtggttcagtgtcgttcccttgcgggaagcactgtgagagagtgccttatttacttagtgccgctggagaatctgctctcagccctgacgctgcttgtggcgggggttgacgcagatcaccatgacgcggccgtgacggcggatcacgcggcagttttcgcagatcctcttcacgctagggctgaccttcatggttatccttttcttgtgtacctttacttgtaacggtacgtaatgcgtccgcggttcaggtcgtaagggctcatttcgagcacgacacgatcctgcggcagaatacgaatgtagttcttacgcattttgccggaaatcgtggcgagcacgatgtgcttgttctcgagttcaacgcggaacatcgcgttaggcagtgcttccactacctgtccttcgacttcaatcacaccgtcttttgccatgtgcctctagtcctattccgttggatgattactatggcatatccgaagacacaccaactgtcaactatatacgcacatacccctgtacgaacactcggcgtgtcgcacaggggtatggaaacgttgatgtggtatttcggcatcactccggcttgttggccgggctgccgaacctactactcgaggtggctgatgatacggccgctgatctcgtcgatgtcgccgacgccgttgaccacgacgagcaggccacgggattcgtagatgtcgagcagcggagcggtttccttctcgtaggtctccaggcgcttggcgatggcctccggagtgtcgtcagcgcggccctgctcggcggcgcgcttcttcatacgctccagcagcacgtcacgggcggcttcgagggccaccacgtggtcgagcggagtgtcgaggtcggcgagcatctcgtcgagagcggtgacctgggcggcgttacgcgggtagccatcgaggatccagccgttattgcagtcttccttggccagacgatccttgacgatcttgttggtcagggagtcaggaaccagctcgcccttgtcggtgtagctcatcgcctcaagaccgagttcggtcttgttcttgatgttgtagcggaagatgtcgccggtggagatggtggggatgttgaagtgctcggcgagcagagcagcctgggtgcccttgcccacgccctgggggcccatgatgagcagacgcatggtggtctccttttgtgtcggttattaatacggttttggctcccttggttaggggagccattgagttatatgtggaagaaagattgctccgtcgtggaacagtccactggactgttccactcctcgcgcacccgccggcccattgcgggcggccgctgccaagcgggcgtcagccttctttgtggtccacgttttcgaacaggaagccggtgtactggaactgttcggtctgggccttggcctgacgcagggtgtcgaggcccacgcccgcgataatcaggatcgtggtgccaccgaacggcagcttggcgttgagtccgagagccatgatcagcacggtcgggatcagggccacgaacagcaggtagacggcacccacggtgttgagtcggttcatcacgtaggtcaggtaacggctggtggcgttgccggcgcggatgccgggaatgaagccgccgtactgcttcatgttgtccgcggtctcgtccgggttgaacgtgatcgaggtgtagaagaagcagaagaacacgatcatcagcgcgtac

SEQ ID NO: 1991 - DNA, 14573 bp, Unknown
  R17_18m  MAG No. k141_25214
ccagtccacggttcggcagctcggcaccgccgtcggttcggccatctccggcgcgtcgttggccatggccgtcaacggaacattgccggcgcggctcgaatccctcgggctgcccgccaaggtcggcgacggtctggcccaggcggtcagtggttcggcgggtggagtgatcggcgtgttccgcagcggtgatgggccggcggcccaattcggcgacgaggcgccgaagattgccgatgcgatgacttcagggttcgtcgaaggcggccagtggacgcttctggtcgccggcatcatgctgttcatcggtttgctggcctcggtggccgtgcgtcgtgccgcgttgtcgcacaacgtgcgttgacgcatgacggctactgtcttatggggagtgcggtcgtgcgcggtcgaacgatatggtccgcataccgtccaccacacctgcggtcggttcgccggtggaaggaacgatgtatcagacggcgtgtcgtaatccgatgatgctgtaacatatcctcttgtgcctcagcgaggcacgcacggccccgtagctcagttggttagagcgccgccctgtcacggcggaggtcaccggttcaagtccggccggggtcgccaccaaactcccgatgcatgtcgggagttttttgtttcctgccgttcttcgatgccatccgcaaggacggtgaaagtgattgcatccgattcgacacgccgtccgcaccgatgccggcgttaagggggcgcccgtttgcaacgggtgaaatgcatgaggaagcgcatcggtggaatgttcgcgacgcatggcgcaccacggaaaaaccgcggtgggaggtcatggcggctcgctactattttcgctatctcgcatgttacgaaagtcttcaaggagtaagccatgaccacgctcgccattgatatcggaggaaccaagatcgccgccgccgtctgcgatgcaaacgacagcatcatccagcgctggcgcgtccccacgccgatggacgccgacgccatcaaccagcacatcgccgaggtgtaccgcgaggctgtggccgccgggcacaccgatatcgaggccgtcggcatctccgccgccggcaatgtgagcgcggatcgcaagacgctcaccttctccgccaacattccggcatggatcaactacgatctgtccgagcacgtcggcgcgctgatcgaccatgccgtgccggtcatcgtcgaaaacgacgccaactgcgccggatggggcgaattcgtgcacggcgccggccagggtagctccaacatggtcgcgctgaccgtgggcaccggcctcggcggtgccatcgtgatcaacggccagctctaccgcggctccttcggcatggccgccgagctcggccacctgccgatggtcccggacggcgaccactgcggctgcggcctgcgcggctgcgccgaacgttacacttcgggaacctcgctggagaacttcgccaagtccgccgtgcgccgtcgtcctcaggacgccaagcgtcttctggaactgtgcggcggcgacatcaccaaactggaggggccgatggtgtcccaagcggctcaggaaggtgacgtacttggcctgtatgcgttcggcaagatcggcgaatggctgggccgcaccatggccgccgtttccgccgtgcttgacccggacctgttcgtgatcggcggcggcgtggtggccgtgggcgacatcctgctggagccggcccgctacaactaccagcgtttcctggaaggcagcgcctaccgcggccatgccaagatcgtcgcggccactgcgggccaggatgccggtctgatcggcgcggccaacctggctctgcgctgacgatgtcgctccggcaacgggacgttagtctaatggtgagtcatggccggtgccatggctcactgccgcgctgatagtgcggtcgatgagtttccgctgcctgaccatggaatcgaattccgggttctcagcgatttcctcgtactcgtgttcggtggtcacgccggcgatttcggcgataatctcctcataggacgtttcgacggttcgatgcacgccggtgacgtgcccctgacgtatcacgacaatgcggtcggataccgcgaacacatccggcagatcgtggcagaccatcaccacggaccggccttcggagcgcagtctcttgatatatgcgagcacttccgccgactgcatcaccgacagtgcggtggtcggttcgtccagcagaataagctgcgggtcattgagcagcgtgcgtgctatggccacggtctggcgctggccgacggataaggatgcgataggggagccgacccgaatcgccgagctcagggtcttcagcacggaacgggcacgcgagttcatcgaatcgtcatcgcgtatgccaatctgattgatctccttgccgaggaacaggttcgaggccacgtccaggttgtcgcagaactcctgcccctggaacaccgatgcgatgcccatgcggtccgcctccctgatcgagggaatggtcacctgttcgccgttgagatagatatggccgaatcccggctgcagaaatcccgcgatgaccttgatcagagtggactttcctgcgccgttatcgcccacgatggcgacgacctcctggcgttggatggacagattcaccgatttcaacgcctcgacgaagccgaacttcacacagatgtcctccagccgcagcagaggaggtgtgctcgaattcctcatggtgtgttccttcttctcactcttctcctggtaccggtcactggctgacgtcattgcgaaccgagaactcgatggcgcataatgcgccgcctagcgcgcagttgtcgttcgggtgggatgacacgagtacatcgatgggtgccacggcatcagggaacagcatgcgctgcaacgcttcattgaacggttggatgaatacgtcgccggtcatggccagcttgccgccgagcacaatgacctccggatccacgctgatgcacagatcagccgccacctgaccgatacgcacggccgtgtcggcgatgatgcgacggcaaccggggtcgccttcgttggcaaaggacaccagatcatccagcgtcatattgccgtgtgtgacgctgagcaactgcaccagcctgttttccgccacgacggtgtcaaggcagccgcggttaccgcacgaacagatggcacccagcgggtcgacctggatatggccgatttcaccggccaggccggtcacgccatgcatgatttcgccgttgatgacgatgcctgcgccaaccccgtcgttggctgagatatatacgaaattgcgtttgcctgccgccacgcccatacgggattcgccgtatgccgcgaaattcgcgtcattatcgacgtatacgggaacgttgaacgccgtgcgcaacggggccgtgatatcgacgccgtcccatccgggcagaatgccgggaatcgctatggtgtggtcgctggtggccaccggtgcggccacggctacgccgatgccgaccagctcgctggcttcggcgtcgatgctgctcagggtctcattgatgagcagcatggcgcgttccagcgttgtgtccgccttgtggcccaacggcagggggagcgtgtgctcagcgatgattgacttcgagaagtcaacgatagaaagcgtaagatgacgtcgcgcgatccaaagcccgacgccgaggccctgatgccgtgcaagggtcaccagagtggctctgcgaccgttgcgaacggtgtttttggtctccagctggtcttcgtcgacaagctgatggacgagcgtggacacggtcgcagtggacagtcctgtcacctctgccagttcgacctgtgtcatggcgccgaacttgtggatgctggccagcaagttggcgcggtttgcctcgcgaagcgaggtctgcgaaccgaaaagccttgttgccataagagttcagtgtagtcgttaccggcatgaggcacagcgaggcgcagagcgtggatttttcggcgtgtcgccttgtgatgcgcgaaaaatcgccattgcgttcattggttgaacataaacgacgggaaattcgctttcttgagtttgacaacttaactcaatacggtattctatgagatgaacctgaggttattctcaggttcgggcgaccaaggagggttcgccatcccctcgaagatgaaggagaacaaatgaagttcactaagaagatcgtcgccgtggtggcaggcgttgccatgtgcgcgggcctcgcggcctgcggtggcagccgtagcggccaggcaactggcggtgatgccaagatcgaaaagggcgccactatcggcatttcgatgccgaccaagtccgaagagcgttggaacaaggacggcaacaacctgaaggccaagctggagaaggccggatacaaggtcatcctgtccttcgccgacgataagccggcccagcagaacgctgacatcgagaacatggtcaacaacgacgccaagatcgtcgtggtcgcttccaaggacggcaccgcagtgggccccgccgttgagaaggcccgcgatgcaggcgccaaggtcatcgcctacgatcgactgatcatgaacaccgacgccgtcgactactacgccaccttccagctggagcaggtcggcgtgctcgaggccacgtggctcattgaccagctcaagcttaaggatggcgccaccggcccgttcaatatcgagctgttcaccggttccccggatgacaacaacgccaagtacttcttcaagggcgcttgggatctgctgcagccgtacttcgagaagggcgtgctcgtctccccgtcccagcacggtcagggtggcgtgaccaaggacttcaccgttgaggattggcagaagatctccgtgatgagctggaagaccgagcaggcgcagaaggacatggaatccatccttgactccacctacgcccacggcgagaagctcgacgcggtcctcactccgtacgacggcatcgcccagggtgtgatcaacgccatcgaatccaagcgtcccgacatgaagccgggcaccgactcctggccgtacatcaccggtcaggacgccatggagatcgcagttgccaacatcgccaaggataagcagggcgagaccgtgttcaaggacgtgaacaagctggctgacgccgtgtacgacatggtcgtcgagatcgccgagggcaaggaagtctccggcctgaacggcaagttcaacaacaacaacatcgacgtcccgtccaagctgcttgacccccagaacatcaccaaggacaacctccaggatctggtcacggccaactacatcacccaggatcgattcgacgagctgactaagtagtcctcatcaggcaatccgtaaacaaacacaatgacatgcggcgcatagccgatatgcgccgcatgtccatgaacacagaactgtgacgaggagtgatgacatgtcatcaaatgacaccatcttgacgatggaaaacatcacgaagacgttcggtccggtcaaagccctcaccgatgtgaatctttccgtcgatcgcggcgagatccacgccatctgcggcgagaacggtgcaggcaaatcgaccctgatgaacgtgctttcgggtgtgtacccatacggtagctattccggcaaaatcacctttgatggcaaggaatgcaaataccatactattaatgattccgaggccgacggcatcgtaatcattcatcaggaactggcgttgagcccgttcctgtccattgcggagaacatcttcatcggcaacgagcaggccaagggtggcgtgatcgactgggacaagacccgcgccgaggcgaagaagctgctcgatcgtgtgggacttcccgaagacccggataccagggttatggacatcggcgtcggcaagcagcagctcgtcgaaatcgccaaggcattgtccaaggacgtgaagctgctcatcctcgatgagccgaccgctgcactgaacgatgaggattccgcccacctgcttgacctggttcgtcagctacgtgacgagcagggcgtgaccagcatcatcatcactcataaactcaacgaggtcgccgccattgccgacaatgtcaccatcattcgagacggttcgaccgtcggtgtgatgtacgtgacgccggagacgccgctcgaccaggaagaactcatccgcaagatggtgggtcgtccgctgcacaacctgtacccgaaccacccctccaataccccgggcgaggaatacctgcgcgtcgaggattggaccgtgcatcatccgctcgacgcggagcgcgtgatcgtagaccatgcgaacatcaacgtgcacgccggcgagatcgtcggtctggcgggtctgatgggtgcgggtcgtaccgaaatggccatgtccatcttcggccactcttacggttccaacatctccggcaaggtgttcgtcaagggcaaggaagtcaagatgcccaacgtgcagtccgcgattgacgcaggtctcgcctacgccaccgaggatcgtaagggcaacggtctgaacctgctgcagaacatccgagagaacgcatccctggcctccctgaccaagatcagcaagggcggggttgtggacgacaaccttgagcgcaaggaagtcgaacagtaccgcaaggacttcaacatcaagtgtcatgacatcgatgtgaatgtctccaccctctccggtggtaaccagcagaaagtgctgctcgccaagtgggttatctcgcagccggacatcctcatcctcgatgagccgacccgaggcatcgacgtcggcgccaagtatgagatctacgaaatcatcgataagcttgccgatgcaggcaaggccgtcatcgtgatttcctccgagctgcctgagctcatcggtatctgcgaccgcatttacacggtgtcctacggtgtcgtcaccgacaatgtcgagaagaatggatttacccaggaatacctgatgaagggtatgaccaaggaaagggaggtggcagcctgatgagcgccgcaactgcaacacctgcaaagaaagaagaaaagaccggcctgctggccacggtcgccaacaatgcccgtcaatacggtattgtcggcgcactgctgatcatcgtcgtggccttcgagatcctgaccggaggtgtgctgctgaagccgaactccttcgtgtccctgatccagcagaacgcctacgtgatcatcctggccattggtatggtgatggtcatcatcgccacccacatcgacctttcggttggttccttggtagccttcatcggtggtgtgtgtgcactgctgatggaacgcgccggagtcaactggatgctcgccatcgtcatcgctctggtcgtcggcctgatcgtcggcgtctggcagggcttctgggtcgccgtcatcggcatcccgggcttcattaccactctggccggcatgttgatcttccgtggtctcgccaccgtgatcgtcggcgaatccgtgccgattacctccctcgaattccgtggcattgcccgtaactacctgcccaacatccttggctggtggggtccgttcgacggtctgaccattgtgctcggcatcctgtgcattgtcggctttgcctggagccagctgcgcaagcgcgcccgtgtggccaaggtcggcctggtgcccgagccgatgagcctgaccgccctcaagattgtgcttgtcgcggtcgtcatcgccttcgtcacctacctgctggcttcctccggtaacgctgatcagggtggtaccccgatcatgctggtgatcgtcggtgtgctggtcttcatctacaacttcatcctgaccaagaccgtgttcggtcgccacgtgtacgccgttggtggcaaccgcaaggccgccatcctctccggtatcaacacccgccgcgtggacttcctgctgttcgtccacatgggcttcctgtccgcagtggccgctgtctgcatgctttcccgtctggcttccgcaactgctcaggccggtatggagttcgagatggacgccatcgctgcctgcttcatcggtggcacggccgtcaccggtggtattggtaccatcccgggcgctgtgattggtgcattcgtgatgggtgttatcaaccagggtctgtcgattatgggtgttgacaccgccgtggtgaagaccatcaagggcctcgtgctcctgctggccgtcgccgtggacatcatatccaagcgcaagaagagctgaccttcccctttctcctcctcgatgtgggattcgtgccggtgccgctggtgcggatcccacactgttatctgccgtcattcttgtaatcaaaggactttttccgccatgaaactcaccgcgcgctccacctcccgtatgtatgcattgacctgcttggcctgcgttatctggctctggcagtcactggtcgaggccaataacgatggctcgctgttcaattgggccactattgtcttctcgctgtgcttgctagtggtcatcggatggagtggttggaatgccgtcaccgggtggaacgccaaggagactgaggccgccacggcgggtgccaaggatgatgagggcagcactgatcggtaacgtatatacggctgttgttgccgggaacatataggtcccggcaaacctgcagcgatatgtgcattgcaagccagggatcccctggcttttttatgccgaaacggaactcgacacgggcgcgcaggtcgttgggtttgtctagagcctgcatgtagttacttatggtaatgactattggtaactaattggaggttgggccagcgatgtgcgattcccgaaccgataccaagaccggcttgcttccggtgaatgaggtgcggagcctcctggatgtctgctggaaggccaagaccatcaccgaactgatgccggcattgccgaaaggtatgaaaccgcgctatgtccacgtgatcgacgccgtctggcatatcaacgaaccgaatgggcaagataccggcaccgcgcgcgtgggcgacgtcagcgcattcctcggcgtcactacgccgagcatcaccaagctcgtcggcgaaatggccgacctcggactcgtcgtcaaacacgccgatgccgccgatcggcgtgcggtgacgctcacgctcaccgaacgcggcttggatatccgccgcatctatgtggaggaatatcacgcgcatttgagccaactgctgggcggattgacctcggaccagtgcgaaaccacggtacgcaccttgaccgaggctctgcgactcatgcaggaagacttccaacgtcgtagtcagaatatctgaatgaatggaggagagaacaagatcgtgactcattccgcaacacagctgcctaacggcggcaagcaaccggtctccaacaaactcgtcatcgcggtcgtctcgctcgcgatcctgaccttcctcggcatcctatcggaaacgtcactgaacatcgcctactccacgccggtggaggagttctccatcggcgcctcggtggtgcagtggcttgtcaccggttatctgctcttgctgtcggtgtcgattccgagctcgccgttcatggtgcgcaaattcgccaccaaaacactgttcatcatggccatcgtgattttcaccgccggcacattactgggcgcgctcgcggtcaacttcccgatgctgctcgccgcccgactggtcatgtcgctcggcaccggcatctccctgccgcttatcaccaacatccactggcacgaagaagcgtgattccaacatgcaacgccctattatgacttcgcggtcgtttttgcgcacgccgtctgaagcggctgggcccggcgacgaggcaactattcaggacctcgtggatacgttggaggccaaccgttcacggtgcgtgggcatggccgccaacatgatcggcgtgagcaagcgcatcatcgtcttcgtggacgaagatctcggtggccgtatcacggtgatgctcaaccccgtgatcaccgcttcggatggtgccttcgacacccaggaaggctgtttgtcgctgaccggtgaacgccgcacactgcgctgccgccgtatcgaggtcaactacgaggaccgtcggttccgcgcccgccacgccaccttcaccggctggaccgcgcagatcatccaacacgaagtcgatcactgcaacggcatcatcatctgattcattcggtgctcgttgcggcccaccccccccgaggctggtcatcgcgattacgatgcaattacatcgcaaccgctatgaccagttttttttatgtgcactggtggggtgggtgttctcagcggtgttggggtgccatgcgctggccggttggcttcgctgaggggtgtgggtggtgtcatgttgccagcggttggctggttggcttcgctggagggtgtgggtggtgtcatgttgccagcggttggctggttggcttcgctggaggttctctcagcgtcggtgatgtgccaaagagtggcgggctggcttcgctaaggagcgttaccgtcggtggagaaccagtgcgtgacctgctgccgacgctaagcgttcattaagcgtcgttagcggccaaaacttggacgtgtaacgatgctgggcggttttagcgtcgttgctgtgccaagttgtggtcctctgccgacgctgccagtgcagtagcgtcggcgttgggacaggtgttgggcctttgccgactctataagcgagggaaaatcattcgccggtgcctaagtgggtctattgccatgctgaatacatctgctgagtgtagctatgcgttcgaaggcgatttcgggacctttctcagtagcaaatatgcctaatgcgcggagttatacacttcaccgtgcacttatacacgccaaacgaagcagaaatcgactgctgacagtggacgacacgccagagacgatgtggataacccagagacggtggataacagctgcgcgatcagtggataacctgcaagaaagtgcggttatccaccgacggtagccactgttatgcacattccataccccttggaatcattgggttttccacttatccaccatctcgccatgcgggcttgcgggccaccgcacgaacgtcatacagtgtgcctcacggcgggcaacgtagcccgccgtccacatcacatgaaggggaaacaccatgagcaccgcaaccactactactgccgaaaatgccggtttgccagcaatgctggacaccaaagacgtagccgagatgttcaaacgctgcaatctcgccgtctatgccgaagcgagacgcatatattatcgcgaagtgaatctgaacccatgcaaaaagtatccgaagcaggtgctgcaaaggatcgaatggtggttctgggattggtttgcctatgactgcgccgtcagcggtattggactgaccggcaatgaatccgaagatttacgtatcgaattgcagtacggtccgggcgcaggtatctcgccattcctagccttggccgaattcatgtatgacaaggacgaacgtatcggcacacgcgagatacgtgattttcgcgaacttgatgacaccaatttcgcttcgatgttctggattcgcgatgccagcgcggtcaaaggtcgtctgacagttgaggacatcattcatggtggtgtctacgaggtggcggacgtacatgccgcctcgcaatacgatggtgcgcacggcggcatgatcgtcaatcgcatcgcacatgtgagaggcgtgtggcgatcctgttccatcccgatctatgaggcacgaaggcctgatgacccgcaaatcggtgattcgctggcccgttcattccgggaaaccggatataaaccggactttgccggtctggtgcggtttttctacgggagggccaaagacaccggtctcgactgggaagatgtggaagccgcgcgccaagccggtactttggacgtgctgatcaagaaggccggcaatcggtgaaggattcgcctaacgctgctgtccaagtcggcggccgcgatcacgaatgaagagtgacgcaaccaaacagaccgcgcacacaatggcgaccgtgcggaacgaagcccgcacgccaatggccgatgccgccgcttccggcactccggtgcgcatggccgccgcggtgtgcgtgttcatgatggtgaccagcagcacagccgcagacgtcatgatcgcgaagcccagtaaggcgagcggccggccaccgatacggtcatacatcttgcctgccaccgggttcaggatgcccatggcgatgccgctcggcatcatcaccagaccggacaccagtgcattaacgccaagatcattctgcaaatatgcccatcgcgtgcaggaacagctggcgggtggtgaaggtctcgatgaggaacgcggtgatcgggatcatgatgccgttggtaagcatgaatccggtggtcagccattgcacggtgctgccgggcacgtcgaactcgtgcatcaacgtgggcagggcggagatcatcagcgtttggttgaggatggccacaaacgagccgatcatcagggtgatgaccatggcggtggtgttggcgggggtggtgctgttggagttggcggggtggtggagccggcctcagcggtggccggcgaggaattgcgtgacgtcaattatcaagtctcgttttcttggctgagttgtctttcttggcttgcccatactatctgtgccttgactgcattcgaaaaccattgcaatgactagcaacacgctgagacgcggcgtattaattcaatcatttgacaaacttagttcgttcgttttattattggtcctgcaatccgtaatatcgcctactgcaaaggagcgcccaaatgggtctgtgggatgttgacaagatcgagtacgtcggccgcgccaaaggaccgaaggaagacttcgccttccattactacgatgccgacaaggtcgttgccggcaagaagatgaaggattggctgcgcttcggcgttgcttggtggcacaccttcaaccaggaactggttgatccgttcggcaccggcaccgcgcaccgcccgtactacaagtacaccgatccgatggaccaggctctggccaaggtcgactacgctttcgagctgttccagaagctgggcgtcgagtacttctgcttccacgatcgtgacatcgcccccgaaggcgacaccctgcgcgagaccaacgccaacctcgacaaggtcgttgacaagatcgacgagaatatgaagtccaccggtgtcaagctgctgtggaacacctcctccctgttcaccaacccgcgcttcgtgtccggcgccgccacttctccgttcgccgacatctacgcctacgccggtggccagctcaagaagagcttggagatcggcaagcgcctgggcgccgagaactacgtgttctggggtggccgcgaaggctacgagaacctgtggaacaccgagatgaagcgcgagaccgaccacatcgccaagttcttccacatgtgcgcagattacgccaaggaaatcggctttgaggcccagttcctgatcgagccgaagccgaaggagccgacgctgcaccagtacgacttcgatgccgccaccgccatcgagttcctgcgcaaccacgacctgaccgacgtcttcaagctgaacttggaaggcaaccacgccaacctggccggccacacctaccagcacgagatccgcgtggcccgcgagtccggcttcctcggttccctcgacgccaaccagggcgacaagctcatcggctgggatatggacgagttcccgaccgatctgtacgagaccgtcgccgtcatgtgggaagtcctgcaggccggctccatcggacctcacggtggtctgaacttcgacgccaagccgcgccgtacctccttctacgaggaggacctgttccgctcccacatcgccggcatggatgcctacgccgccggcctgctggttgccgacaagatgaaccaggacggcttcatccagaatcttcaggccgagcgctacagctcctacgactccggcatcggcaaggacatcgacgagggcaacgtcaccttggccgacctcgaagcctacagcctcgacaagccgcagtccgagctcatcgccgccaccaagtccgatcacctcgagtccgtcaaggccaccatcaacaactacatcattgatgccctggctgaggtcgagtgaccatcggtctgaccgattgaattcgctccatcgggcgtgtacacatcaattatgatgccagtgcgcccgatgggctgatccggtagttttgccatgcgcggcgttatgttacgtccgcacggtacctttccattccttctttctcctttctctccgcgcagaccggcatggagttcgagatggacgccatcgcggcctgcttcatcggcggcacggccgtcaccggcggcatcggcaccatccccggtgccatggtcggcgccctgatcatgggcgtgctcaaccagggcctgtccatcatgggcgtggacgccgcctgggtcaagaccatcaagggcctcgtcgtcatcgccgccgtcgcctacgacctgctctccaagaaaaagaaaggctgagc

SEQ ID NO: 1992 - DNA, 4596 bp, Unknown
  R17_18m  MAG No. k141_25237
actcagccaccagccccttgaaacgggagtagacctccggagaaggccaaatcagccccttgaaacgcagcgacccctctgattggagtcaatcagaggggttcggcacattgctgatgcagctggtccgccgtccgccttgaggcggaacgtaaccaagattcaggcgggattactccgcaacgagcgccaggaaggcggcggccacggcggctgtcgggttcgggaattcctcgtcctggttgaagaacggcacgtcggcgtagttcaggaacttcacttcggcacggtcgccgatcaaggccttggcctcttcggccagctgatcggttatcgtcatgcgttcctgatttccacggccatggccgtgcaatgtgcccatcgcttggttctacccgctgtttatgctggccatgcccatcgcctggctgctgtatacggccaccgcgagttatgtgcacggcggcacccgataatcgttggaaaaccggtgggacacgcgggggcttggctttttcctgagattggcgtatctttgtcacctgttgcccgtgaaggtaacacatgcggacatagcttagttggtaaagcgcaaccttgccaaggttgagaccgcgggttcgagtcccgttgtccgctctcggatggctggttcaggatgattgattcagcctgaggatgacccgggcggttggcgcagtggtagcgcacttccctgacacggaaggggtcacaagttcgaatcttgtatcgcccactcgatgaatcgccggcagaatgttgccggttttttcatcacaagctcgggcgattggcgcagcggctagcgcacttcgttcacaccgaaggggtcgtaggttcgattcctacatcgcccacccgatatcacgctcgtcagtctatgatggcgggcattttctatatctgccgtgccacggttccttatatggcgtccggcctcgggtggcatttggctgtgagcggtttccgattatgagtggcgtccggccgtcgtgcaatcccgctgcgcgcggtgccgtttgggctgtaatacgggtgctttgaaccggccataactgcttcatatgtcccggggcttgtgtcgtgtgccgcggcgcgcttccatagtggatatggcggtgcggaaggggagccgccatacttacttacttacacaaggacgtcttggtccgccagggcaacgcgcatggaaaggggtttgcgatggtgtgcaccacgctgaatttcgcggagaaatacctgctgaaaaccgaagtcgggtccgttgccggtatgtccggcggtacttccgatgctggtactgatttcgatgtcgatttcggtggcgagggcgacctcggaagcgatcatgccaccggtttcaatcgctcgctatcggccgacgattattgggctgcagccggatatgccgatgagtcattgtattgatggacgtgatgacgcggtaagggcgcgtcgataagtgcggctggtgtcgcggctgatgccgcatctggtgctcgttcggtggtcgcggctgatgttccgtacggagcctgcaatggttttgcatcggtggtgcgtcaaaatccggaccgtcgccgacgctgtggacgtttggcggcgttgaaaggacagataatggattgtcaacgccgctgagaacgattggcgacggtggtgggacagcggatgccccaccaccgtcgccaagagtggtacttgtgtcggtggcgtccaagacatggctcggcaccgacatcagatactctgaacgtcggcggattcccgttctgtgtcccagcgccgacgtttgattcctgcttatgcgagctggcgtcggtaaaaaggcagaacttggttcaccggcgatgtctcagcacgtttgcgcgcgtcggatccttctggagcagcaggaaaacgagcgccacaacgagcaggacggcgatggagagcacgccgaacgaggcgttgccggtcagggacgtggtggtggctaccaggaaggtgccgatgattgaggccgttttagggaagaaacaatagtgagaccggggaacccttgaaatcattggggaatcatggtggcgatgcatgcgattaacacatgttgttaacacagatgtggaatgaggaggcgcgtgaggctcgtggtctgcgacgcatgagtgtgaccgtgagctccccagctgatgagcgcaaaggcagagattggtttcacgcgggacttgtctgccgaagagcggcgattgatgcagggtctgtgcgatgctctgcagcagttgctgaacaagcagtaccagcggcacatgtgggactgttcgatagcctgaaaaattttgccgcagacaatctaggcaatgtgcttggcggggatttcaatctcggttcgattggtgatttgccggcggtaatcggtgagcatttcaatgccgatcagttgggtgaaatcaacaggtcgttggcgaccatttgaacgccgaccgacttgacgagctgcaggcgctggcggaggaaaacatctccgccgaccagatcagtcaggtcgctggcgcaattcaggagcagggtgccaatctggacctcggatccattgccgaacaagcaggactgcccgctgacatcatcagccagatttccggactattgggcaagtagtcgccttaagctttaacgctgacggtgttgtctcggctattgcgtgttttgcggtcgctcagcaaatcatatgggtcgtaggtaaccgattgcgagcgctgctgtacacagatgtgtacgtgggtcgaagcggattcgtggtggcaggtgagacaagctgccctcgcatggctggaaaagcttcggtctcgtggagcgatgttaaagctgctcaggtcaacggaatggcggaattccgccgatgcaacttgtggttgcgctcgaataaccggcgattgcaacccaaagatggtggcgggtgacatggacggcatgccatagtgagcccatcggccgaacatgacatgataaagattacgtatgaagggacattccaatgagttttcgcgctaacctgcagtacctacgtgcgcaacgcaacctgacccaggaacgattggccatgttgcttggcgtctcgcgtcaggccatttcgaaatgggaatccgaaaaggcctatcccgagatggacaagctgcttatgatctgcgacctgttcggctgcacgcttgatgatctggtacttggcgatgtgagtcggcctgccgcgtcggcttctgcggccggttcgtcgaatgttgactcctcggctgagacggcatcgcctttagccgcttcttccaaaacggcgggcataatcgctcctatcgcggagcttgcgcaggatatcactggctacgatgaacatcgccgccgattcgcgctgctgattgccggcggtgttgctgcgattgtcgccggggttggcatcggcaacctgttcgattccagcaattccattctcggagcgacgccgctcaacgattttctgacgtttctgtgcgtctgcgtgggtgtgattgcggggctggcgatgctgattccaggaggtctgtcgcgtattgacttcaaacggcgtcacccatacgtagaagatttctacaccggggaggaccgcagccgagaattgcggctgctggtaatcggcatcgtcggtggcatctcggctattctgattggcattgcggtgacggtgtatgccgatgacatgctcggcgtctccgatggctggcccaacgcaatttttctgctgctctgtgcgcccggtgttttcgggtttgtctactgcggcatgagatacagtctgctcaatatcaacgcatacaacaaagcggccgaggacgaccgcaaggagcatgcgggcgaacaggatttctatgccagactgaccggcgcggtgtgcggcatcattatgctgatagccacggcgactggcttgtgcctgctgtttttgaaccctgcggcattgcgcggcgattggtcggccgtcgggtcgagcgccgcggacggggcgatgttctggctgccgtggccgattggcggtgtgctgtgcggcgttgcggccgttgccattcagctgatcaaggattatcgcgagcgtaagtgatcaagtggcgatggtccattgctattagggcccgttgcaggggttgcgagatgtcgcccgcggcgcagagttgccgagggccggcaaatcactcccgcgtcgggtccttttgcaggagcaggaaaacgagcgccacaacgagcaggacggcgatggagagcacgccgagcgaggcgttgccggtcagggacgtggtggtggccaccaggaaggtgccgatgatcgaggcggtcttgccgaagatatcgtagaagccgtagtactcgttggcgtgatccttggggatgatcttgccggagtactagcgggagagcgcctggataccgccttggaacatgccgaccagaatcgccataatccagaactccacggccgatttcatgaagaacgcggcgaagaacacgatgcacatgtacgccacgaccgccgcagtgatcatcactttgcagccgagccggccggccagacgaccg

SEQ ID NO: 1993 - DNA, 7177 bp, Unknown
  R17_18m  MAG No. k141_25270
accgcgcgtcagattgcgggcgctgtgggcgcacccgtgttggtgattctgatggaaacgtttgccgctttgcataagcagggcggcgcctccgccgtcgccgcttcgattttcggcattcaatggacgctgcgcatctccgcaatgatctgtctggcaatggtgttgatggtgttcttcggcgtcaagggcgacggtgccggtcgtacgcgagacattatttccctgcgttcgctgcgcgaacggcgtgcgcggcgtatgactgcgaactgacggcagattcaaccattcttaacataataagaaaccccggtttccaacaccggggcttcttattatgttgtgctatcgcaggatttcagctggagtctattacgccctgcccattagcgtcaggacaatcagcagcacgttcaacgccacaatcagcgccacgacgatcataaagatcacgtgcttgacggttccatcagcccacttgcccatgagttccttgttatgcgtgtaccgcatcagcggaatcacggcgaacgggatgccgatggaaagcaccacctggccgatgaccagcgcctgagtcgggtccttggcgaaccacagcacaatcagtgccggcaccagcgtgaccacgcggcaggcccacatcggggcgttgacgtgcagcagaccgtgcatgatttccgagccggcgtacgtgccgaccgatgtggagctcagcgacgaagccagcaggccgatggaaaagatcgtgccgatcaccgggccgagcacctgcgtgatcgcccgctgtgcgccgtcgatggagtccgtgccagacatgccatgcagcgagttggcggcgagcaccagcatcgccagattcacggtgccggccagcaacagcgcccaggccacatcgattttcgagcctctcagctgcgttttgatcgacggcttttcgccgcctgcgtaatggtcgttcaccagcgtggagtgcaggtagatggcgtgcggcatcacggtggcgcccagaatcgaggcggccatcaacaccgagtcggcaccttggaagcgtggaatcatgcctttgaccacttcgccggggttcggcggggctacgaacagacccgcgatgaagccgaatgtgataatcagcagcatcacgatgatgatgcgctcgaatgtggtctgtgtcttgccgccttggaaccacagcatcaccgtggagattacgccaatcgccaaaccgccgatgaacagtggaaatccgaacagcaggttcagggcgatggcgccgccgatcacctcggccagatcggtggcgatggcgatgacctcggcctgcatgaagaacatgaaacggccggcatcgctcatacgctcgcccagcagttccggcagggatttgttggtcacgatgccgagtttggcggactgatactggatgagcacgctcatggcgttggcgagcaccagcacccacaccaacaggtagccgtatcgtgcgccggaggtgatgttggccgccacattaccaggatcgacgtaggccacggccgccacgaacgcggggccaaggatgctggccagcgcatggtcatgcggcttcttattgttattcgtccctgctccggccccggttccgactccggcaagctggcgtcccttcccgatttccggtgtttcctgttcgatgtctgccacagcgttcgtcatagcggttgccacagtggcatctgcttcggtgtgtgttactgccatattgtttgtacctgttcccttcataccgcgcacagttatagcgcaggcatgtttcccgagtcaacagacggacaatctgcggacgattgatggatgaccggcggactggcagctggcatttcccgccatctcgctcatgaaatgtgaaaaaccgccgaaaactcgctcatgaaatgtgcaagacggtagaaaactcgctcatgaaagtgtaatatcattgatatagcagtaattcggaaaggggctcctcatgtatctcaaacgcaaagccgatgcctatctcaatgcatggaaatccgacccgaatcgctccccgctaatcatcaagggccctcgtcaagtaggcaagacagagactatcgattactttgccgcacacaactaccgttcggtagtggaaatcaacttcgttgaggaaccgaaatatcgtgcaatcactgcggacggttatggcgcgaataccatcgtccgcaatatttccctgatcgacccagccaaaaagttcattccgggcgatacgctcatctttttcgacgaaatccaggcccatcctgatatcgccactgcactgaagttctttaaaatcgacggcaaatatgatgtgatttgcagcggttcaatgttgggcatcagctataagcaaatcgaaagcaatagcgtgggatataagaccgactacgaaatgcgatcgttggacttcgaagaatttctgtgggctcgcggatacgatgaggccgtcatcgaaagcatgttcacccacctgtgtgatgctacgccattctctgaagtggaaatgaacgtcttctccacggcatttatggattactgcgtgcttggcggcatgcctgcggttgtcgcctcccatatacgcactggcacgttcgagggaacactgcaattgcagcgccagcttattttggactaccaggaggatatccgcaaatacgcgcaaggacccgatcaggcacgaattctcaacgtgttcaaccatattcccgtgcaactcgccaaggaaaacaagaagttccaaatcagcaaggttgccagcggagcgcgtttcaaagactatcgaggatgcgtggaatggcttgaaacctcgggaatggtgaatatctgccgatgtatgtcctatcctgaactgccgttgaaaggcaattatgacgaaaacaagttcaagatatatttcggcgataccggtctgttcgtagcgatgcttgacgacgaggccagtgatgatctgcgggccaatcgtaatcttggtgtctataagggtgctatgtacgagagcatcgtctctgaagcgctacgaaaatccggctatgacctgtactactacaaaaaagaggattccacactggaacaggatttcttcgtccgcacgcgcgaatggctggtgccggtggaggtgaaatcgaaaaaaggcaccgccaaatccatgcggacgctaatcgcttcggattcttatccggaaattcagttcggcgtgaaactatccgccggcaatatcggtagcagcaaacacgtgttcaccgcaccatacttcaccacatttttgctccgacggctcctgcgcgcttatgacgaggggcaggcacctatgctcaacaatcctgagcggtagcccctattcgtctgcgggcacggcctggcccgggcaggtatggaggacggcgagcatggcatccttttcttgggaggtgacggtgagctggtacttgtctttgacgccaatctggcgggccacgtagtcgcaacggtagtcggcgttggtgggtagccagtaggcggcggaagccgaacccttctcctgattggccggaccgtcgacggccagcaggttataggggtcattgccgaattcatggcgtttggcagtggaccagtcgtgcgcaccggattgccaagcgttttcaagggccaccacatggtcgatctgcactttggcgctggtggcgcggccacgtacgaaatggatggtctgggcggtgtacggatcggccagtgtgccggactcgaccacacaggaaccagcgtatttgtaggtgatgtccgtgagatcgcgggcgagcacgtcgtcgcgtacgtcgcagccattgccgtcgacgtcggtggtgcggaaaccgaaggaatcgcggtcgtagccggaggagctttggttgtcgtctacggcgagcgcgttcaaagtgtcggcggctgaaccggtggcagtgtagccaccggtgattttggccacgtcggagctgacctgcggcagtaacaggccgatggtcacgccgattgctacggcgagaacgatgagaatcagcacgcgctccagcggtccagaggcgttgaaacgacggcgaaagtgggcgttacgacgtgccatcaatcacgcataggtgaaggtgagggggtcgtggccggcgcgggtggggccgtcgagggcgtcgatggcagcgtgttcatcggcggtcagggcgaagccgaacaggtcgagattctccctctgacggtcggcatgcacggacttggggatgatgatcgtgccgttttcgatgtgccagcgcagaatcacctgggccgggctgacctcatgggcggcggcgatcttctcgatggtgccgtcgccggcgttgaggtcggcgccacgcgccatcggcgagtaggcctccacggcgatgccgtgcttcttgcagaacgccaccacttcgcgctgctgccacgtggggtgcagctcaatctgattgacggccggccatgcgccggtctccccgtgcagacgcttcagatcggcgggcatgaagttgcatacgccgagcgtgcgtgccatgccttcgtcgcgcagcttgacgaacgccttccaggtgtcggtgctgcgccagtcgaacggcgtgggccaatggatcatgtacatgtccacgtaatcgagctggaggagtttcagggagttgtcgaatgccttgagcgcggagtcgtagccctgctcggagtcgcgcagcttggtggtgacccacagggtctcgcgcttggcgccggtgttgtatccggaagcggcgagcgcacgacccacgccggcctcgttgttgtatccggcggcgccatcgatgtggcggtatccggcttccagcgcagattcgacgacaggggccacgccctcgtcatcgatacgtagcatgccaaggccgacctgcggaatggaatggccgtctttcaaggcgatgtccggcacgttggcgggattgatgtgtccgttggtcatggcttgtgatgctccttcatgtactgcaactacacgccactgtacacggttatgcaggcgatgtgcgggtgctgcaaccaaacggcatgattgcgcccggccttccgtgtgggagagccgggcgcaatcatgacaacatcacgctctactcctgcgaccggccctcgccctattgttcccgggcgcgaatttgccccggtacaggcgtcaatcgattgacgtttgcaccggggcagaaatcgttgtcccggtacgcaatttcgggccattttcgagaaccaggacaagacaatccccaaagtccacataccccgacaaacagaatcggcggaatacagccaatcccgaaatcaacatactgtcccggttctcacgtagaacgattgacgtgcaaaccggggcaacgggaattgtcccggtacgcgaaaaacacccgttttcgcaaaccaggacagtgatttctgtcctggtacccacatcaaacgattgatgcacgaaccgggacagaatcgcatcgctgcgccgagacagacgcatctgacagccgacaaccgataaacgacagccgacagatggcatctggcagccggttgccggctgccggcaaccgcatcataatgccgcatcagtctctatcaggagcgcttacgacgcaaagcaagcgagaccccgccggccacgccgagaacgacaaccgcaagacccacggcagtcaccgcgctaccggtattgctcagcacaccagtgatcttgtcgccattcgcaccgttggtcttatcgccctcgcccgtatcgggattgatagtagccccgccattacccgcaccgtccgagccgttgccggaaccaccttcggcccgagcggtaaccgcaaccgtataggtttcggtgacattcggattcgacttgagcgttacggtaaccttcgccacatcagcgggagcggagaaatcgtaatcgagcgtgaactggtcagcggcaagcgcctgatcgagtttggcgagcgactcgttggtgtactcatcgcgattgattttcccggcttcggccacagccttgtccaggttctccgtggatggcttcaccggagtttcggtctttttgacgagtgagaccttgtccacattgtggttgctcaactgtttggcgtaagtggcgtaggtgccggctttctccgggttggtgaaatgaatgacgaccttggcttcggggagcacttcgcgtatggctttggaacctgcggagaatactttggacatgccgtcccagccggagatgccggcgattttcgcagtggtttcgttgccgacctgcaccatgccgacgtccatgccggcttgtttgaacgtggtcagagtctgcttggtgtaatcgtatacggtgtcggcggttttgtccgcgtcgccttcaaaggatttccacgccttgggcacctgctgcttgctggggtcggcccagaaatcggagtaatggaagtcgaccagcactttcagccctgctgccgtggctcgcttggccatggtcagtgcgcgatcggcgttgacgttgccgccgccatatccttggccgtctgcggtgaacggatcgttccacacacgcagacgcacatagttcacgccggattccttgagcaacgtgaacaaatcctcgacctcgccattggcgttcttgaacgtgacgccgctttcttccagcgagagcatggatgagacgtccataccgccgatgaaatcatcgcttaagccttggatggccttgaccgagacgtcggctttaactggttctccttcggcggcgtttacagtgaacgtgcctcctgcgcagagcattatggcggccacgccggatgccataatgcgagtaagcgcggtatttcggcgcatgctttttctcctttgaatggtgaacgctcagaacgaacgcccagtgatgcttggcgcttcctttccttacgcgccacgcggtacagctgtgtaccacgcaatcgtcaccttagcgctttatgccgtgttggtcaaccggtgtatcaacgcctcgtacggcccagtacagcaacaccagcattacagcaatgtcgttcagcgtgtggaggcgcgggcgatgacctgggattcggtggtgagcagttcggacttggtgatgctgccgtcgatgcgtccgaggatgcgatccactgccgtgggagccgtccagtca

SEQ ID NO: 1994 - DNA, 9608 bp, Unknown
  R17_18m  MAG No. k141_25303
cgcaacgctgtgtctcaccctgattcccgctccggtgacattggaatacacgcatggcacggctatgatcgggtccctggtgacgatcgagaaacgaattcccgaatatgccgccaccgaaggtgccgatgagacttgggaaacgctgccgattgagcagctgtccagcgagctcgagcgttactgcggcgtcaccgtccgtacgcgccgtgtccgtgcagccacaggtgaagacgacgccagcgccaatgccgccgaagatgcgcgagatgcgcgtgcgggtgcgccggcagcgatgaacggcaccgtcatatccctgggcctggattcacgattggcgcatgacgaatacacgctggatgtgttcgcctcagataccatcgccgtgcgtggcggcggcgaaagcgggctgcggtacggtctgcagacgctgcggcagatcatcgggcagacctcgcgtgccattccctgcctgcatatccaagacaagcccgcgttcgcggtgcgcgcctacagtctcgacgtgacacgcggacgagtgccgacgatggagttcctcacctggttcgtcgaccagctggccttatataaatacaatcagttccagctgtatgtcgagcatgccttcgcgttcgtcgagctcagcgaggcgtggcgtggcaccgatccgctcacggccgccgacatcacgtatctggacgagtactgcgcgcgtcgcggcatcgagttggtgccgtcgttggccacgttcgggcacatgtacatgaatctgcgcacccgtgagcatcgcgggctgggtgagttccccgaagacgccgaccgcccgttcagctttatcgaacgcatggagcatcacacgctgaacgccgccgatcccaaggcccatgatttcgcctcgcgcctgattgaggaatacgcgccgctgttccgttcgaagtccttcaatatcggcggcgatgagacgttcgacttgggacgtggcaggtccgcgcaggacgcgccggaagccggccgcgatgaactgtatgccggtttcgtcagggatttgtgcgaaacgctcgcccgccatggtcggcagccgatgttgtgggcggacatcgcgctcgaaagcccgcgcacgatggatctgctgcccggcgacatcacgatgctcaactggatgtacgagccgcagatcgacgagagcaacatccagaccatcgccgcgcagggccgtcgccagttcgtgtgccccgcggtgcgggcttggagccggttcttccccgattatgcgggtgcctggctgaacacgtatcacatggcattggcgggtgtcaagtatggcgcggaaggcatggtggtcaccgattggggcgattacggccacgtcaacgatccgcgtctgagcgtgccgggcctgtgttatggcgctcagaacgcgtggaatccgattgagatcgatgcgcatgagatgaaccgtcggatctccgttctggtgtatggcgacgagtccggtcgcatcatggattgcctcgtccgcatcgactccgatggggtgtcattcccctgggaccttgccgtgcaggtgctggagctggaatacggttccggcaccggcatgctgaatacggatgtggcatcgtatgtggaacggtcgtgcgggggagagctcgtgtttgaccgtacgctgggatgcgccgatgcgcgccgccggctgctcctgcggaaccatgcccgactcgaacgacgccgggattgcgaccgggcgttgatcgattgcggcagtgcggttgttgcggtgctcgatggctcggcacgaggaggattgaacccggaactgctgtgggtgatgctggatgggcagcggttgttcaatagactgggcgaggacctgctggtactggctggcggcgaggacgcctgtgacaccaaggatgtgaccggccgtgcgctggatgcctcgcgccgcgcccgtcttgccgccgatctggagttgtggttcgaacggtaccgtgtgcagtggctgtccatcggccgctacgccgaattggcgcgtatcgcccatgttgtgtggtcgtttgcggacatattgcgtaggggagcgctatagggagctcacagaaattcggtcctgctgagaacaaggtgaggcttacgcgccgtcaaacgcacatggtgatttcaaaaaatggcgaattgctgccattcttgcacctgtgcgtttgatgggaaatgtgcgtatgcctcacattttttgcataaagcatgaaaatgtgtgagaccggcgtatataacgtatgataaagagtcaacattcgtggtgtggtgggtccattaagggggtgtggtggtggcaggtatcaaagatgtggcggcacgtgccggcgtatcgattagcacggtgtcgtatgtgatgagcggaaagcgctccatcaaagaagagaccaaacgaaaggtgctgaaagcggcgaaagagctgggatatatgccgagtcgcactcaggagctgcggcatagcggcccgaccaaggttctggcgttgagttcgccgctccatgaatacaccgattactcgaattacgccgtgttcttctttgcgctcgccatacgcgccaagcgatatgggtatgaccttctgctgctcatgcacgaatacggcgatcaggaactgacccgggtcgccgccgaaggcatggtcgatggcatcctgctgttggatgtgctgatgtgcgatgcccgtgccgatgtggctcgcgctctcgacatgcctgtggtggcggtcgggtacccgagcaattccgatgcggtgtattcggtggatttggatttcgagcgtatgggtcgcgaggcgatggagaaggcgtatgcgctggggcatcgccatgtgctggtgtccggcgtggacagcagcgcgtatgaagacggctccaattacctggtccgttttcttgacgccgcaaagaaaaagggcgatgatctcggcatatccgtgatcttcaagccctctaccggcaatgggcgtgacgacgtcaatctgatgttggatgagacattccttgaagacccggcgatttccatgatcatttgccagacgaatgcggcgcatgtggccaacgtgctcaacggtctgcaggatcgtggattgcgcgtgcccgatgacgtttcggtgatggccgcatgcacgcatgggctgggatctttgccgcgtggtgtggatgagatgccgatgatgccgaccgaaacctgctcgcgtgcagtggatctcatgatggaggtgctcaacggcgaccgtgacgatgtcggccgtgtggagatgcttccttcgcgttatatcgcacgtggcaccatggcgaaatgctcgcgcagctgacaggagctcgggtgtttatggctattcgccttatgtgaatagtcacattttatgcagtattccgaacatgaattaacagcgttaagaatgagagcgctcacatcgaaaagtcgttgaaattaacgtcgaaatttatcgaaataatttgagaacgtcgttgccaatccgttatatttccagtggatggcatttcgactggtttcaataatcgtcgaaatgttctctcatcagtaaagaagctgaaaaggagaaaacgatgaagtcgactcgcaaatttatcgccgctggacttgcagttgcgaccatgatcggtgttgctggctgtggtggcagcggtgaagtcgcacaggaggagaaccccacctccatcaagatctggcactacgaggaatcgaccacagcgcaaggcaaggcgtgggacaaggctatcgaaatcttcgaaaaggagaccggtgtcaaggtcgaattcgagaagaaggccttcgaacagattcgccagaacgcctcccagatcctcaactccgacgacgctccggacgttatggaatacaacaagggcaacgccacgtccggcctgctcgccagccaaggcctgctcaccaatctcaacgattacgtgtccgaatatggctgggacaagatcattaccggttccttggccgacaccggcaagtacgatgagcaaggcgtgatgggctccggcgactggtacggcatcaccaactacggtgaggactgcctgctctacttcaaccaggacatgttcgacaaatacggcatcgcgattccgaccaccttcgacgagctggaaagcgcgatggccaagttcaaggagaacggcatcaccgcactgtccgtcggctccgccgagtacccgacccagcacctgtggtggcagctggtgctctccaaggccgatgacaagttcatcaaggcctacgagatgtacgacggcaaggtcgattggaattccgaaccgctcacctacgcaaccgagaagatcaaggaatgggtcgacaagggctacatctccaaggattccaccaacctcaaggctgaggacgccggccagaacttcatgaccggcaccaatccgatcttcttctccggcacctggtggcacgctcgcttcaaggaagaggccgccggtctgaatgtttcctactccaagttccctgacaccaagaagattgtcggctcctccggtaacgtctgggtcattcctcagaactccgccaagaaggatctggctgccaagttcatcaacatcaccctgagcaaggaagtccagaattacatggccgagcagggtggcctggccatcaactccgacgtcgattccatcaaggatgagggcaccaaggaattcgtggcccagttcgatgacgccgtcaaggaagaccagctcggcttctacccggattggccgacctccaccttctacgatgagctcaatgcctccctgcaggagctggtcaacggcaccgccgacgtgaagaccgcgctgaaccagatgaaggacaactacgacaagggccttgaatcttccggcatcgtcgtcgattagcattcgattctttcctcgtcccttcctccaagaggcgaacgaaggcgtgtggtcggtttctccttcccttgccgccacgcgtctccgttcgtgtcccaacaatcttgcatgctctacgtttagaagtgtctgatgaaaacaaagaccaataaagccaagcacccggaagaaaccgcaatgtcgcgcatcccgggcagcccttcgaatcgtttctggttgtacctgattcccggtgtggcaatgctcacctggatcatcatcgttccgggcatctggaacatctatctgagtttcactaactatcgcggcattaggccgccggtctgggccggcctcaagaactgggtccgactgatgaaggacgataccttctggatttccttccgcaactcgatctggatgatcatcgccatggtggtgatcccgattctgctcggtctgatcctctcctcgctgatcttcgacgttgtgcagaagaagttcagccccaaggccgcgtccacgatgcgcgccgtctactacttcccgcagctgctgcctatcgccatcggctccctggtcatgggttggattttccgagctgagaacggtgctctgaactcattgctcagtgccataggccttggaagcctgcaacatgactggcttggcaaaccggatacggccctgatcttcctgatgctcatcatggtctggattcaggtcggctatccgttggtcatcttcatgtccggcctgcagcgcgtcgatccggaactgtacgaggccgccagcctcgacggcgccaactggtggcagcgcttcagggccatcaccctgccgtccatcaagccggagatcttcgtggtggccctcacctgcaccatcgcggcactgaaggtgttcgccccggtgtacatgctgaccaagggtggccccggcactaccaccatcgtgccgtcctactactcctacacccagttcttccaggtacagcaggtcggctacggcgccgcgattgcgaccgctctgacagtcgtcatcattatcgtggccatcgtgttcaccaaccttcagcagaaggtcgaagctgaggacggagagtgattgaaaaaatgagcactatgagcgcagctgaattgaagaaaatcgccaaagtcaagaagaaccgcaccgccggcgactggctgatcatcgtactgctgattatcggcggcttggtgatgctgttcccgttcgtcgttctttgcctgaacgccttcaagacttcggccgactacaacgccaacggcccgctgtcctggcctgcctcgttcacgcttgatggcttcatcaagttctggacccgcgtcaacttccccgaaaaggtgtggaactcgatctggacctccggcctggtggcaatctttgccgtggtgctgtccgtgttcaactccttcgccctcggcatcggccgagtcaagggccgtcgctggatcattctgttgatcatgctcgcgaacatgctgccgcaggaagccctcctgtacccgctgtacatcatgttcaaggaaatcggcctgtacaacaacccgtggtccatcgtcatcatcttcaccgtgatccaaagcgcattcggcacatacctgttgtcgtcggtgtacggcaccttcccgaaggcgattctggaagcggccaccatcgatggcgcaagccgctggaagattctcaaggatatcgtcttcccgatttcgaagccgaccctggccgtcatgctggtgttcttcttcatctggacttggaacgactacatgattccgatggccttcctgatcgacaactcctcgcagaccgtcccgatcgccatcgcctcgctgtccggcgaccgtctgatggatgtgacgaccacggcctccgcctcgctgatcagtatcgtgccgaccttgattttcttcctcctcttccagaggacgctgtcgaacggcatcaccaccggcgcggtgaagtaaggtcattcgcacaacaggcaattcaatcaacaagcagtacatattgattttggtttcggccgccttgttccctgggggtcgaaaccacctctccaccaaggagcagcaacaatgaagttcaccaacggctactggatgattcgtgacggcgtcgacgccctctacgctcgtgaagcctacgaactggcggcggatgccaccaccgaaagcctcaacgtcctcgccccgacctccgtggtgcgcggccgatacgataccctgaacctgcccacattcaatgtggacatcaccacacctgcggaaggcgtgattcgtgtgcgtgccgaacactggcagggtgccaccgaataccccggattcccgctcaacgccgacaagcccggcagccgggattacgtgactgtcagggctgacggcaatggcgacggcgaagtcggcgtcaatggcgcggacgtcacgctgaccaccggcgggctcacggcgaaggtcgtcaagggcgcgccttggaaccttgccttccttgatggggacggcaaggtgctcaccgagtcagcaggcaagtcgctggcccggttcaatcttggtgccggggcgaacgtcaccgcccagccggtcggcgaattcggtgtgagcatggacggctccgcccatgacgagtccgacgtgttcaccgccatccagctgcatctgtcggtcggcgaagacgtatatggcctgggcgaacgcttcggcgcgtacgtcaagaacggccagagcgtcgacatctggaatgaggacggcggcaccgcttccgaacagggctacaaggacatcccgttctacatgacctccaatgggtatggcgtactggtcaacaaccgcggccacgtctcctttgagatcggttccgagaacaccgaggccgtgcagttctccgtgcccggcgaggccatcgacttctgcgtgatctatggccccacccccaagcagattctcgaccgctacaccaagctcgtcggacgcccggcgaatgtgcccgcatggagctacggtctgtggctgaccacctcgttcaccaccaaatacgacgaggccaccatcaactccttcatcgacggtatggccgagcgtgatattccactggccgccttccactacgactgctactggatgcgcgagttccactggtgcgatttcgagtgggacaagcgtttcttcggcgacatcgaatccacgctgaagcgcctgcacgaagacaagggcctgcacatctgcgcttggatcaacccgtacatcggccaacgcggcgaaatgttcaaggaaggccgagacaagggctatctggtgcgcaagcccaatggcgaagtctggcagaccgacttctggcaggccggcatgggcttggtggacttcaccaacccggccgcctgtgaatggttcaaggacaaggtcaaggtcctactgaatcagggcgtggacgccatcaagaccgatttcggcgagcgcatcccgcgcgacgtcgtctggtatgacggctctccgaagctctccatgcacaactggtacacccagctgtacaaccaggccgtgttcgaagccatcgaagaaacctacggcaagggcaacgcctgtctgtatgcgcgctccgccaccgtcggcggccagcagcagcccgtgcattggggcggtgactgcgagtccaccttcaacggcatggcccagtccttgcgtgccggcctgtcgctgacctcctccggcttcggcttctggagccacgacatcggtggcttcgaaggtgcgttcccggatccggccgtctacaagcgttgggtggcgttcggcatgctcggctcccactcgcgactgcacggttccaccgtgtaccgtgtgccgtggctgttcgacgaggaagacgagaagaacggcgtcgcattggtgcccggccagaccgccgtggatgtggtgcgcgagttcaccaagctcaagcttgaactcatgccgtatgtctaccagcttggcctgcagcctcatgtgaacggcaccccggtcatgcgttccatgttcgtggagttccccgatgacccggcatgccgcacgctggaccgccagtacatgttcggtccgtccatgctggtcgcccccgtgttcacctactccggtgaggtttcctactatctgccggacggcgtgtggaccaactggctgaccggcgagaaggcgcagggtggttggcgcaaggaaacccacggctacgattcgattccgctgtgggcgcgcgatggcagcgtcatcgtcaccaaccccggcgaaaccaagccagaccgcgtgtacggtgagaacgcgctggtctccgtgttcgtggatgatgtggagaccgccgaagccgttattacggaaatcgacggttccgccgtaaccttcaccgcgcgccgtacgccggctggcatcgaggtcgcgagctccgatggccgtccgttccgtgcacgtttgggcgcgtctggcgatatcgtcgacgttccggatggcagcgtgatgctgtgacgcgtgctgtgcgtgacgtgcgtggtgcatgtggtgctgtaacacttcggtgttgcggcaccacgcttttgtgctgatatagggatttgtgctagtcgaatccgcgaaatgttcagtaaatgttcacgtagcgaaatcggcatagaatgcgagcaaacgcataacggcacggtgctgttcctgcgtacaccaacgccaggcgaac

SEQ ID NO: 1995 - DNA, 13369 bp, Unknown
  R17_18m  MAG No. k141_25323
ccacggcggtcttgtcggttggcgccatatcccgtgtttgccgcgttcgtcggcggcgaaagttgccgttatgttaacagacgtcagatgtcttattgcagaatggtaaacaaacattttcggaacgataacggtcggcgaagcccgaaatattgccgatattcaaggctggtgaagtataggcagatcagcgcggaggggccttgacgagtgaattcctcaacacgccgatttgaaatcagacatcagacgtcttaccattaaggaggttcgacaacgatgttggtggttccccgcaggagtcccgcacaaaccgcaatggtccgccgtaacgcggaaaggccgaagcggacgcaggccggggaacggtcaatgaagcaattaggaaaggatcgcgtcgtctgtcggacggtgattcgaaattcactcaatgatgaggagatcgcatgatcaagagaaacggaaagttcaaggccgccgtggccgcggccgtcgccagcctgatgctgctgtccggatgcggtggcggcacccagaccgccgcgaagaccggaactgccgtggcggacaccattaccgcccaggttgcctatgcgagccgcgacttcagcccgtccaccacctccggcgccctgccgatggccgcgaactggcacgtcaccgaaccgctgtacgcgctggactacagcacctacaagccctatgccgctcttgccaagggcgatccggagaaggtctccgacaccgagtacgtggtcaccctgcgcgacggcgccaagttctccgacggtaccgccgtcaccgccaatgacgtggtcagctcctaccagcgcaccaccgccaccggctcgctgtacatttcgatgcttgacttcatcgattccgtcgaggcgaagtccgacacccaagtgacgttcaagctcaagaaggcgttcccgctcttcaagcagcgactggcgttgatccagatagtcccgtcgtccatgagcgatgccgacctgaagaacaagcccatcggctccggcccgtggaagtacgccgagatcaccgaccagcaggtcaaattcgagaggaacgacctgtacaacggctcctacccggcccaggccaagaacatggtgtggaacgtgaccgtggacgacaccgcccgcgtcaccgccatgcagggcggcaagaccgacatcatggaaatggtcccggcccaggcgctccagaccctccagtcgtccggctccgagctgaagaccgcgcagggcttcaacctgccgttcctgatgttcaacaccaagaagaagccgttcgacgacaagcgcgtgcgccaggccgtgttctacgcgatcgacgtggacaagctgatctccaaccagatgagcggccaggccgaagcggccacgagcttcctgcccaaggattcgcagtactaccaccaggcgaagaacgtctacaccaaggacacggccaaggccaaggaactgctcgccgaagccggggtcaccacgccgatcagcttcacgctgtacaccaccgaccattcctggatcacccagctcgcaccgcagatcaagaacgatttggccgagatcggcatgaacgtcgacatccagtcgatgaagtcctccgcgctgtacccgtccatcacggacaaggacgacgctgactactcgatggtcctcgcccccggcgatccctctgtgttcggcaacgaccccgacctgctgatgaactggtggtacggcgacaacgcctggaccaagcagcgctccttctggaagggctctgacggctacaaccagctacatgagctgatggacaaggccactgccgcttcttccgattccgaacgacaggagtactggaaccagtgcttcgacctgctctccgaagagctgccgctctacccgctgttccatcgcaagacaaccacggccgtcaggaagggcgcgttctcctcttgggaggccattggctccaccggcatcaacctggtcaaggccaagctgaactgacgcaatccacatatgccatcaccggctgaaccgaacggacggcaaggcaaccggggcgtcctgcgaacgtgcggatgccccggccccgcccgcggcgcatctgaaccgccgatggcgcacgcataggagcttttacagtgagcaatctgttacgactgttgggcaggcgtctgatcgccttgccgttcatggcactcggggtcacctttttggtgttcttcctgatgtccttctcccagtacgatcccgccgtcgcggcgcttggcgagaactccacccccgaggcgctggccgccttccgccacgagatggggtatgacctgccgtggtggcagcagttcttcaactacatcgtcggcttgttccacggcgacatgggcgtgtacggcgtcaacaaggattccgtcgcggcccgcgtggcccaggcgttccccgtcacactgcagctgaccttcatcggcctgatcatcgccatcgtgttcgccatcgtgttcggcgtgctcgccgccctgtaccgcgacacctgggtcgaccagatcatccgcgtggtttcgatcatcgccatcgccaccccgtccttctggctcggtgtgctgctgatctacgtgctgcagatcaagatggcgtggctccccggctccggcgacctcgtcccgttcacgcaggaccccggcgcgtacctggcccgcatggccatgccgtccttcgccctcggcctgcccgtggccggccagctgacccgcatcatccgcacctcgatggtcgaggagctcgacaaggactacgtgcgcaccgccatcggcgcgggcgtgcccaagagcgtggtcgtctcgcgcaacgtgttccgcaacgcgctgatcaccccagtcaccaccctcggcatgaagatcggctacctgatgggcggcgcgatcgtcatcgaggtcatcttcgccctgcccggcatgggcaccgcgatgttcgacggcatcaacggcaaccagccgatgctcgtccagggcgtggtgctcgtcgtggccctcgcgttcatcatcatcaacatcatcgttgatctgctctatgtgctgatcaacccgcgaatcaggacggtgtgacgatgctattcggcaagaacaaggcggccgaggccgcaagcaggcccggcgtcaaattcaatcgcttcagcaagatgaccgtgggaagcaagatctccttcgtggtgatcgcgctgctcatcgtctgcgccgtcttcgcacccgtcctttccccgcacgatccgctcgagatcacgatgagctaccaggcgcccaccggcgaacactggttcggcaccgacaatctcggtcgcgacgtgctctcccgcgtgctctacggtgcccgctactcgctggtcatcggcctgagctcgatcgtcttcgcgctcatcgtcggctcactgatcggcgcgcttgccgccgtgacccgcacgtggatctccgagctcatcatgcgcgtcatcgacgtgttcatgtccgtgcccggcatcgcgctcgccgccgtgttcgtctcgatcctcggccagtcgatggtcggcatcatcatctcgatcggcgtgctctacgtgccgcagatcgcccgcatcgtcagggcgaacatcatcagcgagtacggcaaggactacgtgcgcgcggtcattgtctccggcgcccgcgccccgtggatcctcttcaagcacgtcacccgcaacatcgccgccccggtcatggtgttcaccaccctgtccgtcgccgacgcgatcgtgttcgaggcgtcgctgtccttcatcaacgcgggcattcccgagcccaccccgacctggggcaacatcctgtcctccgccaaggccggcgtgatcttcggctactggtggcaggccatgttcccgggtctggcgatcatgatcaccgtgctgtgcctcaacatcctgtccgagggcatcaccgacgccatggtggccgccccgacggccccggtgaccaagtccgccgccgacgccgaggccgagcgcagggaggatcgcctcctgaccgacccagtcgccgcctacagggagcaggccgaatccctggccgattccctcgccgcactcaaggaggccgaacttaagcgcaccgaccggttcgagccgacgagcacggccgccccggtcatcgaggtcaaggatttgtgcatcaagttcccgcgccacggcgacgtgaacgtggtggaccacgtgagcttctctgtgcgtcccggcgagaccatgggcctcgtgggcgagtccggctgcggcaagtcgatcacctcgctggccatcatgggcctgctggacccgaaggccgagatcagcggcgagatcttgttcgacggcaagaacctcgtcggcatggatcccaaggagcacaacgccctgcgcggccacgagatcgccatggtctaccaggacgccctctcctcgctcaacccctcgatgctgatcaagtcgcagatgaagcagctcacctcccgcggcggcacccgctccgccgaggaactgctcgagctcgtgggcctcgatcccaagcgcacgctggaatcctacccgcacgagctctccggcggccagcgccagcgcgtgctcatcgccatggccctgacccgcgaccccaagctcatcatcgccgacgaaccgaccaccgcgctcgacgtcacggtgcagaagcaggtcatcgacctgctcaacgaactgcgcgaaaagctcggcttcgcgatgatcttcgtctcgcacgatctcgccctcgtggccaaggtggcgcattccatcaccgtgatgtacgccggccaggtggtcgagcagggcttcaccaaggagatcctcaccgatccccgccacgagtacacccgcggcctgctcggctcggtcacctcgatcgaggcaggggccaagcgcctgcaccaggtgcccggaaccgtgccgtccccggccgacttccccaagggcgatcgcttcgctccccgctccagccacccggacgttggcctcaacacgcgcccgatcttcgaacgggtgcccggcacgcatcactattacgccgccctgccggccgatgccgacgtcacgcccgccgcggcgacagtttccacccaggaaggaggtgcccgatgagccacgccgccgaaacccccaggaaggatcccaacgttccgatcatcgagctcagggacgtcgaggtggtgttcaccacccgcgccggatcggggctgttccacaagaacaggatcaccgcggtcaacaaggtgaacctgaagctcatgcccggccagaccatcggcatcgtcggcgagtccggctgcggcaagtccaccacggccaacgtgatgtgcggcctgcagcaggccaccagcggcaaggtgctgttcaagggccaggacgtcacccaccgcaccgccaaggagcgcatggacatcggccgcgtggtctccgtggtcttccaggacccggcgactgcgctgaacgcccgcatgagcgtcatcgaccagctgctcgacccgctggtggtccacaagctcggttccaaggaggagcgcgacaggcgcgcccacgagctgatccgcatggtcggcctgcccacctcggtgctgggcgccctgcccgggcagctgtccggcgggcagcgccagcgtgtcgccatcgcccgcgccctgtcgctcaagccggacgcgatcatcgccgacgagcccacctccgcgctggacgtctcggtgcgcgcacagatcctcaacctgctctcggacctcaagaggacgctcggcctgtcgatggtgttcatcagccacgacatccaaaccgtccgctacatctccgacgaggtgatggtcatgaaccacggcaccgtcgtggaacgcggcaagacgatggacgtgatgcgcaacccgcaggacgggtacaccaggatcctcatggacgcggcgccctcgctgctgcatcccaccgcggccgaatgcgcgtgaggccttcctcgcgttgaaatcgcgttcgcccgattccaacgccgaataatttcagcagtccatttttaatcctcaaagacaatcctcaaagaagggacacatcatcatggcaacccaattccgcggggtcattccccccgtcgtcaccccgctcaccgcttccggtgaagtggacaaggccagcttcgcccgctcgatcaaccgcatgatcgacgccggcgtcgacggcctgttcacgctcggctcgtccggcgaggtggcgttcagcaccgatgcgcgtcgccgcgagatcatccagaccgtgattcaggtcgtggacggccgcgtgccggtgttcgtcggctgcatcgacaccgaaaccaaccgcgtgatcgagcatgcgaaggaggccaaggagctcggcgcgtccgccatcgtggccacgtgcccgttctatgccctgggcggcatggccgaggtggagcgccacttccgcctgattcacgccgccgtgccggacctgccgctgttcgcctacgacatcccggtgtgcgtgcataccaagctgccgggcgacctgctggtcaagctgggcagggacggcgtgctcgcaggcgtcaaggactcctcgaacgacgacgtggccttccgcttcctcgtggacgacaacgccaaggccggccatccgctcacgctgctgacgggccaggaggttgtggtcgacggtgcctacatggccggcgccgacggctccgtgccgggcctggccaacgtggaggccaccggctacgtacgcatgtggaaggccgccgaagccggcgactggaccacggtcaggaaggagcaggactggctggccgcgctgatgcgcatcgtcaccgtgccgcagggcgtggcgggcttcggatccggagtgggcgccttcaagaccgcaatggcgctgctgggcgtgttcgacaccaaccagatgcctgatccggtgctgccgctcaagggcgagaatgtgaaacgcatcgccaccgtgctcgaggagtgcggcatgaagctggaacgcacccccgaagaggtttccgcctccactgaggcctgattgccgcacaaccatatgcgttgcgcgaatgcccgcccgcatgcaagcgcgtggcggcgttcgtgcggcgcaacgccaataggctcatacgaaaggaattgccatggctgaagtgatcatcgtcaaatccgagcaggaggccggcgaactgtatggccgttgcgtggccgatctgatcaaggccaagccggacgcggtgctgggactggccacgggctcgagcccgctggcggcgtaccgggcgctcgcgacaatcgtcagggacgagggaatcgacgtatccagggtgcgcggtttcgcgctcgacgagtacattggcctgccgctgacgcaccccgagtcgtaccatgcgaccatccaccgcacggtggtcgagccgctgggactggacccggccaaggtgcacgtgccgggcgacgcgctgaacggcaccgcgctggaggacggcgacaaggtcgccggcgccggtgcggcatatgacgcggcgatcgaggccgcgggcggcatcgacgtacagattctgggcatcggtaccgacgggcacgtgggcttcaacgagcccggatcgtcgcttgcctcgggcactcgcgtcaagacgctgaccgagcggacccgcatcgacaacgcgcgcttcttcgacaacgacatcaaccaggtgcccacgcactgcatcacgcagggcatcggcacgatcatgaaggcccgccacctcgtgctgctcgcgttcggcgcgggcaaggccgaggcggtcgcggagaccgtggagggcggcgtgagctcgtactgcccggcatccgccctgcagctgcacccgcacgctacgatcatcgtggacgaggcggccgcctcgaaactgcgcggcaaggactactaccggtattcctacgagcacaagcccgcctggcagaagatctgaggaaacgcagatgcaaaaacgctatcaggcgacgatggtcgcggatgcgctcgccgccagggcgggaaccttcgtcattcgcaatgcagtcaaggccgatgcgcgtggcgtgcagctcaacgcatgggtgagcgtgacggacggcgtaatcgacgccgtgggcacgagcgacgctgaccttgaaacccgcatcgcccatctcagcggcggggaccaggtcgccgaggtcgatgccggcggcatgctcgtgacgcccggctacgtggacatccatgcgcatggcgcctgggagcgttcgttcgacgacggtgccgagggcatcgccgtggcgcgcgcgtaccacatgctgcacggcaccacccgccaggtgctctcactgatcaccaatccgctggatgtgatggcgcggaacctcgaatgcgtcaggtccgtgatggcaacgcggcccgacgtgctcggctcgcatctggaggggccgttcctggcgttggcccgcaagggggcgcatgacccgaactgcctgtgcgatccgaccccggagcgcgtggagcgtctgcttgaggccgccgacggcacgctaaggcagatcaccatcgcccccgagcgcgaatgcggcatggacgcgatccggcgcttcgccgcggccggcgtggtccccgccgtgggacactgtgacgccgactatgacgtcgcacgccgggcgatcgacgccggcgcgggcatcatgacgcacatgttcaacgcgatgaacggcatccaccaccgcgagcccggcccgattccggccgcggtcgaggatccgcgcgtcacgatcgagctgatcaacgacggcttccacgtggccaatcccgcgcttcgcctggcactgggtttcgcgccgcatcgcattgcgttcgtcaccgacgcgatggccgccaccggttgtgcggacggcgcctacaaactgggcgcgctggacgtcaacgtggtgggcggccacgcccggctggtgtcgaacggcgcgatcgccggctcgacgctgatcctcgaagtggcggtgcagcgcgccgtgcgcgagctcggcatgggcctgaccgacgcgctcgaagccgccacgctcaccccggcgcatgcgctcggccttgatcggccgaaccccgtaaccggcgcgccgctgggcctggtggcccccggctacgccgccgacctgctgctcaccaatcccggcacgctcaccgtgaccgcggtgtggtgcgcgggccgtcggatcgtgtaacgggttactttttgaaggggcgtgtcgcatgtcggtcgggccgactggattgcccgcgccaatcggcccgcggtttcgggtttactgctcctggacgatgcgacgcttgagaatcgattcgatcggctcgtaatggtcgaacacggcctcgcggtagtcgtccacattgccggccagcgccgcgttgagcatgcggtgatgggcgtcggcggtacggtcaagttcgctggaaaccgccagtccgagctgggggagcacggccatgtgcacgagccacagggagcggaccatctgcttggccacggtgttgttgagcgaatcgagaattcccctgtgaaattcgatgtcgagcccggtgaacgtcttgccttccttggcttcggcgctcatgcgctcggcaagttccgtcaggcgcggctgctcggttcccgccagggacgcgcagacctcctcggcgcatcccaggtcgaggaagcgccgcagttcgaccacgtcctgcagatcggtgaaattcttgccgaccgacgccatcgaccggaaggcgagcgtttccaccatagggtccagcgacagggaaccgacgaaggtgcccttgccgtgctccaccttgacgatgttcagcgcctcgagcttgcgcacggcctcgcgcaccgacgaccgggacgccccgatggtgtcgcacagctgcgtttcggtgggcagcacgtcgcccggttgcagacgttcgcacagtatgtacgacttgatcgcgtccatcgtctcgtcgcatcggctgcgggaagagacctgcgtggtcgaccagttgcccagggacaggcgcgccagcgcggccagctcctgcgtactgtattggccttgcggcgcgtcgggttccgtatccgttgcgcgtgagcccgccgtggctcggtctgctgtgccgttcatgatgactccttgtcgtccgtatggttggccgcgacgcccttatcgtggccatgtgaaaaccatgcaagggggatatgcgtaatgtaaacccccgtcgtctctatttcccacaatagtcccaattgtgaaccttcacattctacgtcgtgcgtcgtttcacatattgccatgcattgatagacatgatgatgggggtgcacgcacaggctgcccgtccaggtccgtccgccgtcctcgctcagtcgcaccatgccccgtccccggtatggcatcatctggctggcgttggcgaacagcaccgcgtcagtgccaagctgcggcaccgcaagggcgttcggctggctgaagatctccggcaaggcgggatcgaactcaagctcgtcccaggtatcgccgccatcgtggctgaccgccttgcccacgcgtccgctggcgtgctggttgcggaaaaacgccactacgtcgccgtccgcgcgctgtacgaacgtcgtttcgctggtcgttgcgtcgtcgtcgcgcatggtggctggatcgacgacggtcccgttgatctcgcgcccctcgttgatcatgcgtccgcgtcgccaggtttcgcctccgtcgtcgctgatcagtgctccgccggaatagtgggcgcggctctgcccgctgcaatagaacggcatgagcagacgaccggcatatggccccttgtccagctggatgccggttcccgggcatacgcccatgaaatgcatccattcctctttgaccattgcgtcaatgaggaatggcggtgaccaggtctcgccgtcgtcgtcggaatggatctgcgcgatgtagcaggtgggaaccgcatgccagcgttgcgacgggtcggcatgcatgggacttcgccacacgtcgccggcgtcggccacggcgtccagcgtggtctcattgccctgagcgtcccgcagacgcagaacgccgtcgcggttcacgccgatgccgcgctcgcagttggtcaggccgatgcctccgggattgagatcgattaataccgtgatgcgtccgatgctccggtccactacggagcaggagtcgagcgcgctggccccgtccagcccgtcctcgcgtccgggcatgtcgatgaccgtctgcatcggcatccagttgcgcccgccgtcggttgacctgcggatgacgaagttgatgtggttgggggcgtcgttgctgatcgccgttcgctggtcggccccggcgatcagcgtgccgcggacggtgcggatcagcgagggtatgcgatagctggccgacccggcgtatcccgcgtcgaacagcgccgtggtgaccatcgggggagtgtgagcgagccgtgcgatctgcccgtcggtaagcgcgtggacgtacaggcctccacggctgacctcgcccatgagccgcaccccggcgatattgcgccccacggtgaaagcgtcgatgccttttcggccgtggcgtggaccggccagatccgcgaaccacatctggcccggctggtgcagcacgctgacgccgtccataaagaggtcaacggcgccgcgcgaggagcggacggccagatcgtgccagcctccgtcatcccaatggcccggcgcgtggcatgcgatgcccgctccggattcgtcccgcatggccagcgtcagtcctccggcgccgatggcgacggtcatgcgctcgcttccatcgacgccggccgcgaggatcgtgccatgctgtccgcgaccgcgcaggcggaatctcgcatggacgctgcccgcatccgccagggcgatgcgatcggtatccctgggggagagccggtccgaggcgaagacgatatccggcttggccgccgcggcatgctcggcgatgcggacggcgtcccaatccacggggtcgacgaggaacgcattgcaggcaatggcattgggtgagccgaggtcgaatgcgcccgatgggtggacccgtgagggattgagattgccggcgcaggcaaagcattggtatccgtccaggtagatgcgcgtgccgaacgcgccgaaggtcaatgcggcctcgtgtatcgttccaggatcgaggccgaaggcgtcttcgatgtcgaggctgacgtgggactgcgcatttgggtcggccgggtccggggacagggaccgcgccgtcagcgtgaggtgcccgtcacgcacggccaggcaaaggtatggggcggcagtgggaattccgtcggcggtggcggggacctgcgcccgccagatcggcccgtccgcacgtacggagaattcggcgatgacggtgcccgcgccgtgtgggaaatccgttgtctgccatggtgccatgctcgtcgcctcggtcttgtgatgggttgtcgtacgtctcgatatcgagacatcagacatctgataagttaatcgtatcatatggatgccaatgaaaattggcacccgttgtctagatgaaagtgcaacaccctttaaattggagattgtccagataaccagtgaaggggtgtcgcgccttgggtcaagtgtattcgcacctgtcggaagaggaacggcggatcatccggatagagatcggcaacgggacgagcatacggtggatcgccggcctgatcggcagacacgcctccacggtcagccgcggaatcaaacgcaacacatggttcccgtccaacgagaacgaatcctaccggccgtaccggccggagcgtctcaagacggggccgtggaccggccggtgccacatcgccggccccgcgcaccggaaggccggacgccgccgcgccaggaccggcgtcacgcacgacaacggcaccgagttcgcccgccacgcggaactgcgcgaacggctcggcatggccacctacttcaccgccccgtacccgtcgtgccggcgcggcggcaacgagaaccgcaacggcgcgatccgccgctacctgcccaagcgcacgcgcgtcgacccgtccatggccgacgagatacaggccatcgtggacgagaccgacaaccgtcccatgcgcgtgctcggctaccgcaccccggccgaggcattcgccgacgaactgctatcattaaccgaacaacaaggatgttgcacttctaaatagacaacgggcttttgtgctgatatagggatttgtgctagtcgaatccgcgaaatgttcagtaaatgttcacgtagcgaaatcggcatagaatgcgagcaaacgcataacggcacggtgctgttcctgcgtacaccaacgccaggcgaac

SEQ ID NO: 1996 - DNA, 9942 bp, Unknown
  R17_18m  MAG No. k141_25830
tagcgtgggccgtgggcagaagggccgtccgtctcgcatagccgaccggtcaaaccggcgaaaatcaccattgccatcgaacggggaccggccatatcatgaaacaggccggctacaaaccggccatacagtaaggcggcaacggcgaatcaattgtcgcccataccaaaaaggagcacccatgaccgcttcaccccttgcgcagaaagcgaccgatgctttcaacgcgccgatctgcgaaaccgatcctgagatcgccgaactgctggactccgaactgggccgccagcgcaatggccttgagatgatcgcctctgagaacttcgtgccgcgagcggtactgcaatgccagggctccgtgctgaccaacaaatacgccgaaggctaccccggccgccgctactatggcggctgcgaatacgtggaccaagtcgaaaccatcgcccgcgaacgcgccaaggccctgttcggcgccgaatacgccaacgtccagccgcactccggtgcccaagccaacgccgccgtctaccaggcgctcgtcaagcccggcgacaccgtgctcggcctggccctcgaccacggcggccacctgacccacggcatgaaaatcaacttctccggccgcttctaccatgccgaggcttatggcgtgaaccccgagaccttccgcatcgacccggaaatcatccgccagcgtgcgctcgaaacccacccggccatgatcatcggcggttggtccgcctacccgcgcatcgaggacttcaaggccatgaaggaaatcgccgacgaggtcggcgccaaattctgggtcgacatggcccacttcgccggactcgtagccgcgggcctgcacccgagtcctgtgccgtacgccgacgtagtctcttccaccgcgcacaagaccttcggcggcccgcgctccggcttcatcctcgccaagcaggaatacgccaagaagctcaactcctccgtgttccccggccagcagggcggtccgctcatgcacgtgatcgcgggcaaggccgtgagcttcaaggtggccggcacccccgaattcaaggaccgtatgcagcgcacgctcgacggcgccaagattctcgctgaacgtctcctggccgacgatgtcaaggccaacggcatcagcgtgctgaccggcggcactgacgtgcacctggtgatggtcgacctgcgcaacagcgagatggacggccagcagggcgaggatctgctcgccgcctgcggcatcaccatcaaccgcaacaccgtgcccttcgacccgcgcccggcctcggtggcctcgggcctgagaatcggcacgtccgccctggccacccgcggcttcgggccgaaggaatacgaggaggtggccgatatcatcggcaccgcgctcgccgccggaccgtccgccgacgtgaccgcgctgaaggcccgcgtcgacaagctcgccgaagacttcccgctctaccccgacctggaccagatccactgatttgctgattcgctaatccaccgtggtgtaccggttagtgatgattcgctgaccggagcgcatcacgtcaccggcttcccgcctgagacggaggggagccggttctgtttgcgattcaaaacgtcagacatcccataacaagcgggtcggagtaagcaatcagccgcgttgtgagttacgcttgactgttatgagcgatgaattgagtcctgaggtgttcgacgcggtgtgccgccaggccgatcaggccgcacgcgcgcaggagcgtcttgcacaggcaaataccgaagccaaaaacgaactgctgctcgccattgcggatgcgttggacgggcacgccgcggacatcgaagccgccaacgcgctggacatgctcgaatccaaggaaaacggcatggatgcgggcaagcttgaccgcctgctgttcgacgtgccgcgcgtggccgccgccgcccaaggcgtgcgtcatgtggccaccttgcctgatccggtcggcgaaatcgtgcgcggatacaatctgcccaacggtctgcgccttacccagacgcgcgtaccgatgggcgtcatcggcatgatttatgaggcccggccgaacgtcactgtggacgtggccagcctgtgccttaaatctggcaatgccgcgttgctgcgaggcggtcacgccgccgaacgcaccaatgctgccacgctgggcgtcatcgccccggtgcttgaagcacacggtttcgaatccgcactggtgcaatccgtcgaccagtacggacgcgccggagccaccgccatgatggaggcgcgaggccatatcgacgtgctcgtgccgcgaggaggagcgggtctgatccaagccgtcgtgcgcaactccaaagtgccggtcatcgaaaccggtgccggcaacgtgcatatctacatcgacaagtccggtgatctcgccaaggccatcctgatcatcatcaacgccaaaacccagcgcgtgggtgtgtgcaatgccgccgagaagctattggtccataaggatgtcgccgccgaattcctgccgcagatcgccgccgctctggccgaggcgaacgttgtactgcaggccgacaccacgtcgtatgacatcatctccggcgcggcgatcgagggccttgacctcaaccgcgccaccgaggaggattgggacactgaatatctggccctcaagatgggcatcaaggtggtgccggatctgggcgcggccatcgaccacatcaacacgcattccacgggccacaccgaatccatcatcgccgaggattatgcggccatcgaggaattcgccaagcgcatcgactcggccgtggtcatggtcaacgcctccactcgcttcaccgatggcggcgtgtttggctttggtgctgagcttggcatttctacgcagaagatgcacgcacgcggtcccatgggattgcgggagatgaccaccaccaagtggatcggttacggaacaggccaggtgcgcgcatgaacgaggacggcaacatgaacactacggctgacacggcaaacaaggcaagcgaactgcggcccgacatcgacctcaacgatcccaagctcggcctgaagatcgcggccgaacggctcagcatcgtccgctatgtgttcctcgtgcagattgaggacggcatcgcctccgccgcccagcgtgcgtcgctcgaatacgcggacgccgtgctcatcggctggcccgagaccgattcacccgaagtcgtggacctcaacgatgcccagctcaagatcgtgcgcgaacacatggaactcatggaaggctacatcggcaaatacagccagatggagcacgacggcgacctcgacggcatgaccgacacgctcatccgcatcaccgagcgcgtggccgaggtccgccgcctctaccagccggacttcccgctgcccaccttcgccgagattcgtcgcgtggtccaagacgaatgggatgaagacatgggcaagatcgatcccaaggaagacaatccctccgccggcgaaatcgaagaggaaaccgaatcagccgatgacgccgccggcgagggcggccaggcatgagtggtgttaccggcagccacaaaacggctgcgtcagttcagtccgaaaaaacagtggaatccgccgagcccgccgaaatcattgccgtcacccaaggcgaaaccgaacggcgcatgtccgacctgtccgtaccggccggggccagcagccacggcaaaggcaggctttccgcacgcggcaactggcatacacgcctgcgcgtcggcatcatgggcggcacgttcgacccgatccacaacggccacttggtcgccgcctctgaagtcgcctgggtgtatgacctcgatgaggtgattttcgtgcccaccggccgacctgtgttcaagctggacaagcacgtcaccaacgccgaggatcggtatctgatgactgtgatcgccaccgcatccaaccccaaattcaccgtctcgcgtgtcgacatcgaccgtccgggcgtcacctacaccatcgacactctgcgcgatatccgcgcccaacatcccgacgccgagctgttcttcatcaccggcgcagacgccgtggccgaaatcatgcagtggaaggacgccgacctcatgtgggacctcgctcacttcgtggccgtcacgcgccccggctactccagcccggacggcgtgaccttgcccgaaggcaaggtcgatacgcttgagatcccggccttggccatctcctcgaccgatgtacgccgccgcgccgaacacgacgagccggtctggtatctggtgcccgacggcgtggtgcaatacatcggcaagcatggtctgtattcgtacgaggactgacgattcgtacgaggactagtgtgcatttgtacgagggctggtgaggattagcgcgaatcagcgcgcatcaatcctcgccagtgcaaggatgaacggtcaggccagtcccatcttgattttcaatgtcattacgcgagtcgccgccgccgtcaccttcgaagcgaaagccggatcggactccgcccgttcgttgaggccgtccacaattggctttacataatccgtctgaccgatgcaggacatgtcgccgcccgcctcgacaagatttactcccaattggcttacatcgtagctgctcaacgcttcggcagacatcgaatccgaaatcaccacgcccgtgtacttcaggacgttgcgaatatgaccgtcgataatcgtagaagaaaacaccgccggattattcgggtcgatggattgatacgtggctaacgacatcatcaccattgcaggatcggccttggtaatcgcctggtcaaaggcacctgcctcggccccgtccaacgtggtggtcgtatccagaatgccttcggtggtgaagtcggtattgccgcttaccgcgcccaacccaggataatgtttgaccgccgcaccgacttgagcgtctcgcaaaccttcaataacggcgatgccatgttcggcgttgccggccgcatccaatccgaaatcacgatccagcgcgccaatcggagcatttgaggcacgattgccaaccactgtgccaagcaccggtgccaaatcgacatttatgccagcagtggctaattgcgaaccccacgtgcctgccgattgacgcaatgcgtcagcggacattgtgccctgcacaacggcactgggcattgtgtcgaaaccggtaccagtcagatgctgtacctgaccaccctcctgatcggtggcgatgatgagacgattgccggccggcgcatatccttggagttgcgcggtcgcggtcttgaccgtatcgacgccggtattccaattgccaatgagaatggccgagccaatgtgctcgtcggcgattgttgaagccaacgaggagggttcggaaccggcgaacaacggcaccatcactaactgtcccacacgttcctcaagcgtcatggcggataccgcacgttgggcttgtgccgccggatcgtcgttcttcttcggggaaggaacgtcggtgcgcggtaacgcactcgtctgggaggtctggggagtggtggtgttgccgtttgatgtggatttggcgaaccatccgacatgccatccgtagactgccacaccggccaacaccaccgccaaagcacatattgccgccacgattggaatgctcctgtgccgaagttggcgtgtggcgtgtgctgagggacgcatatgttgtggccgttgtctgtccataccggcaagcgtagaacagagcgtagaacaggatgttgcctcattctgtgctcagggcataaccgacctcccgccctttcgataggcttgagttatgtcttttaacgatcctttctcagtactgttcggcaatggcggcgattcacgacgcaacaatgcgaacaatgacgatccgatcatcctcgatgtcgaggccgatggggacggtccggcccacaacaccaacgctggcccctccgggtcatcccgccctccacgtggtccggccaatccgcgtatcacccgtaagccagcgtccggtggctcaggagccagccgtggcagcaagattctgatcggcgtggtgctggccttggccatcatcgtcggtctgttcttcggcctgtcccgattcatcaccgatctgatgtggtacggccagctcggcttccagtccgtggtctggacccagctcggggtgaaaatcggtctgtgggtggcctacgcgctgctcatggccctgaccggcttcgtttccgcctggctggccattcgagcacgccctgattcggccgacggttccaccattcgcattaacggcgatgtggtcgaggtcggcaaatccgtcagctcgaaaaccgctcgccgcgtggccgtggtgatttcgctgatcgtcggcgtcatcttcggttcccagtttaacgcgaactggagcgagattctgctcatgttcaacgcgcagtcgttcggcaccaccgatccgcagttcggtctggacaacggcttctacgtgttcgtgctgccgggcctgaagctcgtgctcgccgccgtggccatgctgctgggcgtgggccttgtgttttccgtggtcacgcatgtgctgatgggcggtatccgcattaccatgccggttaacggacgcggcctgttctccattaccaagcgttgccgtcgccagcttggcatctggctgatgctcaacatgttcgcttgggcagtgcgccagatgattggcgtcttcgaccagctcaccgtgcagggttcacgcatcaccggtgcctcctacaccgccgtacatgccaacatccccgtcaccttcatcatggccgtgctgaccgccatcctcggcgtggtgctgggcatctggctcatgcgctcccacacgctcgaaggccaggcgtccatcggcgtgcgcgcttccgccgcgctcaaggcctggcgtgtgccggtgacctccattgccgtcgtggtcgtggtgggtcttgtgctcaccgtggcatggccggtgctgttgcaacgcttccgcgtcaacccgaacgcacaggagatggaatccacctacatccagcgcaacatcgacgccacccgcgccgcctacggtcttgacaagctcaagaccgagcaatacaaggtgaccgacaagggtgagcagggcgctctggccaaggaggccgacaccaccgcgcagatccgtctgctcgacccgcaggtcgtcagccccacgttcaaacagttgcagcagtccaagcagtactacaccttcgccgacaccctggcggtcgacaagtacgagattgacggcgtctcccaggacaccgtgattgccgcccgcgagctcgatctggccggcaatgacaaccgcaactgggtcaatgaccacaccgtgtacacccacggttacggcgtggtggccgcctacggcaacaaggtgaccgccgacggccagcccgaattcttcgaatccggcatccctgctcagggcaagctcactgaatccgaaaagtatgagcctcgcatctacttctcgccgaacgccaccgaatactcgatcgtcggcgcaccggagggcacgcaggcttgggagttcgactacccgaccggttcggaaggtgctctgaccacgttcaagggcgacggcggcccttcggtcggcaacctgttctccaggattctctacgcgatccgtttcggctccgatcagattctcttctccgaccgtgtgaccagcgaatcgcagattctctacgatcgttcccccaaggagcgcgtggccaaggtggcaccgtacctgacgcttgacggccgcgtgtatccggccgtggtcgatggccgcgtcaagtggatcgtcgacggctacaccacctccgacgcctacccgtactcgcaaataaccgacctcggctccgccaccaaggattccaccaccgtctcttccgcaacggtctcgtccctgggctctcagaaggccaactacatccgcaactcggtcaaggccaccgtggacgcctacgacggttccgtggacctgtacgtgtgggatcaatccgatccggtgatcaaggcatgggagaagatcttccctggccagtaccaccagctctccgatatctccggcgacctgatgagccacatgcgctacccggaaagcctgttcaaggtacagcgcgagctgctctccaagtaccacgtgacctctgccagccagtactactcaggcgaagacttctggcagacgccggtcgatccgaccgaatcccagtcccagcaggaccaggacatcctgcagccgccgtactacctgaccttgcagaccggtggcaccgaggaaccggtgttctcgctgacctccacctacattccggctggccagtccacccgtgagatcctgaccggcttcctgtcggtcgactcggatgccggcaatgagaagggcaagataggctcgaactacggcaccatccgattgcaggagctgcccaaggattcgaacgtaccgggccccggccaggcgcagaacaacttcaacgccaacgccgatgtatccaaggaactgaacctgctgcaatccggcgacacgcaagtggtgcgcggcaacctgctcaccctgccgctcggtggcggactggtgtacgtgcagcccgtgtacgtcaagtcttcgggcgtgacctcattcccgttgctcaagaagacgctggtcgcattcggtgatcaggttggattcgcggatacgttggatgaggccttggatcaggtgttcggtggcaattccggtgcggccgcgggcgatgccgagaacgtgtccggtgaccaatctggttccgataccaatggtggtcagtccggcaccacggacggaaagtcggattccggctcgtcttccgaccgcagccccgaactccagcaggcgttgaacgatgccgcccaagccatgaaggacagccagtccgccatgaagaacggcgactggaccgcctacggcaaggcgcagcaggagcttgaagacgccctcaacaaggccatcgagctcgacaagtaacttggcttccctcagggtgaggggagctatcgccgaaggcgactgaagggagtcggttacctcaactgacatagcccgtccttatcataaggacgggctatttgcgtattcaaaggaacttcatgccatacaccttccatccggccgtcgaatccgacatccaagccatcaccgacatctacaacgctgcggtggtggcgggtggggccaccgccgacctcaccccgcgcaccctcgaccaacgccgcgcctgggtcgaatcccatacgccgccctacggcgtttttgttgtggaatcggaagacggttcaatcatcggcttcggtgcgctctccgtgttctacgatcgtgccgggtatgacggcgtcaccgatttggcctattacatcgatccggcatggcaaggcaggggagtgggcacgttcatgcttgacaggctgctcaccgaggcgcgggcccgccacatgcgcaaggcctgtggcatcattttcgccgataacgtcggctccattgccctcatgcgccgcttcggcttcacccaattcggcctcatgcccgccgctgccaccgactccaccggcaccatgcgggacatgtcctactggtatttggacctgtaggcccgaggcggtttacccttgctctccatggattccggtgtcctataacactaaaaagttgtatcggatctgctcttttcctcgaacgccatatatcggacgcgcttatcccagataacggcaaactacgggacggcacgcgattttcgtccgtttagacgtggtatcccgcaatcacgtgggatgccacacacgtcaaacgatgcacatagctcgcgtcccgcaactcttcctgcgaaatcattggaattctgccattcttatgattcggtgcagataacgtgcgataacgcttgcgggatgccacgccaa

SEQ ID NO: 1997 - DNA, 21448 bp, Unknown
  R17_18m  MAG No. k141_25917
gcctgcttcatcagctcctcgtccacgcccagacgaccggcggtatcgatgatcaccgtgtcgtagagcttctgcttggcgagttcgatggaatcgcgggccaccttcaccgggtcgccggagatctggcccggagctgcgacggcctcgccgccatcggattggacgcccttttcgggagcatagacgggcacgccggcgcgttcgccgaccacctgcagctgcgtcaccgcgttcggacgctgcaaatcggccgccaccagcagcggcgtgtggccggaatccttgagccagtagccgagcttgccggccagcgtggtcttaccggcaccctgaaggccggcgagcatgatgatcgtcggcgggttctttgcgaagttcagcggacgatcgactccttggccgagcacgtcggtgagctcctcgttgacgatcttcaccacctgttgggcggggttgagcgcgtcggacacctcggttcccagtgcgcgctcacgcaccttgccggtgaaggaacgcaccacgtcgagcgccacgtcggcgtcgagcagcgcgcggcggatttcacggatcgtaccgtcgatatccgcctcggaaagcttgcccttgctcttgagatgcttgaacgcattcgagagtctgtctgtcaaagatgaaaaagctgccataatgggcaacagtctagccgccacgcgggaaattgcggtgttggggacgactctttccggggattgcgtcgcgtagtagtcagggatgttgggcattcagacggcaaatgccgtgccgtccgctcgtggcgaagccaatcgagtgcttccgataccatggaaaccgtaaagaatcctgtgttttttggaatgcttacgctgttttgaaaatcgctggacaccgcttatacgcagactgccgtgcgctccgaaccatgacgtccgggccaacgcagacatgccgtgcaataaggaaggcccactgatgcccacccaaaaactactcgaacgcaaagccctgatcgttggtatcgtcatcaacgtgctgcaggtcttagccggcatggccgtgttcttcatgaccggcctcaaggccatgttcctcgacttctccttcaccgcgatttccgtcctgtccggaatggtggcggtgtatctctcgtcgcgcacggtgcgaaccaccgagcgcttccccaatggcatgttcgcactggaacccatctacgcgatctgcaaggccattttcaccatgtcgttgttggtgtattcgctgattgacgtgtgccgagtagcgtacgactacttcgtgttcgggtccggcgaacgcattgaaaccggcccggtggtcatctacgagatcctgaccgtaatcgtgtgcttcagcctatacacgtattaccggcgttccaaccgctccatcggcgattccagcaccatgctcaccgccgagtgcaagagcacgttggtcgacggatcgatgtcgttcggcatcggcgtggttgccatcttcctgatgctgctaccgaccggcggtccgcttgacttcctgcactacaccggcgatttcttcatcaccgtggctttggtggcattgaccatcaaggagccgttcagcgtgctcaaagaggcgttcgtggaattggtcggcggcgtgcatgacgacgatgaaaccaacgactacgtggaggccgaggcacagcgccatctgcctgccaacaccgactacgagcagacgctgatcttcaagaccggcatgaactacaccgttgacgtgtatctgagcggcatcggcgaaaccattgatgtagctgacctcatcgaatgcaagcgctcgctggagaaggagctcgccaagcgcctgcacatcgtggacgtggacttcgtgtttgactgattgatgggtttgaagcagctacttcaggctccaagtggagccctgcgggccgtcttcgatggcgatgccggcctcggtcagggcgtcgcgaatctggtcggccttggcgaagtccttggccttgcgggcctcggcgcgggcgttgagctgctcggcaatcagtgcctccagcgccgcatgttcgggcgactcggccgtgccatcagcggcaccgccagcagacacccacggctcggccagcgggtcgagacccaaggtgtcgagcatggcacgcacggcgagcagcgcctcacgcacctcggccttggcggtttcggaatcggcgcggtcagccagctgtgaaagcaacgtattgccggaacggatggcggtgaagatcgcggcggttgcaccagacacattgacgtcgtcattcatggcggccacgaaatcggcgggcaaatcgtcggcggagacggcagcaaccttctcgcgagaaggctgaccgcccagtgccacaccggcgcgctcgatgaagttcgagacacggtcgtatgcagcctgcgcctcgaccaacgcctgatcggaccattcgagcatcgaccggtactgcacggagcccaaagcgtaacgcaccacccaagcggaatgctcggccagcacgctcggcacggacaggccggtgcccagcgacttcgacatcttctcgcccttggcggtcacccatgccgaatgcatccagcgcgcagcagaggggtagccggccgcgcaggtctgcgccatctcgttttcgtggtgggggaagcgcagatccaaaccgccgccgtgaatgtcgaagccatcgcccaagtaacggtgggacatggcggagcattcgatgtgccagccagggcgacccacgccgaacggcgtcgaccaacgggcgtcctcgggatcggtgtccttgggggccttccacagggcgaaatcacgcgggtcgtgcttgtcgggggaggcgtcggccgggtcgaccggattgtacttgtcggcaccggtggcgtccacggacgggcccatgcggtcggccacggcagcggcctcgtcgacttcggaggtctgcttctggtgggtgagttcgccgtaatgcggccaggatgccacatcgaagtacacgttgccggtgggcttgccgtccgcatccgtgaccacatagccgtggccgttgtcgagaatgcgctgaatcaggtcgatcatgtccgacatgtggccggtggcgcgaggttccacggtgggcggcagcacgccgagcgtgttgtacgcctcggtgaattcgcgctcgtagtaataggcgcgggcccaccaacgctggccggcggccgcggccttatcgaggatcttatcgtcgatatcggtcacattacgcacaaaagtgactttgtaaccgagcttcaaaaaccagcggcgcacgatgtcgaacgccacggcggcacggatatggccgatatgcggtgacgactgcacggtggcgccacacacataaatgccgacttcgcccggcttgagcggcacgaaatggctgacctggtgcgaggcggtgtcatacagattcaggccttctgcggccttggcgacatgcaccggcgtcaggcttgaaggcatgacggaaatgttgaaatcctgcggttcttggctgtttcccataacgctcaagcgtagggtccgaaccagacatgctgaatcgttactcgaagagtttgatgaacgtttcacaggcggggcccgaacgaggtgacagacggatgagaagcgggacaacagtctcgcgagaatacgtctttgaccgctgcggaaactgcgagattcatggatttgccctgctcgttacgcaaacggggaacgctcgtgccacaatagaagtcatggccacaccacaagtgctcattttgcaacatgtcccatgggaacgtccgggacgcatattgtcgaacctcgaggacatcggtcttgagacggtgacgatgaatatcgtcgacaaaaagaaaccggacttgcctgatttcggcgaactggctggcgtggtaatcatgggtgggcctatgggcgcgcttgattacgacaagtatccggggctgaaggcggaagccaagttggcgcgtgccgccgtggcttcaggcaagccgattctcggtgtatgcctggggcatcagattatcgccactgcgcttggtgcgcagctgcgcaagggcgatgcgccggagattgggttcgcgccgatcaagcgtgtggacaagcatgacttcttctccatgtgggataagcagctgacggtgctgcactggcataacgacgtggtgggcttgcccgagggaggccagctgctggcacgttcgtcttccaccaaggtgcaggcattccgactgggatccgcgctgggcatgcagttccatcttgaggtgtgcggctcgctgctggacgaatggctggatgagccgagcatggtcaaggatctcaaggccgcgggtgggtccaagtcccaattgcgcgagcagttcgcccaatacgatcagctactgcatccgctcgccgagcaagtgttctccggttttgcggcccgctgcaactcctacgctcagacgctgaacaaataacgtttgtggaccgccgctgggcaagcgtggcgctacattggtgagtcatgccgacttatgacattggactggaacacgtttcgctcgccttcgccaccaaaaccatcttcactgatgtgacgcagggtgttttcgagggcgaccgcatcggcatcgtcggcaagaacggcgacggcaaatccacgttgctgcacctgttccgcggcacccaggagccggattccggccgcgtgacgaagcgcggcggactcacgttcggcatgcttgaccagcgcgatccgctcgacgacaacgccaccatccgtcaggccgcgctcgaaggccgcgccgactacgaatgggcgtccgacaacacctcccgtgaagtcgtcgaggtattgctcggcggcatgagcctggatgccaaggtcggctccttgtccggcggccagcgtcgccgcgccgatttggcccgacttctgctcaaggattgggatattctcgcgcttgacgagcccaccaaccatctcgacgtggtcactatccactggcttgccgagcatctgaagaaccgctggtccaaaggccagggcgctctgttgctcgtgacccacgatcgctggttcttggacgaggtctgcgaatcgatgtgggaagtccacgatggcgtgatcgagccgttcgagggcgggtattcggcgtatatgctgcagcgcgtggaacgcgatcgccaagcggatgtgcgtgaaacgaagcgccgcaatctggcccgcaaggagctcgcatggctttcccgtggtgcccgtgcccgttccaccaagcagaaattccatgtcaaggccgcgcgcgagcttattgccgacgtgccgccgatgcgtaacacacttgaactgaagcaaatggccacctcacgcctcggcaaacaggtggtcgatttggtcgacgtgacgcagattttcgaaaaaccgcagggcatggccgatatcgacccggatgtggcggcgctctccgcgtccgcttcccgcgtggatgtggtcaacgccatgtacgccgagccgcagctgcacggttccgttgaggtggcggtcaccgacatgactgacctgcgcctggtggacgccggcgtgccggaagccgtcgaggccgctgaggaagcgcgtaagaaggccgaggctgagagcggcaatccgcagcttgctgacgatcgcgaggttcgtcgcatgaacacgggtggtgaaaccatcggcggtgacactgctgcaacgaattcggatgatggcactgctgcagccggtgtcacctcggctgcacgcaaggtgacggtttccggccgcgagattcttgacgatgtgacttggctgattggccccggcgatcgtttcggcatcgtcggtgcgaacggtgccggcaagtccacattgctgaagttgattgacggttcgattactccgaccgtgggccatgtgaacatcggcaaaaccgtgaagttcgccgtactctcgcagcgtcttgatgagctggagaaactgggccagtacaagatcaaggaagtgctttcccgctataagccgagctacattgtggatggcaaggaagtaacgccgggacagttgatggagcgtctcggctttgaatccgcccagttgatgacgccgattcgcgacctctccggcggacagaagcgccgcatgcagttgctgctcatcctgctcgacgagccgaacgtgctcatcatggacgagcccggcaacgatctggacactgatatgctcgccgtcatggaggatttgctcgatacttggccgggtacgttgatcgtcgtatcccacgaccggtacctgctggagcgcgtcaccgatcagcagttcgcgctgattggcggcaaggtacgccatctgcccggtggtgtgcaggattacctcgatatggttgaggctattaagaacggcaagggattgccggctgacacgcctggcttcgcgggcaccggtagcagctcggcgaagtctggtaggggtaaggcggccgccgtcaatgttgctgcatctctccctcagtccacttcgcggacagctccctcgtcagagggagccaataacggtgaggactccacctcgaagctcaccggcaaggccttccacgaggcatccaagcgcgtgaatgccatcgagcgcaagcttgccaaactggaagagcagaagaccgaacttgaggcacagatggccgtccatgacccgagcgactacgagggtctcaacaagctcaatgaacaactcaccgccgtcaatactgaaagcgataatctcgaagccgaatggctcgaactctccgaacaattggagtagcgggagaaaccgtaacgttcacaaggcctcggtagtttgccggggcctaccgctatgcaaactcccacggattaatcaattccacgtcggtaccttcgaagtccttgatattgcgcgtggctatggccgcatcccaggaacaggcaattgccgcaatcatggcgtcttgaatactggtaggtgtgcccctgcgttcgcgttcgacaaggatatgggcataatccgcagctgcctgggtgtcaaatgcgaacgtcctgtcctctaatgtcataagcgccagcttgacggtcgtatctgtgtactttcgtcgtttgccttcaggcatgcgacatattccgaccaacaactcggcgacggtgatggcggtggttgccagattgcttgtatcttggttcctcagccaattggcaacgtgttcgtctggctgtttcttgatgatttcgctgatgacgttggtgtccagaataatcatggccgattcctattcaaaagatactggcggtcgggaatcggcggaatttcgctcggatagtgggagttcccccttgtcgagtccctcaaaatccatgttcttcatgaattcgcggatctcgtcgtagaaattggtctttcgtgtgatttcatgcgccaccgtgccggccagccattcttcaagaatggatcgcacctgagattccatggagcggttgtttttctcggccacttctttgagctgttgaatctgctcatcgggtatttttcggatggtcaatgttgccatgatgcacctccttgttgctgtcataatgctagcatgaggtgctgtcattttgcttgcagcacgggtgatgaggtatgcacgcatgaaaaaggcggatatgcatcatgcacatccgccctttgagcttggactgggtctccccgcagtcgccgaatcagcgcccggtaacctcggaaccgacgaccttttcgctcagggcgcgcgggccgcgggtcacggctacggcaccggagcgcaccagctcaatcacaccgtaatgctccaaaagccccagcagcgcatcgatcttaccttcggcaccggtggcctcaatggtcagcgattccggattcacgtccaccacacgcacgcggaagaggcgcacgatctccagcacgtcggaacggttggattcgtcggcggccaccttgatgagcaccagttcgcgttccacggtggagttcgggtcgagctccacgatcttcagcacgtgcagcagcttgttgagctgcttgatgatctgctccagtggcacggcctccacgtcggcggtcaccgtgacgcgtgagatgtccggacgctcggtgggggagacggacagtgagttgatgttgaacgcacgacgggcgaacaggccggcgatacgcgccagcacgcctgggcggttctccaccagcacggacagcgtatgacgctgggaaccaggctgggatgcaggatagttagccatgagtgttctcctctcctcagtgctcgctcgcagcggcagcggcggtctcgtgctcgaacacgccggtcgcatgctcgtccggaccggttcccggagccggggtgccgccggtcagcggcttgatgccgggcttgtacgtcacctcgtcgttggaagcgccggcggctaccatcggccacaccatcgcatccttccacacgcggaaatcaatcagtaccgggcggtcgttgatctggttcgccttttcgatggcggcaatcgcctcttcctcggtgaacgcgcggatacccacgcagccgtatgcctcggccaacttgatgaaatcaggcacttcgagcggcgcatcgccgtcgaccagtgccgccgcaccatcggcaccgtgcgcctcgccatcgagcaggttggtctgcgagtagtggtgctcgtagaacagcgtctgccactgacggaccatgccgtacacggagttgttcagaatcgcgatcttcaccggagcgtggtccaggaacgcggcggccagctcctcagaggtcatctggaaggaaccgtcaccatcgatcagccacaccggcttcttgccctcgaactcgcgggccgagcccacggatgcgccgatggcggctggcagaccgtagcccatcgtgccgaggcctccggaggagatccaagcgtgctggttctcgaaatcgatgaactgcgaagcccacatctggtgctgtcccacaccggtcacccagatggtggacggatcggccatctcagagagctttttgatgacccactgcggggccattgatccgtcggtcggctcatcccacgtcatcgggtattcctcgcgccagccgtcgatcgccttccaccagggggccagattcggcttgccctgaatggcctgcgtgcgctggatttcgggaatcaagtcgtcgagcacggtagccgcatcgcccacgatcggcacgtcgggctgacggttcttgccgatttcagccgggtcgatgtcaatatgaatcacgcgggcggtcggtgcgaaggcgtcgagcttgccggtcacgcggtcgtcgaaacgtgcaccgatggccacaagcaggtcagcgcgctgcacggcaccggttgcggcaatcgtaccgtgcatgcccagcatgccgaggttcttcgggtcggagtcgggaatgatgccgcgtgcgggcagggtcgtgaccacgggggcgccggtcaggtcggccagagccttgacctgtgcgccggcgttggagcgggcggcgccgccacccacatacagcaccgggcggtacgactgagagaacagcttcgccgcgtcggacagcacacggccgtgcgccttggtggtggggttgtagccgggcagaatcatgcgctgcggccatgagtagtacatgtcgccggtctgtgcggtcttggtcagatccacgaccaccgggccggggcggccggtgttggcgatgtagtacgcctcggaaagcacgcgaggaatgtcctgcgcgcgggtcacgaggaaggagtgcttggacaccgggtaggtgatgcccacgatatccgcctcctggaaggcgtcagtgccgatggcctgcacgcccacctgaccggtaatcacgaccatgggcacggagtccatattcgcatccgcaatggccgtgaccacgttcgtggcacccgggccggaagtcacgatgcacacgcccaccttgccagtggccagtgcgtagccttcggcggcgtggccggcggcctgctcgtggcgcataagcacgaagcggaacttcgtgttgtctttgatctcgtggtagacgggcagaatcgcgccgccaggaatgccgaagacgtcctcgacgccgagatcctccagcgaacgcaccagcgcttgggcgccagtcatcttctcgccatcgacgatggtctgcttatcgggggccgcgttgattttcggcacgccgctgaatgcctgcaaaggcgtgggtaaagccatgattcctctcacctcatagattttgccgcgaacctgcccgaccttgggatggggccgggtgcccgcgtgtctgattccagtcgcttctccgagacttgtggccccggcacgactcgtcgctcatgttggtatcagtctattcgcaaatctgacagcgggcttacttagtccgcgtcttgagcgagtccagtgacttccagcccgcttcggcggccgccagctgcgccttacgcttgctggagcccttaccgatgccgatgatgtcgccgttctcgcccaatgagacgcgcgcggtgaagatctgcgcgtactccgggccggagacctccatatggtagaccggctcatccttgccgaggccgtgcgccttgacggtcagcgaggtcttccagtcaagtgccgggccctcggtggccacttcggcgagcgtgtcgtcaataagccggtgaatcaccttgcgtgcctcgtcgatgccgtgttccaggaaggtcgcgccgatgagcgattccacgatgtcgcacagaatggagttcttctccgcgccgccctgctcggtttccccgtgacccagcagaatgtaggggcccaccttgagcttggttttggcgatggcgctcagcgcgtcttcggagacggccttggcgcgcatcttggccagttgcccctcggtcatatccgggtgaatggtgaacagcgtttcagtggagaccagttcgagcaccgcgtctcccaggaattcgaggcgttcgtaattggccacgccggggtgctcatgcgagaaggagcggtgggtgagtgcctgcacgagcagatccgggctgagagtggtgcccaacgcttcaagaagctcgttggccggcgtcggctgctgtggggtttcattgctcatgattgttgtatggtccttcacgcgatggtgatgtgttgtgtgttgtgttgtgttgtttgcgatgcgatggtgtacgtaatggtgcacttatgcgaagaccccgccacccgtcgatggcagggccttcattcaagccgttatcgcaggactcacttggtgtgagccggctggatggcggagcggtaggtgcggccgcggtagttaccgcagctcgggcaagccatgtgcggcagggccggagcgccacagttcgggcagttcacggtcgcagcagcggtggccttccagttcgcgcgacgcgagtgcgtgttggcgcgcgaggtcttgtacttaggcagtgccatttgagtatcctctatttcgttcgaacaattgagcttaagcgtccgttatcttaacgcacggctcgtacaaactccgttcaggcgcgcgtcactcggcctgctcgccgttctgctcggcctcgagctgggctttgagccccgccaatccggcaaaacggatatccgtcacatcgtgatgatggtcgggatcctcgttcagatcggcaccgcactgcgagcacaggcccttgcaatccggtcggcacagtggctgcaacggcagcgattcgaccagcgtgtcgcggatcatcgcctcgatgtccgcgaatgcgccgttctccagcagcggatacgtgtcttccgactcgtcctcgccggcgatgatgtcgatctcgtcgtccttcttgttcttgccgcccttgccgttggccttgtcctgacccgactcatacgggaagaacaccgtcacatcaaccggccagtcctcgtcaatcggcttcaggcagcgcgtgcactcgctgacgaatggcgcgaccaggcggccggtgaagatcaggccgtccacaatcgaatcgaactgcccgctcacatgtacgggctcaccatccttgatgccgacgatgctgtcgccaatgccggaaggggccgggaaatcggcgtcaatcggcttggattgaccggcgcgcgaagcaatctgcgctaccggaatggcccacggggaatcttcaactcgtgccatggtatgttcttggtgcctttcgtatgttggctggagttattcgttactggcgttattcgcgttactgatgttgctggtgctgctggcgttactgggcttcgggatagtcgttcagcgtcaggtgcggcatctgttcgccggccgcacgctggcgctcttccagcacgttaagaccggcctgcacatcccgactgagtttgccgagctgctgggacagcccttccatcaccgtagtgcagtactggtccgcgccttgggtcagatggtcggctctggtctgtgcctggtcaagaatcgcgcgcgctttctgccgtgcaagctcggtgacgttctcttggccggccaggaactgtgcctgttcgttggcgtccttgatcatgtcggctgcgcggctttgtgcggaggcgacgatggcgttggactgggtctgtgccgattccagacggcgctcggcctcgcgcatgagggcggaggcgcgctccaactgcaccggcagcattttcttcaactcggaaagctggtcggtgaattcgtcgcggtcaaccttcaccatgccgggggcgaatatgctggacttcgcttcgcccagtgccgcctcgagctggtcgatgatgtcatacaccgtggtgaattcctcgcggctcttgaccgtggccgggtcgtcgtccgtggtttctcgcaggtcgggcatttcgttcatgaacgaggggcgagtgccggcggcctgagcggtctgagcttgtgcccgggtctgctgagctgcttgggcctgcgctttggcctgcatctgtgccggagtaggggtaggcgcggcgggcggcgatccggcgagaacatcggcctcttcggtgggtgccggcgcggcttgcgtagacgcgggcggttccggggcggacggctccggagtggacgatgcggcgtccgcattcggtttggtcagatcgacgtatccagtggggtggtcatcgctcatagtcattagtgcatcagtccttccgctgacgttcctcggccagggcatcggccagcatcggcacgacacaatcgggcaccatgccggtcacgtcgcctccatggcgggccacgtccttgacgatggaactggagatgtgttcaagaatcggatcggccggcaaaaacagggtttcgatgccggcgagcttgcgattgaccagcgccatgccgagctcggcttcatagtcgccgttctggcgcagacccttgacgataacggtggcgccgaccttcttgcagtagtcggtgatcaggccgtcggtggaagaaacagtgacgttcttgcaaccggctttgtcaagggcacggcggatcacgtcgactctggtggcttcggaaaacatcggtgttttcgcggcgttgacggccaccaccacatgcacctcgtcgaaaaaccgcgccgagcgctcgattacatccaagtgtccggcggtaacggggtcatacgagccggggcatactgcgatagtcatgccttatagcctaccgcgaatggtgtgcttcgtgctgccgagcgtgcattgttgtcgcgtcggcgtatgaggcagtgtgtgcggtgccgtatgtggcgtcggtgcggcgttgtgtgcggcattgttatgtggcattgtatgtggcggggtggcgtgatgcgcgacatgggtgtgtggaggtgtgcggattacgcgccaatgggtttcgcgggtaacgacgggaatctatgatggagtgcagtcgaatcgttgaatacgaggaaagaagtgcaccatgacttttgccgagatgttcgttgatgatgccgaaccgctgcgcaacccggaccaaggtgccggcacgtcggtgctggaacgcccggaaaccaaggagtctccggttcgtgacgatggcggcgacgcggatcgattcgcacattatgtttctaaggaccgtatcgccgaatcacgcgcgaccggtcgtccggtggtcgccctgtgcggcaaggtctgggtgcccaagcacgatccgtccaagtacccggtttgccccgattgcaagcgcatctacgaagaaatgacgcgctaaaggtggtacttggctcccctcagcgagggaagccaaaatggtcaccgagccgaaatctcgtcgatcagcttgagctcctcgtcgctgaagtgggtgttcttcagagcgccgatgttgtcgagaatctgctgaggcttggaggctccggtcagcacggaggtcaccttaccatcgtgcagcagccatgccaggctcatctcggccagcgtctggccgcgttcggcggccagattgttcaggtccacgacctgcttgtgcagtttctcggtcagggcggaatcgttgaggaatcgcggatcgtgagccatgcggctgtcggccggaatgccgttgagatagcggttggtcagcaggccctgtgccagcgggcagaaggtgatgaggcccttgcccagcttgaaggcggtctccttcagaccgttctcctcgacggtgcggtcgaggatgttgtatttgttctggttgatgatgaacggcacgtgcaggtcggcgagaatcgcggcggccttctccatcgtcggaccatcgtagttggacagacccacgtacagggccttgccggagttcacggcctgagccagcgcgcccatcgtctcctcaagcggggtttccgggtccgggtggtgatggtagaagatgtccacataatccaggcccaggcgttcgagcgactggtcgaggctggcgagcaggtacttgcggctgccgaggtcgccataggggccggcccacatttcgtagccggccttggtggagatgacgagttcgtcgcggtggtgcctgaagtacttggcgagcagcaggccgcagttcttctcggcctggccgggttcggggccatagttgttggccagatcgaagtgggtgatgccgttgtcgaaggcggtgaagatcagggacttcatctggtcgaatggcgtgatgtcgccgaagttgtgccagaagccgagtgagacggccggcagcttgaggccggaggtgccggcgtggttgtaagtcatcgtgtcgtaacggtgcgggttgggggcatagatggcggttggctcgaacattgagtctccttacaatgtcatttttgttcttacgaatgctggtctgcgatggacaaaccgacgccgatcgagtggtattcgtaagtgttcttagatactaaggttccagttcaagtgaacttgaatgcaaacggctgcgacgcttcggcgtgtcgccgcagtaaggagtcatgatgtcctacaccattcgtcaggtggccacgcagttccatatgcagccctctacgccggtgaagactggccggattggcgcgagtacaaaaaccgcgcctattccattgaatgctgaggccatcgagtgctgagctggatgccggctgggcactaagaccgatgtgcgtcgatcgtgggcgcgtctatccgagtaaggccttgctcggcagtgcgcggtcgagcagccagacaacgagcgatatcacgaagaacgctatggccagcttgccgcagctaatgccgaacccttgccagccgagtgcgtcgaggttgatgaagtcgtacggatacggactgccgccggccgccggtccggaccccggccaaatcgtcgcacgggccagcacgaagaccaagtatgcagggaagtacgccagccacgagaacatgtaatgccagcggaaacgccggtgcgggtcgaatagcacgaaatcgataaccgccataatcggggcgattttgtgcagcatcgtattggtcatgatgccaataacctgtggcacgtatgccgggtcgtccggaggcatcaggaagaacgccaccagtgcggtgactatggcgtacacagtcaggcatcccttaggccatgcaggcggctgaatacctttgagcagtgtggccgcgccggcccacagcatcacgatgcccagcacgaaaccggtctggaacgtgaaatacacccagaactgcggtttggaccatgcctcatatgtgcccacgaagcagaaaccggcgatcgcaaagcgccacaacgccacgatgaatctcatgcatcgagtctaccgcttcgccagtgggctgtatggctttgcccggactacacttaggtgcaacttcaccacttatgtaggaaaggccttgcaatggtcgattattcgccggctctgatgaccgacatgtatgaatacacgatgctcgacgccgctctgaaagacggtaccgccgaccgcaaatgcgtgttcgaggtgttcacgcgtcgcctgcccgaaggccgtcgctatggcgtggtggccggcaccggccgcattctggatgcgctggaacatttccacttggacgaagcggacctgaagttcctggccgaccgtcacgtggtaagccccgagaccatcaagtggctggagaacttccacttctccggtacgattcgcggttaccgcgaaggtgagatgttcttcccgaactccccgattttgcaggtcgaaggcacgttcggcgaatgcacgctactggagacgttgattctatccgtgctgaactacgattccgcagtggcctccgccgcctcacgtatggcgtcggcagccaaggatcgtccttgcatggatatgggcggacgccgcactaacgagtgggccgccgtggccgccgctcgagccgccgtagtgggcggattcaagggtaccgccaatctgctggccgcccagctgtatggtctgaaggccattggcaccgccgcgcattgcttcacgttggtgcatgattccgagcgtgacgccttcgaatcgcagatcgaggcattgggcaagaacaccacgctgctggtggacacctacaacatcgaggaagccgtgaaaaccgccgtcgaggtggccggtcccgaactgggtggcgtgcgcatcgactccggcgacctagccgccatggcccagcgtgtgcgcaaccagctggacgccttgggcgccacgaacaccaccattaccgtgaccaacgatttggatgagtacgcgctcgccgcattgcagaccgcgccggtcgactcctatggtgtgggcaccatgctggtcaccggctccggcgctcccacttgtgcgatggtgtacaagctcaccgaacgtgaaggcgctgacggcacgatggttccggtcatgaagaaatccaaggacaaggccacagtgcccggtcgcaaactggcattccgctcctacgaatacgcgttagccgaagccgaacacgtgatttccggctcggaggagaagctggccggtttcacgcctgaaccgacgtggaagaacctgctggtcgactttgtggatcatgggcagatcgacgctcagtggcagggccatgacgccatcatggccgcccacgactaccacgccaaggcgttgtccgaactgcccatcaccgcgcagagcctcatgaagggcgagccagtgattcctacggagactcaggttctctgacgagaactttcgtctccataggaatccgtcgcagcatagctgctccccttacctacggacagcccactgggctgtccgcttaacggttcgaccacagagaccaaagtcctctgaccgtatctcactggccgcatctctttggttacattggctactcttccctctgtctgtgtccctctgtctgtgcccctctgtctgtgttggccgcactcctgtggtcgccgccgaggcggggagatccaaccccggtcgcacccccgtgtttgcaccccctgtggctgtgtcccggggctgtattggccgcgtcccctcgggctgaactgcgtcccggttcgccggacgtggttccagctgagggtggccccccttgtttttttttggggggggggtactgttcaccggggaaatatgtatatgtgcatgctgttgcaatgtacattttgttgtcagttgacaacgtcttgattcagatgaattggcgggaaatggccatttgtcttatccaattgatttgaagaacgttgtcagttgacaacgttttgtacatggtgcggaacgacacatattcctatcctggtcaggatgccgatgaggtggagtgaaaaaccaaaccatttcagaggatattgcaccgagacgttgtgggattgacgtgttgtcggtgatgttacagagatggcgcagtgttgcgtgaggggtgttgcgtgaggggtgttgcgtgaggggtgttgcgtgtgatgttgcgttggtctgattgggaggaatagtgtgccgatagaatgccgtgatgcgtgcagagcaatcgtttgcggagcaatcgttgaagaatcgtgtgaactgatgcgatacgaatcataccgtctctgaattgtgggatatgacgaatcgtatcgtcatgggattgtgggatatgatgattgcggtttgatgaaatgaccgggaaatcggccgaggcaaggtgacttcgatgagtgaaactctcaatgatgagaacgcggcgggcaacgatgacgtatcagagcggcgcgctgtagagcatcgagcgttagaacagtgcgatgtcgtgcatcacggtgtggtatctggttgccctgttaattcgtgtgcggctgtgctgaatgaagtgatgtcgcagactggttggaatgcctatgagcttgcacagcgtactggtttggatcggtctgcaattggtcgcgtattgcgtgggcaaagaggtatgttgtttgatgttttggccgaggggcttgagcgggctggttttggtcttcacctagaagccgtggccccctcgcaaacgattccggaagacgaattgcacatgttgttggcgcaactgcgtaggcctcctgatttcgatgcaatagaaagcggagcgacctggtctacgttgaagatgctctgcgtcaatctgattcatgctcggaatgttcaacatcaacgtatatcgttcgtccgagcggttgcacgggtgaacgatgcgtgctggattgcgtttctcgctggtttataccgttttctgcgttgggatatcaacccaaggaacagacgcttgacattggttcctccgtaccggtatggcttggatggatggtggtccccactgccgagcgcggcaattatgcacgtgcttcatcgatatgaagagccgttgcatgacatggactatacatatttgccgttaatcgattacgaactcaacgctatgcagcgcaagcaattcaaccaagatttcatggaatatggcattcttattccagcggacgatctttcccaatcctcatcaggtacgcaggcattgactctgtaagcgagtggtgcataagaaaatagtggcgtgcagccaagtgtcatggaatggatatgtaagcagggaatgacattgcgctggggtttgatgatggttgacgagttgctatccaggcatagagcggatggcgtatgctggggcgcatggttgaaatcaaagacatgcttggcaatcaccaaataattcgtgccgacggccgcaaggtcgacgagctgcgccccgtgcgcatcacccgccacttcaccgacgcccccgaaggctccgtgctcatcgaatgcggtaacacgcgcgtgatgtgcaccgccacttttacccccggtgtgccgcgttggcgcaaggactccggcctcggctgggtcaccgccgaatactcgatgctgccgcgtgccaccgccgaacgcaccgaccgtgaatccgtacgtggcaaaatcggtggccgtacccacgaaatcagccgactgattggccgctgcctgcgtggcgtcatcgatatgaaggcgctcggcgaaaatcagattcagcttgactgcgatgtgcttcaggccgatggcggcactcgcacggcttccgtaaccggtgcgtacgtggctttggtcgacgcagtcaattgggcggagaagcaccgccatatcaagtccgccagccgcgtgcttaaggactatgtgtccgccgtatcggtgggcgtgatcaacggcactccgatgcttgacctgccatacattgaagacagtcaggccatgaccgacatgaacgtggccatgaccggttccggcaccttcatcgagattcagggcaccgcagaacaccgtccgttcaaccgtgccgaactcggcaccctgcttgacttggccgaaaagggcaacaaggaactgcaagccgcccagcgtgccgctttgtccctagactaagccagctccccttcctttaggggaggttgtcggctggaagccgtacggtctgcaatgtccagctcccctgacaaggggagccttcttaaaggagaacccatgcaaatcgtcgtcgcaacccataacgaaggcaagcttgtggaaatccgccgcattctcgaagaggatcttggcgtggatgccgaaaacatcgaactggtgtccgctggcagccttcacctgccggacccggtggaaaccggcgtcaccttccaggagaacgcgctgctcaaggcccgcgccgtggccatccgtaccggtctgcccgctgtagcggatgattcaggtctcatcgtcgatgtgatgggtaacgctccgggcattctgtctgctcgctgggcgggggctcacggccacgacaaggccaataatgcgctgctgctcgcccaaatcgaagatattccggatgacaagcgtaccgcgcgcttccgctgcgccgccgcgctggtggtcccggacaccgaggccagtgccgacgtgaccggtggagtggctgccgacggcatcaccgtttacaccacggctgcagatgggagccctgccccggtgcatgcccggtacgccatcaagtcggagacagtggaactcggcgacatgccaggtcgtatcatccgcgaggctcgtggcgaacacggtttcggttacgatccgctgttcgtcccggacgaccagcctgccggtcgcgtcagcactgagcctgaccatgaaggcgagccgctgaccagcgccgaaatgactccggccgagaagaatgcgatttcccaccgaggcaaggcgctgaaagccttggtccccgctatcgaggcgctgctgcactaagtcgtctaggctgtctaactgcactgagcccctcccgaatcgggcaagtgtctagcaagcgcctatgacctagcaagggcgatacgaaagaaggccggcgcttagtgcgtcggccttcttgatgaacaagagccacccgatagaatcgaac

SEQ ID NO: 1998 - DNA, 6282 bp, Unknown
  R17_18m  MAG No. k141_25931
cacccagaccgagcacgggatcattctgcacgacgacgtgataggccgcaccgagggcgtggtcgtcaccaccgtcaccgccaagcgcgaggctcaggtcaatgcggaccatcccgaacgcgaccggaacaagccgtggaaatcgtcgcgcgccatcggcggctgggagtatgcggtgatgcgcccgcgactggccgattatgtgctttcgatgccgcgcggcgcgcagatcatgtatccgaaggacatcgcccaggtcattcagctcggcgacatccgctccggcatgcgcgtgcttgagtccggtgccggctcgggcgcgatgagcgtgaatctgctggacgccgtgggcgagcgcggccatctgaccacgattgagctgcgccccgaattcgccaaagtggctcaggccaacgccacgctgtattacggtgaagcccccagctggtgggatctcaaaaccggcgacttcgactccgtggccgccgaactgcccgaacactggttcgaccgtatcatgctcgacatgctcgacccgtggaacagactcgagcaggcataccgcgtgattgcccccggcggcgtgttggtcagttacgtaactaccaccacgcagatgagtcgactggccgaagccctgcgcgcggccggctgctggaccgagccgcagatccaggaatcgttcgaacgcacatggaaggcccaaggcctcgccgtacgccccgaccaccagatgatcggccataccggtttccttgttatctcgcgcgccatggcctccggattcgaggcgctcagaaagcgcgatcgcgtgaccaaggacacgcagaccgacatcgactcgctcaccgacgaacagcgtgaggcgcagatcgaggaactggaactgcgcgacatctccgaccacaaactacgtaaggtgttgcgtgacctcgaccgtcaggtgggagaacttggcacacgcacgaataaccgccaaacgatgagtttgtgagcgctcacacacctctatactggaagtaacaccacaccgccacaccgccacaccgggcaggcggttcgtgaagggagccacggatgggcatcaagctgagcaaagtcgccaaagcagcgaagaaatacgaccatatcctcatcatcatgaggcacgccaaggccgagccgttcggcgacaagggcgactcggaacgcgagctcaccgacaaaggtctgaaacaggcgaaggccgtgggcaagggtatcgagtcgctgggactggtgcccgaccaaatctcctgctcgtccgccacccgcacgcgccagacgttggaccgcatgctcaagacctttggcgacaagccgatcgtcgactaccgcctcagcctgtatgacgggggagtgcaggcggtgttcgacgagctcgcccacgtcaaggccaagaaccgcgtgttcatgatagtgggccacgagccgactgtgtcgatcagcgcccaatggctcgcctccgccgactccgacggcgaacgactcgacctgctcaacttgggactttcgcccgcatccatcgtgatcatgggatcgaacaaaccgttcgacgaatggcaggtgcacagcggcgaactgctcgcggtcatcaatgtgaaagacttcgactaaagcggatataaattccatctataacgacactctgcggccatttataaggggtggaatccggatgttttgctaccctaagtcgggttacgaacgcatacattggaggattcatgtccactctgacttccgtctccggcttcccccgcatcgggcagaaccgcgaactgaagaagatcatcgaaggctactggaagggtgccaacgacctcgccgccgttaaggccaccgccgccgaactgcgcgccaagcactggaagctgcagcaggccgccggcatcggcctcatccccagcaacgacttcagctactacgatcagatgctggacaccgccatcctcctcaacgtgattccgaagcgttacgagcgtctcgccttcgataaccaggaggacacgctcttcgccatggcccgcggctaccagggcgacaagggcgacgtgaccgccctgccgatgaagaagtggttcaccaccaactaccactatctggtgcccgaagtcgagtcggccgcggagatcaagctcaactccaccaagccgttcgacgagttcaacgaggccaaggcgctgggcatcgacaccaagcccgtgttcatcggcccgtacacgttcctgaagctcgcccgcaccccggaagccaccgaactcgagctcgacaagggcctggtcaacgccgtggccgccgtctacgtcgaagtgctcgccaaattcaacgaactcggtgccgcatgggtccagcttgatgagccgtacctcgtgctcgacaaggagccgggcgatgtggagctcttcaagaccctgtacaccaagatcctgtccgccaagggcaacgccaaggtgctgctcaacacctacttcggccacatcgccgacgtgtacgagaccgtcaacctgctcggcttcgacggcatcggactggacctcaacgaaggccgtgaagagaacctcgaagccgtcgccaagtatggcgtggcctccaacaccgccatcttcgccggcgtgatcaacggccgcaacatctggcgcaacaactacgccacctccctcggcctggtcgacgccctgaagcaggtcaccgccaacgtggccgtctccaccgcatcctccctgctgcacgtgccgttcagcactgaaggcgagaccggcatctcgtccgaagacctcaagcacttcgcgttcgccgtggaaaagctgaccgagctcaaggaagtcgccgctctggccgacgccaccgaggacgagaagaaggcatccgccgccctcgccgccaaccaggccctgttcgacggcacccgcgtggccgccgacccggccgtcgccgagcgcatcggcaagctgtccgacgccgactacgtgcgccagcctgcccgcgaggagcgtcaggccctgcagcgcgaggccctcggcctgccgctgctgccgaccaccaccatcggctccttcccccagaccaaggagattcgcgccgagcgcgccaagctgcgcaagggcgaggtcaccaaggaagcctacgacgagttcatcaaggcccagatcgacgccgtcatcaagaagcaggaggagatcggcctcgacgtgctggtccacggcgagttcgagcgtaacgacatggtcgaatacttcggccagaacctcaacggcttcctgttcaccaagaacgcttgggttcagtcctacggcacccgttgcgtcaagcctccgatcgtctggggtgacgtgtcccgcgccaacccgatcaccgtggaatggtccgcgtacgcccagtccaagaccgaccacgtgatgaagggcatgctcaccggcccggtgaccatcctcaactggtcctggccgcgcgaggacatcacccacgaggagcagaccaagcagctcgccctcgctatccgcgacgaagtgctcgatctcgaggccgccggcatcaaggtcatccagatcgatgaggccgccctgcgtgagaagctgccgctgcgcaagtccgactggcacgtcaagtacctcgactgggccgttccggccttccgtctggtgcactccgccgtcaagccgaccacccagatccacacccacatgtgctactccgagttcaacgacatcatccgcgacatcgacgcgatggatgccgacgtgatctccttcgaagcctcccgtggcgatctggtggtgctcgacgccattcatgacgcgcacttcgagaccgaggccggcccgggcgtctacgacatccactccccgcgtattccttccgagaaggagatcgaggatcgtatctacgagatccttgacaagatggacgtcaagaaggtgtggatcaaccccgactgcggtctgaagacccgtggtaacgccgagacctggccgagcctggagaacctggtcgccgccgccaaggccgtgcgcgccaggctcgacaagtagcggaaatcaccgagctcccttccggatgagggagctcgggtttatgtaaggaaatcagcatgcattccccgatgttcacccttgaggtctttcccccgaagcgcaacgctcccgtggacaccatctatgacaccctcgacggactcgaagggctgaaccccgacttcatctccgtgacctacggtcacggcacccattccgaccgcaccgccaccgcgcgcattgctcatacgatcagcaaggagtacggcattcccgcagtcgcgcatctgaccgcgttgtattccgacaaggcgaaaatcgacgaggccctcgacatgttcgagcaggccggcgtgagcgccgtactcgcattgcgcggcgactacatcgacggcgagcagctggtaggcgagttcaaccacgccagcgacctcgtgtcatacatccgctccgtgaagccgggcctcaaagtgttcggcgcctgctacccggaaggccactaccaggctgactcgctggaccaggacatcgaaaaccttaagatcaaggtcgatgccggcgtcactcacctgatctcccaactgttctacgacaacgaggacttctatcgcttcctcgacaaggcgcgcgccgccggcatcaccgtgccgatcgaggcgggcatcatgccggtgcgtggtgccaagtccgtgcgtcgcatggccgaacgcaacgcctcgcgtatcccggacaagctcaacaccctgctgaacaagtgggaggacgacatccagtccctgcgtgccgccggcatcctctacgcttccgagcagatcgccgacctcgtggcccacggcgtggacggcgtccacctgtattcgatgaaccaccccgccaccacgcgccgtatctggcgcaatacggaaccgttgttcctcggtacgcaaggttgacgcatatcgcggcgcggcgcatctcaatgcgtcgcgccgcacgttaatctgctggcgaaacccagagttcccccagcggccgatgggtatcatgaacgtgcaagccaaccaaagcgatggaaggaagcccgttatgtgcactggtgtccgtttctccgatgatgagggcaacacctatttcggccgtaatctcgactggagtttctcatatggggagaccatcctggtcactccgcgcggctaccactatgacacggtgttcggtgcgggcggcaaggcgaagccgaacgcggtgatcggcgtgggcgtggtcatggccgataggccgatgtatttcgactgcgccaatgaacatggtctggccatcgccggcttgaatttccccggctacgcctcgttcgtccacgaaccggtcgaaggcacggaaaacgtcgccacgttcgaatttccgctgtgggtggcgcgtaatttcgactccgtcgacgaggtcgaggaggcgctcaggaacgtgacgctcgtctcccagatcgtgccgggacagcaggagtctctgctgcactggttcatcggcgacggcaagcgcagcatcgtcgtcgagcagatggccgatggcatgcacgtgcatcatgatgacgttgatgtgctgaccaatcagccgacgttcgacttccatatggaaaatctgcgcaactacatgtgcgtcagcaacgagatggccgaaccgacttcatggggcaaggcctccttgaccgcctggggtgcgggtgtgggcatgcatggcatcccgggcgacgtgagttccccgtcgcgcttcgttcgtgtggcctacaccaacgcgcattacccgcagcagaacgatgaagccgccaatgtgtcgcgtctgttccacactctcggctccgtgcagatggtggacggcatggcgaagatgggcgacggccagttcgaacgcacgctgttcaccagcggatattcgtccaagaccaacatctattacatgaacacctatgatgaccccgccatccgttcctacgccatggccgattacgatatggattcctcggagctcatcagcgtcgcccgatgactccttcccggctcatgccccattcggagggcatgagcgtatatagtggaatcttatggaatcgtcgatgttcaaacccagctccatggatctcatcagggcaggtctgcaagacctcgacaaggcccgcaccttgttcgaccagctcaagacggacgacattcccgatgagcgatgcgccgaactgctgagcatgctggcccacgcctgcgaccccgatatggcattgagc

SEQ ID NO: 1999 - DNA, 8582 bp, Unknown
  R17_18m  MAG No. k141_26039
cgcccgctactcgctggcccgctccgactacaaccagaacttcgacatcgacctggccctgctcgcctcgcacaccaacgacaacccggtgtactacgtgcagtacgcgcacgcccgctccaagaacgtggaccgcaacgcagccgccgccggcatcagctacgagggtgccgacctggccctgctcgacaccgaggccgacggcgaggtacttgccgccctcgcccagttcccgagcgtgctcgccactgcggccgacgaccgccagccgcacaaggtggcccgttatctcgaagaactggccgccacctatcacaagtggtacaacgtggagcgcgtggtgccgatggccctgaccgatccggaaacccgtggcgacgatgaggctcgcaaggccttggtgatcgccaagaatccggagccggcccgtgccgccgcccgcctgaagctcaatgacgccgtccagcaggtcatcgccaacggcctcgacctcctcggcgtcaccgcccccgagaagatgtgattatgcctatttctccaatttggccggccgctacggctgtgaatgccgacggtgccattacattccacggtcgtaccgccgaatcgctgcttgacgagttcggctcgccgctctatctcatcgacactgatgaagtagtcgcacgtgccaggcacttcgtgcgcgctgccgctgaagcattcaacacatccactacgcacgtgagctttgccggcaaggcgttcctgtccaaagaagtcgtgcgattggtcaccgaggccggcatgttcgtggacacctgcacgatgggcgagatgaaaatcgccctcgccgctggcgttcccggacgtcgtctggtactgcacggcaacaacaagtccgatgaggaaatcgcgctggccatcgaacagggcttcgccaaaatcgttatcgacgagcccgacgagccggagcgcgtcgccgccatcgcccgcaggctcggcaaacgcgcccgtgtgatgctgcgcgtcaccgtcggtgtccacgccggcggccacgagtacatctccactgctcacgaggaccagaagttcggcgtgccgctgctggccgccggggccgacgccgccgtgctcgatgtgctgaacgacctcaaagacgtgacgcctgccgttaccaacgcgcgtatctctgcgacgcattccccggaaaatggcgcggaaaagaccgagaaatcagagcgcgagctgcactacgacgtcaagtacccgtacgacctgagccacgaggaagtctccgacacagacaaggcgctggccgccgcgatggaagccattgcggacggtccgtccatcgccgtgctcaagaccatcctcgccgaccaggacgtactcgaactggtcggagcccactcgcacatcggctccaacatccacgatgcggacgccttcattcacgcggccaagcgcatgatgctgctgcgcaagaccctgtgggccaccgacgcctacatcctgcccgaaatcgacctcggcggcggctactccgtggcctacaccgatggcgaagattcaatggacattgacgtggaactcactcgcttggcggatgcggtcaacagcaccaaccgtgcgctcggcatgcccgcgccagccatcagcttcgagccgggccgctacatcgtggcacccgccggcgtaaccctgtaccgcgtgggcaccatcaagcacgtgcacttgtccgatgccaaagacagtgccggcaacccgattgccgagcgcgtgtacgtgtccgtggatggcggcatgtccgacaacattcgcccggcactctacggtgccgactacaccgcgcgtctggcgaatcgcaccggttccgctgaaacgatgcttgcccgtgtgtgtggcatgcactgcgaatccggcgacattgtggttcacgaggtgcagttgcccgccgatttgaagcgcggtgacattctcgccgtgccggttaccggcgcatacggccgcaccatggccagcaactacaaccaggcgctgattccggcggtggttgctgtcagcgagtccggcgcgcacgtcatgctccgccgccagaccgtagacgacctactgaacctcgacgtcagcgagtaatcagcgtgcagaggtgagcgcctgacagtctgtaatgtgcggccaaaaccgtcataatacgaaaagggccgtcagcttgatgagtactttcggtctgctgtcggaaataatccgtaaaataggcgtgggatatagaaaactttttggaaggaccctgaattggctcacaacagcgaaaccccgattcgcgtaggcctgcttggtgccggcaccgtcggctcccagaccgcccgcctgattgtcgagcagaaggacgaactgtccgctcgtatcggccgcccgatcgaactgaccggcgtcgcctgcctcgacccgaaggaaaccgagaagttcccgtggatcgaccagtccatcgtcaccaccgatactttgagcgtggccaccaactcggacatcgtcatcgagctcatcggcggcaccaccgtggcccgcaagttcgtgcttgccgccatcgaatccggtgcttccgtggtcaccgccaacaaggcgctgctggccaagtacggcccggagatctactccgccgccgaggccaagggcgtcgacatctacttcgaggccgctgtaggtggtgcgattccgttcctgcgcccgctgcgcgagtccctggtcggcgacaaggtgaccagcatgctcggcatcgtcaacggcaccaccaactacattctcgacgagatgaccaccaagggtctccagttcgacgacgtgctcaaggacgcccaggccaagggctacgccgaagccgacccgaccggcgacatcgaaggctacgatgctgccaacaaggccgccatcatggccaccctcggcttccacacctccgtgaccatcgacgacgtgtccgtcgaaggcatcaccaagatcaccgccgacgacatcgccgccgccaccgccgagcacaaggtcatcaagctgctcgccgtggtcgagaacggcgaggccggcgtctccgcccgcgtctacccggccctgatcgacgagaaccacccgctggcctccgtgcacggctccttcaacgccgtgttcgtcaaggccgaggccgccgacgacctcatgttctacggccgtggcgccggcggcgctccgaccgcctccgccgtcgtgggcgacgtggtgaccgaagcccgccacattgctgctggctgcaccggcccgtccatcccgctgtacaagaatctgccgaaggctccgattaccgcctccaaggctgcattcgccgtgcgcttcctgatccacgacaagccgggcgtgctggccgccatcgccgccgagttcgccaagaacggtgtctccatcaacggtgtgaaccaggatctgaagcccaccatgaccgaccccggctacgacggcgagattcagcagttgcgcatcgtgacccacctgaccgacgaggaaaccctgcgcaacaccgtcaaggccgtgcaggcgctcgacttcgtcaccggtgacccgtccatcctgcgcgtgctggactgacaccgtctaggctccctctgatgaggcggtcgaacggctgcccgtgagttgaaagctgaatacccaagctcccctgacaaggggagctcctttttaaggaacaaccatgaacccaatctgcaatagcgttcacgtgcgcgtgcccgccacgtccgccaacctcggctccggcttcgataccgtgggtctggcgctcgactaccatgacgagctcactttcacgctcaacgacgacccgaacgacggcattgcccacgtgatcatccacggcgagggcgccgacaccctcccacgcgacgaaacccacctcgtggtctccaccttccgccgtgcctgtgccacgttcggcctcggccgactcggcttcacgctggaagcgaccaacaacatccctcaggctcgtggcattggctcttccgccgaggccatcgtggccggcatcgccgccgccgcggccttcgcccagaccggtgacctcaaccgtccggccatcttcgatatggccgcccagatcgaaggccacccggacaatgtggccccggctgtgttcggtggcctgaccgtctcttgggacttcgaaaccgcggaaggcgtcggctcggtcgccgttcctggtggtgaaccgctgcacggcggattccacgccgtcaactacccggtggacccgtccatcaccgccgccgtgttcgtgcccgactatgagctgtccactgagaaggcccgtcaggcgctgcctagggaactgccatacaaggacgccgtctacaacgtgtctcgcgtgggtctgctgcccgctgcgatgaatcccgtggtgctggcccaggccgcccagcagggcaggtccggcgtcgccgctgccccggctcaggataccgatacgtgcgcttgcgctgacggaacccgtgaatcggcattcgccgacgagcttgcggccgcccaggcccagtccaacgcgctactgttcaccgccacgcaggacaaactgcaccagccgtatcgcggtgccctgatgccgccgtccaccgagctcattgcgctcttccgctccaagggctatgccgccgccgtctccggtgccggcccctgcgtgctcgtgctgcactacggcaacgcccgcgaagccatcgaccagatcgcatcggagcagcttgcttccggccactggcgtgtgcttcacctgcccatcaacaccgccggcgtcgaaatcgagcgtcgctaagtcgaggagaaggctcccgctggcgggagctggccgccgcaggcggtctgagagtggtccgccataccggcagagaccaccctcagtctcacttcgttcgacagctcccgccagcgggagcataaggacttaagtcatgtccattccgctaattcttgcttccaagtccaagcctcgccgtgacgtgctgtattcggcgggtatctgccccacaattcgcgtctcgcacgtggatgagcctgctgcgctggaagcggccgcccgtgaggaaggtgtcaccgtcgacgatctgagcatcaagcagcgtgtgatgattcttgccgcagccaaggccgaggccgttcaccgtgcgtatcgtgatgtggccgatactgccgccgccgcgaccggtgaccgcgtgatcgcctacccgctcaaggccaaggagatcaaggattcggaacgcgaagctgccgtcgaagacctgcgcaaagccgccgccggcaagcccatcgactattccaaggcggaaatcgccaccacgcgcgacttctccggcatcgatatgccgaccgtcaccgaacccatcgccaccgctattgccggacagccgggactgaccgaggcgacagtcggcccgctgattctcggctgtgattcgatgttcctcttggacggcgaatgctacggcaagccgcacagcgaatccgtggcccgagaacgactgaagcgcatgagcggcgcgaccggcgaactgtggaccggccactgcctgatcgatttcgcgaccggacgtaccgtgcgcggcgcaagccacgccaaagtccatttcggcgaattcaccgatgacgacatcgaacggtacattgccaccggcgagccgctggaagtcgccggatcgttcacgctggaaggcttcggcggcgcgttcatcgacagcattgagggcgatccgcacggcatcatcggcctcagcctgccgttggcccggcatctggccggcgaactgggcatcacgtggaccgacctgtggaatgtcggccgtggcgaactggagccggaaagcaaggcctcgggcaaccagcacgctggcattctgccgccggtcgaaaacgtgcatcagcccggcgatggctgggtggactgcgcctgcggccgcaagcattggggcaccaacggtgcgtccggcattctgctggctcgccgcgacccggcgagcggcaaggtgactcacgtggtcatgcagcaccgtgccgcgtggagcgccgaaggtggcacgtggggtatccccggcggtgccactgcggacggcgaatcgtccatcgaaggcgcgctgcgcgaaagctacgaggaagccaacatcacccccgaagacatcgaggtggtcggctcctaccgcgaggaccatggcccgtgggcctacaccaccgtgtttgcctttgaaaagcccggccacaccgtcgagcccaaggcaaacgacgacgaaagcatggaaatctgctgggtcccgattgacgacgtgcccaaccgcaagctcctcaccgctatgaagaccgactggccccgcttcgccgcccgcctggacgagctggcctgtgctggacatcggtagtggtgttggctgggccaatgttttgccgatgagttcacttgggtaatgccgtgtggaccgcgtgtggaccgggacggattctgctgtcccggttcgtcatttcgtctcttttgggacaaccgggacagatttcgctgtcccggttcgtcattttgcctctttttgggcaaccgggacagaatctcattcacctgacgccctatcgtgcgatggtcgccgtcggggaatggcggaattccggggttttggatttgcatatatcgggtgttcatggaagggcctgtcccggttcgccaaaagaggccgaaatcccgaaccgggacagccgaatctgtcccggttcgtatgtcgatcgattgaccccgccaccgggacatcaaccgcgcatagacaggacgcttcaatgtctggcgggcatgaccatatcggatgacacacgttccctcgtgcgtttcgccacgacctccgccccaagtcagtgcgaaaatggcatttttagcggtgtggtcagctgtcgcatgcggaaaatcctaaatcaaccgccgaagagacacatcgccgactcggcggaactcgctggtctgcgcgcaatgaggagtgttgtgtctgaatgcgattcagacaatggtcggcgtcaaatagcggtctccagccattaatcattggtgattgtggacattgagcggagtaaacattctagatgattcagggatatgccgaaaatcatatcgttcagagaatgaagtaccgcatctcggagtaactgactgtcgacgtgcatggtttgaaatctgatatccacgcccatcatgcctagcaaaattacgggaatggggttcggactatttcgcctcagccaaccgggagcttccgaatgctcaatgctgtatgcacttagtgtgtggaaaccagccaatcattgaccaatggcaggccgcagtcgaaaccagaaatatcctcgctcgcagtcaggtgccgaggctcagtgaagttggtcacgtccatatgggatcacgctccaacaattcattcagacgtaggcccataggttcgtttaatgctgcggtgaaatcattccacgctttactgttgggccgaatgatatgagcttcatggatgtcccgatctgcggcggcgagcagattcgataatgcccattgcaacgaagtcatgcctttggactcggccgcttggtcgattctggaacgttgctcttaggtgagtctcatttcaaaacgactgttcttgttattctctgtagtcgtactcctgttgtacgacttttgtacggacacgattggtgtgtgcgggatgtcgattgcgatggccatgtgggctcctttgcttggtctgttgtggttccagcttccgaaccggtcttccactgttcctcgtcttctcgagcaatgaacatctgatatatggattgtcgcgtcgactgagtatctctaatccttgcggatgaggagcgggccggtgatccagaaaggttcataccgcagcccgatggtcggctgggcgttcgctccgtacgctcgggagtatgaacacagcagcatcgcaattgcagcagcctcagccggcgtcgggaccggcggctcagcctcagcagtctcagcaaccccaacagttccagcagccggcatcgcacacccagcagtgggccccggtcatcgaggcgcacgacctggtcatggactacaccgccagcatggcccgcgcacaggcagggcacggcgtcaccggcgtgatgccagccggcacgggagccggttatgcgtcggcgaatcccgctgcggccggaccgggtgccattcaggccggccagccagcccagccagcccagcccggcttcgccatgccgaccatgcacacgctcgccctgaaccacgtgaacttcacgctccgggagggtgagacagtagccgtgatgggcccgtccggctccggcaaatccactttgctgcacgcactcgccggcattatcaagccgactgccggcacggtcgtcttccgtggcactgacctgagccatatgagcgacgccgaccgcaccaaactgcgtcgtaatgtcttcggattcgtcttccaatccggccaactgctgcccgaacttccggccgtcgaaaacatcgccctgccaatgatgctcgacggcgtgccctaccgcaccgccac

SEQ ID NO: 2000 - DNA, 3495 bp, Unknown
  R17_18m  MAG No. k141_26374
aggtggcccttggacggagacgcgcgcttgatctcggcgatcacggggatgccgtcggcgcgcttaagccatcgtgtcgcgtcaatcggagccggggccgccagcgcggccttcttcacgtcctcaagcgatacggtgagctcacgggcgcgctgatcctccagcgctcccgccaccagttcgtccaaaaccgacatggtcctccctttgttggtgttcggtcatgcgccactctaggtcacgccccgtcccgattgccgaacccgtcctacattctgggctattcctcgttggttcgtatcgctacggaaccagagcggccaacaaaaaggaaaatcgccatgaatatcggtcatacggcctgggattgattccattgatggcatagactgggcgcatgtgcaggagattcgcgcttgatttggattgggatgccgtggcctcacagttcgcggtagacgaggatgacgtgcgcgttgacactctgccacagccttcctacaacatcgcacccatgcagaacattggcgtggtggcacagggcaaggatggccgccgtcatctgaccggtgcctattggtcgctggtgccgcgatggagcgccagcaaagtgctgagctaccccacatataatgcgcgtgtggagtctgcgcatgtcaagccggcgttcgccgaatccacaaaatccatgcgagccatcatccccgcttccggctactacgaatggaaaggtcgcaggccgttctattttcacgcaccacatgatgaactattgtctttggccggcctgtactcatggtggaggccgtctcccgcatcgccatggcagctgaccgcaaccatcatcacctgccctgccgcggacgagttcgtcaaggtgcatgatcgcatgcccctgctggttcctcggaatatggttgcctcatggctggaccgctccgttgacggagccgcactgttagattccatgcgggaagcgggtaccatgctttcccggcatctgcaatttcacgaggtcgcgccactgaacagcgacggcaaacgtcttattcagccattggattccgccgaacccatgcgtctgttttgagctcttgcagctggaaccggctatgcagctgtatatgaagacgggtcaatcaacgccccgctgatagctaacctcgtatagccatcagtcaaaaacaggtctcttctgctcgacattggtcgactacgactacttttgcaccaatccgcgcaacaactcgatctcgtcgcgatgcgtggcgggcgtctgctccttggtttcgaggatcatcgggagcttggccatgattgggtcgttgaccagtcgcgtgaaaaacgggatgccgagctggccctcgccgatattggcgtgacggtccttgtgcgagccgaggccaaactgcgaatcgttcacatgaatcgccttgaccttggccaagccgatcgcctcatccaactggcgcatcacgccgtcgtagtcgtgcaccaaatcgtagccggcatccaacacatggcaggtgtcaaacgtgacgccgacgttcgccttgttctccacgccgttcatgatcgtggcgagctcctcgaagttgcgcccgcattccgtgcctttgccggccatggtctccagaagcaccatgacgccggccgcgcgctcgaacacctgattcagtccctcgctaatcagccggcagccggtctcggcgccttggcccacatgcgcgccgggatgaatattgatatacacctcctgtccggcctcgcggatggcggtcagcagctcgatgtcctcggccaacgcctcgatcgcgaatgtgcgcttggcctcatccttgccggctagattgtagacgtacggcgcatggacgaccaacggcccatagctctcagccttcagacgcgcaccgaacgccgccgcgccggccgggtcgagcgccttcgaacgcttgccgtacggggaacgcgggaagaacgcgaacgcggtaccgccctcctcatgggaacgttccagcagcgcattccatccgccggccgtcgacagatgcgatccgatatacagttccatcattccaaactcctcgtgttccactcgctgttcgtgttaccgctatcatatggtaggcggcatcgagcgccgcccgcacaaccgacacgagacacaactgttcacccgaccaaaggagacccgagcatggcggcagccggcacacccaaggacgataccggccttgaacggaagatggagtcgcgtcacctgacgatgatctccctgggcggcgtgatcggcaccggcctgttcgtcagctccggctatacgattcaccaggccggtccgctgggcgcgattctcgcctatgcggtcggctccctgctcgtctattgcgtgatggtctcgctcggcgaactgtccgtggccatgccgtacgccggaagcttccatatgtacgcgaaacggttcatcggccccggcaccgcgttcaccatcgccatcctgtattggctgaactgggcggtggcgctcgcctccgaattcacggccgcagggctgttgatgcagcgatggttcccgcattcgccgtcctgggtgtggtcggccgtgttcattgtggtggtgttcgcgctcaacatcatgtccgtgcggctgtacggcgaggcggaattctggttcgcgtcaatcaaggtgttcgccatcatcgcgttcattgtgatcggcctgctggcgatcttcggcgccataccgattgccggtcatgattccgcgccgttgctgggcaacttcgtggccgacggctggttcccaagcggtatcgcgccgattttctcgactctgctgaccgtggtgttcgcgttctccggcaccgaagtggtgggcgtggcggccggcgaaaccaaggatccctcgcgtgcgattcccaaggccgtgcacaccacggtgctgcgcctggcgattttcttcatcggctcgattctggtgatggcggccttgatcccctggcatcaggccggcgtggatacgagcccgttcgtgctggtgttccagtcaatcggtatgccgttcgccggcgacatcatgaacttcgtggtgttgacggccgtgctttccgccgcgaactccggcctgtacgtgtgttcgcgcatggtgtggtcgctggccaaggagcggctgattcccgaacgttttgctaggacgaatttccgtggtgtgccggtgtgggccgtgctgttcagcatggcgggctcactgctggcgttgctgtcttccgtgatcgccgcctcgaccgtgtatctggtgttggtcgccgtgtcaggtttggcgacgctggtggtgtggttctccgtatgcgtgtgccatatccgtttccggcgcaaatgggcgcgggatgggcacagcgccgatgagctcggctatcgtgcgcccggtttcccggtgctgccgtggctggccatcgtgatgtgcatcggcgcgctggtgctcgtggtgctcgatga

SEQ ID NO: 2001 - DNA, 5601 bp, Unknown
  R17_18m  MAG No. k141_26768
ctggaagaacacgtgcttgtcagcggtgtggttgggcacgatgtccacgatcaccttgatgccggcctcgtgcgcggccttggccatcgcgtcgaagtcttccatggtgcctaggcgcgggtcgacgttgcggtagtcgatcacgtcgtagccgccgtccgccagatcggaggggtagaacggggagagccagatggcgtccacgccgaggctcttcaggtagtccattttctcggtaacgccggcgatgtcgccgatgccgtcgccgttaacgtccttgaagctgcgcgggtagatctggtaaacgacggcctgcttccaccagtcgtcattgaggttatttgcggtcatgccgattctctcctgttccgggtgcgttgtggttgggttgttccggtcgcggccgaactgctgtgtgaaggcccgaccgttgtattgatgatgacaacgatatcatgtgaattacacatgcaaaaatcgatttatcggcgttttgcggtggtaacgtggtcacgcctgcgcgggcgctgctgtcgcggcaggcggcgcggtggtttcgcgcagtattagcggagtgtccggccgtacgaatgccggttcgattgacttgccggcaatggcatccaataccatgtgcccggcagtcgcgcccattgcgaacgggtcctgatgcagcgtggtcagtcccacggcggcggacagggtggaatcgtcgaagccgatgatggaaatgtcctgaggtacccgccgcccgtattgacgcaggcgatacagcacgggcgcggccatttcatcatcctcaaaacagaaggcggtgatgctgggggaggcgttcagtacggcgttcaatgccgcgttgctttcgccaagaccgcgttgaatgctcaggggcgttagctcgatccccggatgggcggcagcggcatcaatgacgccctgcaaacgagcctcggcactgtagcgcatattggtttcggtcggtgcgctgccgacgaacgcgatatgccggtggccgagtgcaatcaggtgctcgatagccgaacgtgtggcggcgtaatcatcaatgctcacgcctgcgtcgaacccatcggtggaggggatgttgatgccgacaatcggcacgtgcatatgcttcagtcgctccacttcagccggttcgatgtcgaaggagctgacaatcaccgcatccgcattgcgccgcacgggcaaatccgcaaagaagtcgtggcgctcggcggcgttgcgcatggggtagggcacagtgtcgtagccggaggggcgcagcgccgagtcaagaccggcgaagatgttcgaattgaaccaactggcgatggtctcgctggcaagtagtgcgatacggaacgattggccggattttagggcggcggccgagcgtgagactgagtagtcgagcttttcggccgcggccatcactcggtctcgagtctcgggaagcaccagatccggcttggcgaaggtccgggacaccgtggatacggaaacgccggcctcgcgggccactgcctgaatgcttgccttggtcatatgccgtcgctccttcgccgtcgcgaacaatcattgtcatgacaacgataacatgcccataacaagtcgtcgtcttcggctatctcgattacgaggggctgatctagggtgtcccggacatctacttccgtttcaaggggctccttgccggtgaaaccacaagtgcaaacgactttgtgccaacgtcattccgccgttctcgcgctgggtctacttgggcgccagccccttgaagcggaagtggatgtccggggaaggccaaatcagcccctcgaagccgatttagaccaatttcccattgcggaatcgatcaccgcttctctcggcgcatcacggcggctagggactgcacgcgtggcaggtcgaagacctcgtcggtatgcaccgcgtggcctgagctgtccgccagcggcacgcgccagttcgaatactcgctggaagtgcccggctgattctgggaacggcattcgcccacgccgtccaccagcgctgcctgcagcagcagcgacggcgtatcggtgagcatggcgtgcatcgcctccacgatctcctgcacatggccttccacatcatccgccacggtctgcgagatatagccgttctccaccagacggttcatcatggccgtgcgttcggccatcgccgaggcggcgaacgcctccaccggctcgctcaggagatgcagctcctcgcgcagcttgacgtgttcgaagttcaggtagccggcggtgggtggcagatcgtgcgtggtcaccgaggccaatgcctgcttgcggtagtcctcgggtgcgcggtacgggtcgccggcgttcggcgaatcgtccacgcggttgaaccattccacgtcagtgccgagcacgccgtgatcggacagaatgcggcgcacgtaatccggtacggtgcccagatcctcgccaaccaccatgcctccggcgcgcgtggcttcgatggccagtactcccagcatcgcttcgtggttgtacgttacgtatgcgccgttgagggcgccgagcccctgcggaatccaccacaggcggaacaggcccagcacatggtcgatgcgcaccgcgcccgcgtgctcgtacatcgaatgcaccatctcgcggtacacctggtagccggtggcctccagatagcgtgggctgaacggcggctggccccaatcctggccctgctggttatagaagtccggcgggcagccgaccgtgacgccgccggaggcgaagcgttccggattggcccaggcatccgcgccgagcccgtgcacgcccacggccatgtcttgcatcagacccagtgtcatgccgtggtccagcgcctcctgctgcgcggcgttcacctgctcggcggcaatccactgcagccagcggttgaactcgaacaggtcgtggtgctcctcgacgagctggcacacggccgggtcgtcgatggtcttctcgaagaaccaacggttctcgccccacggcgcgccccatacctcgaagcacaggcaccaggtggcgaaggaatcgaggtccgggccggcggtggtcttgaaatgctcgaattcgagctcgcgcttgttgttgcggcccgcgtcgaagatcaggcgcagcgccgggcgtttggccgcccacgccgcgttgatgtccatcgggttcgattcgtcgttgcgtgcggccactgaatcatgcagcgcatccacctgcgctcggatatcggccggcagcgtgccgtattcggggatgtcctgcgggcggatgtacgtcacgttgaggaatcggcgcgattccggtagatacggcgatggctcaagcggcggaatcggcgcgccggcgtgaatcgggttgatgagcatgaagtcggccttggacttgtcggccgcgtccgccagcagcagcttcagatcgccgtaatcgccgatgccccacgattcgcgggaccgcacggaatacatctgcgtcatccagccccaccgctggtgctcggcgaccgcctccggcacgggaatgcgcgcgggggcggcgatgatggccgccttgccctcgcgcccgtccaccgtgacggtcagtgtgtggtagcccatcggcagatcgggagcgatggtcaagtccggcttgccggaattgaggtgcggcagcagggcaaagtggccaaacgcggtgccgtcctccagctcgatggagacggtgatgtccgcgtccgacgaacagttcagggtgatgccggtcggtttgccggtggtggcgacgatggtggaggggagcaaacgtttgctgttttcggcctcaagttcggtcatggaacgttttatggcctcgtcgctggatgcgtccacatcgagggccttgagcacggcgaccaaggcctcgtcgctgatttcggtgtaggtgccgagctggtcgatgaacgaggtggaaagcccgcatgctttggccagcttgaccagcggacgggcgagtcgttccgcgctttccgcgcgctgcggggcaccggaagcggcgtcgttggtggtgtctgcgatggtgccggtgctggtcgctgcgtcgttgccgtacgcgtcagtcatgatgactccttgcttacagatcgggtactgctagtcgtttgcattgctgttcgagggccgctctgcgttgaggttccggcaatctgacagaccaatgttcgagctgttctatctttaccgtaactcatattgacaacgattgcaatatggtcggtgagttgggtggccggcgggctatccgagcacggcgaacgactgcggggagagcgtcagctgcccgtcgcccacggccggctcgccgaggccgagcagcatgacggcatcgggggagagcgtgtccggcaggcccacggtttcgctgtggcggcccggattcatggcgatgaggagaggcccggccaccgtgccgtcgccgctgtcgtcgttcggcgcggccgtgcgtagataggcgaacgcgcggccgtccgcgggcgcggcgaccacgctgaacccggcgccggcggccagtgccggctgggcggcgcgcaacgccagtactgagcggatccagttgaacagcgaatgcggtcgcgaagcctcgccggtcaccgtcggcgcatcgtcggccggatcggtcggcagatacagcgcgtccgccggggccgtggagaagccgagattcggagcgtcggacgcccattgcatcggcgtgcggctgccggtgcgcacgtagccgccttccttggtgggcagcgcgcggtagcgcatgccgatttcgtcgccgtagtagaggaacgggcagccgggcatggtcagcagcatgccgtacgccaccttgagctcgcgttcggcgaggcgctgggccgtgcgcaaggtgtcgtggttgcaggtgatgaggttgaaatggccgcccgccgcgcggcaatcggcgagttgcggcaggtattccgcgaggaatggggcgattgaggcacctgaatcggcgttgaaataactggaatcgccttcgtgttccataggcgtatcagtattgcgcagcagcaggttgtagccattcgggtggccgtcccagcgccagtcgaggtagaagtccatgtcgaacccggcctgcatcgattcgttcggtcggccccattcggcgacaaacgccgcctcggggaattcagggcggattttcgagaacatgtactgccaggtgcggattgtgtatggtttgccggcgtcgtcgtgcttgacgaggctgtcggccatgtccactcggaaaccgtccgcgccgcgggccagccagaagcgcatcacgtcgatcatcgcgtcgcacgtggccagggcatccgggccgagcgccggtttctgccatgcctggtgcgggtgtgcgaaaccgtaattgagggccggctggcatttgaagaagttgaggatgtaggtgccgtctcgctcagtctcgccgccgatgaagggcagaccgtcgccgccggcgatccaggagtcggtccagatgtagcggtcggagacggattcttggatggcggattcctggaccaccccccggattgtttcaaaatccgacccccgccggcgggggtcgaaga

SEQ ID NO: 2002 - DNA, 3033 bp, Unknown
  R17_18m  MAG No. k141_27096
ggcagcgcggccttgccggtcgcggcatcgggagcggcgaacacaccggcggcgaacagcagggagtcgcccggcaggaatgggaagaacaccacacccgtttcgataaatacgatgaggaagatgaagccgagggtcggcgccacgcccatggcaatccaaccggcaatcgcggcacgcggatccttcagcagttcgaggatgaaattaacgaagcccatgtgtttcctatgagtcctaaatcttgtattgagctgccagcccaatgaaccagacagttatatgcaaaccgtcaaataccctaccagccggctaacacaactgctacacctgcggcgaggaagcgcggtaacgcaatgaatactccacatcaatacgccgcctcggcgcccgagcccccgtcttgacctgatcaagaatcgacgtgatggcaatctcagcaatacgcgcgcgctgcggatccacagtggtcagcgagggaatcgtgtacttagcctcatcgatatcatcgaagcccaccacacgcacgctttccggcactcgcacgcgcatttcccgcagctgactgataacacccatcgccagcaaatcattcagcgcaaaaatgccatccggtcgaatgccctgcgcatacatctcacgtaccgcctgagcgccctcggcactggtccattcgccgcactcgcggatcaggttcagatcaggcgtcactccacgttccgcaaaggcgctgagataccccttggttcgcatcgaacgagaggacggcacggattcgtccaacgttccgcccaccacggcgacggtgcggcatccggcctccagcagatgcgtggtagcggcttgggcacccaattcattgggcatcaccacgtgcggcgcaggtgcgttgaagatacgctcgcccagcactaccagcgggtagtcgccctcgagctcggccacatcctccgcccgcatggccgtggggctcaaaataagtccgtcggtcatattgctggccatggcatgtgcgctctcgatctcgcgctggcggtcgtttccggtcgattcgatgatgatgcggtatccatattcccgtgcccgcgtgatcatctcttcggccagttcggaaaagtaaatctggttcaaatccggcagagacaatgagatgagtcctgtgcggccggaacgcaaattgcgagcctgctggttggtcacatagcccagctcgtcaatggcctgctggatacgttcgcgcgtggccggcttcatataggggtaatcgttgaggtaattggacactgatgccacggacacgtgcgcacgtttcgccacatcgtgcagcgtcgccttgcgcgaactcgcaaccatagcgcccccttatattcagtccatcaaccactcggcatggcaccatccacgtcgccatattggttgtcgaacgtttcagatgtgtgtttccagcataaaccatgtgggatatcgcccccgcaggccgtttcgcttaggcgtccgcagaatcacccccagtcggccttgccgacagccccgctagcagggacgggtccgacacgccgcccacgactcccactgcaaccgtcaacagactccgccggcggtaataaatcagggccacttcggcaaaccaacaaagaaggcccgccagacaacgagaattcgtaccggacgggcccactcgaggagtagaaactatgcgatattcctatctataggctcacctttcgatggattcgttgacctgctgaatggccttcagcgcggagtcaacggtggcgtcgccggtgtagatgttctgcatctgcacaccgatctcgtcgttgagttcctgggaggtgagcttgcgctcaagcttggaagaggcctggcccttggtcaccaaatcgatgctggccttggcggattccgtggcgtcagacggcacttcgaccttcatgtccttgtcgaccggagcaccctgcagcgtgttgatccactcctgctggccttcgccggtggtcatgaactcgatgaacttcatggcggcctccttcttcttggagtccttgttcacgctcaggccgaagtccacaccagtggtcgggccggtagccttgtctcccacctgcgggaattccatcatgcctagctcgtccttctcaacggccgtgcccttggtctcatcgttcggcagcacggcggaaacgtgccaggagccggtcgggaagaaagcggacttgcgggcgtagaagtagttgtcgcgagcatccgggtaggtcgcagtaccaactgcaccatcctggaacagaccatcaccgatcatctgcttccaagccttcatggtcttgacgaaggtctcatcagtgaacttggccttgccttcggcggccttgtacacgtcaccttcgccgtactggttggacagccacacgaagatatcgtcgaggtgccagccatccttggcgccgagggccagcggcatcagacccttggccttgagttccttgttggcagccacgagctcgtcgtaggtggtgggcaccttgatgccctgctcgtcaagcagcgtcttgttgtacaggatgtattcggagccggaggtgatggtcggcatggccaccatcttgccatccttgttggtggtctgcgccacggcgccctcggccaccttggaatcccagccgggcatgtacttgtcggccagctccttcatatcgtcggcgaaacggccgtactgttccacagtggaaccggcctgcacaccgaacacatccgggccttcgccgccggccatcgaggtctgcagcttcttctggtagtcggccatttcagaagtacgccaccagttgatcttgatattcgggtacttcttctggaaggcggcgtaaatcgacttccactgggcatcggtaggctgccaggtccagaaggtcagctcaaccgggctgtccttggtaccgactccctcatcggagccgccgctgcccgaaccgcatccggcaagcagacctgcagacatagcgagagcgcccactgcggcgatcgccttcttca

SEQ ID NO: 2003 - DNA, 7505 bp, Unknown
  R17_18m  MAG No. k141_27239
cgtggacgccagccacttcaccaacggtggaatcaaggccgacgggcatatcatgcttatgcgtattgacgccgagggcgcgggtgttgcgctgaacgacgtattcaccaacgtgcagaatgtgttctccgccagtgctggcgttaccgtgaccggtccggtggccgaacgtacgcaatgggagaccatgatcaacggcatgatggcattgttggtcggtttgattgcggtggctgtgctcatcgccttggtcggcgtagcgaacacgctgagtctgtcggtgatcgaacgcacacgcgaatccgccaccttgcgtgccatcggcatgacgcgcggccaactgcggcgctcgctggcggtggaggcgttgctgctttcgctcgtctccggcgtggtgggagtggtattgggtaccctgttcggctggctcggatcctacatggtgtttagtttgtacggcgacaccgtgttcccgttcgaatgggccaccaacggtgtggtgctcggcgtcgccgcgctcgccgctctgctggccagcgtggcacccgcccgccgggccgtcaaaacgccaccagttgaagccttggccgaagcgtagagcaataagctccctcatcagagggagcttttttgttacaccagcccgttatcgtacgcgaagactacagcctgtacgcggtcacgggcgttgattttggcgaggatatgcgccacgtgggttttgacggtgggaagggagataaagagcttgtccgcgatctcctgattgctcagaccatgggcgatctccaccagcacctcgcgttcacggtcggtaagcagatccagttcgggatcggtgtatgctgggcgtgacgtattggaaccgtcggaagcggccccggcaggggaggggatgccggtcatcgagccggcaccgttgccggccgcaccgccagagacgccgacggcggaaccgtacacggcaccggagcgcgcgacatcgccggtcagcgaaccatgctgcgcgtaaccgtcctgcatcatcttttcgatgagtcgcttggtggcggaaggcgcgataatcgcattgccttggaatacagtacgaatcgaattgagcaacgtttccggttcggtgtccttgagcaggaagcccgaggcgccggcattgattgccgccatcacatactcgtccaaatcgaacgtcgtcagaatgattacgcgcgtcggccggtcgtcagccgattcggccgagacggtcgcgttgtccggcgcggcggagagcgaggtaatacggctcgtggcctcaatgccatccatgccgggcatgcgcacatccatcagcaccacgtcgggatgcagggattccgccaacgccacggcttgggcgccgtcggacgcctgcccgaccacctccatatccggttgcgaaccaatgaccatggcaaaaccggcacgtaccagctcctggtcgtccgcaataatcacgcgaatgcttctgctctcgttcatgctctccactgtatccgtttcctatcggagcgccgctccataaacaccctgattgttccctgagttcttattgggcaagtctctcaccggggtaacgttcccgcgtgttgcatctgactatccaacgaagccgccggtcgcaactgcatatccggctgcacaccctcatgggcctcgtcgctgaacccggtttcacgcaacactctcaacagctgacgcatatgagccaatgcggcgcgcccccgagcaccaatcgcggcaaaagccgcttcaatctgcatactatcaggcgcaggttcggcgttgagcatcaccagtccctcgtcagcctgcgcaatcaccgattccagcgtggtcagtacttcggtttgcatcgccgcactaatacggttgcgctctaagttggccgccagcaccttttgccgctcctgctcggctcgcagcgcctcctcgcgtcgcaacagcaccagagcgtttgcgccacgcgaacggctccatcgagccatcgcaatgcaggcaaaaccgaccaacatgattcccgcgcccggcagcaagccggacaaaaccagcctccattttgagagcatggaactaccatcgggcaaaaacagatggaacagctgactgtatccattccacccagccatcaccttgatgcccgcaagccacgaatcggctgccagcgccacgctcacccagcgccaagcggactctcgtccatacaataccgccgaatacacggataccatcgcaaacatattgatggtcaaaatcgatggcaagaacaacagttgcacagcagacagcaccgccatcgccagcgcgctgccctctgggaagcggcgacggaacgccaaaggcgagagcataataatcgtcagcgttatagtcggcacgcggttcggcgaatacggggcattgccgatcatttgcaaatcgccatacgtggcggaatcaaatagcgcaatcagcacgatagtggcgataacgtccatcagaagatagtgccgctcggtccactgcgcaaatcgacccacccagttcgactcacgcgtatctccctggtcgagtactttggggcgcgcccgatccatcaatcctcgtatacgcgagataacggttagcaccggatcctccgtatcggtgccagactgtggggcggcaggggagagcggaatcgtagccgccacaataaagccaccattcggccctgggccggcctgcacgctgccacccaacgactcaatgcgttcatgcataccaaccaatccgtatccgggcttatgaccgtctgctgcagacgtcgcgccacggccgttatcggatacggtaatcgacagcacatcgtttgaccagatttcatcgatggtggctttagcaccctcgcccgcatgtttgcgcgtattggtcagcgcttcctgcacaagacggaacacggcggtttccgcgtcggcggacagccggtcaggttgcgctttgccggtcatatgccgggacaccaccagatgaccgtcaaacagcgaatcgatgtcggcatatccggtactgccactcgcaccgaacacattgaacagacgctgcatatcatgctgcgcgcgttcggcctcatgccgaatcgtacccatcgtgtgcttggcgatggccagatcatgcgcacccgcataccggccgccatccgactgcacaataatcgtggagagcgtatgtgccaccacatcatgcatatcacgggcgatgcgtgcgcgttcggccagcgccgcgatgcgcgtctcctcggcctctttcgccacaatggaagcgttgcgctcgcgcatggccgccagcgtggcgttgcgcgctcgctgccacaaggccatgatgatgacgctcagcacgctcgattcgatgaacgccgcctccatgccgaagtcagcgagcatcttggccccgcagttgacggcgccgcttgcccccacgacgccggtgaccgccgggcatgtgggcatcatgatggcatcggacagccagccgtcgcggatgacgcgcgaaccggaggaaggtccggcgaacagcggacccacgttgaaagacaccgaccagaccgtcgccgcgaccagtcccatgacgaacgccgtgacgatgaaccgccaggaatgtcggggattgccatacagaatcaccgaatacaccatgatcagggcgtagaaatcgaaatacatgatcgccgggccgaacacaagatgcgtgatggtcagcgccacgaacagccaggccgccggctccgggcaatacctgcgcagcatcagcggcacgaagaccggcagcgaccacagcgtcatcgacgcctgagttgcgggaaacaatatgccgcccgtcgaatcagggctggtgacgccgatgaacggcacgcagccggcgatcagcgccgcagcgagcaacgtgtcccatagcagtgtgcgggtcgactcccgtgcgcaccatgccctcacgcgcgccataatctccataacgcgcaaggctagcgtgtccggcgacgaaccggtatcactcttcaggaggatttatggactagagtcttgaaccatgacaatgctgagcaaatactacgtgcccggactggccatagaggaccattccatcgatgttccgctcgactggaccggccatgagccaggccaagcgttcgacggcgaaaccatcaaactgttctatcgcgtggtcaccgcgcccgaacacgtgcatgacgacctgcccctgctgattttcctgcaaggcggtcccggcggtgccggcccgcgcctcaacagcccgacctccgacggatggatcgaggaggccatcaggcacttccgggtgatcctgcccgaccagcgcggcaccggccgctcctcgcgcgtggacacgcacgccatggcccgcatcgccgccgcgcacgacgatgatgccgcggccggcgcacgagcccaagccgactacctgaagaagttccttgccgattccatcgtgcgtgacttcgaacatctgcgcctgaccgaattcggtggccgcaagtgggtgacgatgggccaaagctacggcggcttcctgaccctgaccacactgtccctgttcccggccggcgtaatcgccagcttcaccaccggcggcatcccgcacgtgccggccgacgccgctgaagtgtacgagcataccttcccgcgcatggtgcgcaagacgactcagttctacgagcgctacccacaggacaaggagcgcgtggccgccatcgccgacaagttgccgactactgcggaagtcgccgaattcgttggcaaactcaccgattccgtactgaatccgatggctggtaccgatgtggagcatcgacttggcgtgatcgccggcatggccgcccacggcttcccgctgatgccgaacggcgacccgctcaccgtcgaacgcttccagtgcttgggatccgactttggcatgaagccgagcttcgagcgtgtccattggattcttgacgacgccttccttgatggcgatggttccgcttctgccgactcgccgttgtctgacgaatttttgaccaaagtgatgaacgccacgtcgtcgcgcccactgtactggccgctgcaggaattcatctacgccaacggcgagcttgacgagcccattcgttgggccgcccagcgcgtgcgcgatggcaagcccgaattcggtgctgatgaacgcccgctcaacttcaccggcgaggccatgttcccgtggatgttcgaacaggaggccgcattgcgcccgttcaagccggccatggacctgctcatggaagacacgcacttcggcgtgatctatgacgaaggtcagctggcccgcaatgaggtgccgctgcaggccgccgtctacttcgacgacatgtacgtcgattccggcctgcagctcgacaccttgagccgggtgggcaacagccactactggaccaccaacgaattcgagcatgatggtctgcacggcccgctcgtcttcaagcatctctatgacgaagccctcaaccggggcgacctcgaagaactgttctgactcaaggaagcaagctccctctgatgatggagctctgtatacatgcacgaaaggaaaacgtatgactcagaacctcaccatcggttttatcggatatggcaacatggcccaggccatcgcccaaggcttcgttgacgcgggcgtggtcgccggcggccagatggtcgcctgcgccgcccactacgacaagcttgagaagaccaccgccgaacttggcgtgcgtccgttgcacaatgcgctggaagtggtgacggccgccgacgtggtcatcatcgccatcaagccctaccagattgccgccgtcgtcaagccgctggccgacgaacttgccaagccgggcaagatcgtcgtctccatcgccgccggctggaatctcaagaagtaccaggacctgttcaccaccgaagacggcgaatccgtcgactcttcggacatccatatccagtgcaccattccgaacactccgatggccgtgggcaagggcgtgcttgtcaccgaatccgtcaacacactgaccgacgacgaaaccgaaaccttcgaaagcctgttcgggccgatcagcctcatcgagcgcgtggacaccgcgcatatgaacatcgccatggtggtggccggctgcgcgcccgccttcactgacatgtacatcgaggccttgggcgacgccggcgtgcagtacggtctgcagcgagccacggcctaccggcttgccgccaagatggtcgaaggtgtcggcgcgctctacatggccaccgaaacccatcccggtgccatgaaggacgccgtgtgctcgcccggcggcaccaccatcaagggcgtcgcccagctcgaaaaggacggtttccgcggctcggtcatcgacgccgtagacgccatcgtcggctgactgccaatcagagtttgcgtatattcgcatatcacagtcaaagccttcgaaccgtatgctcggaggcttttgcatatggccggttcaccacatgcaggttcaaggtgtccagcttctccctagacttggaatcatgtctcttactatcggaatcgtcggactgcccaacgtcggcaagtccaccatgttcaacgcactgacccgcaacaacgtgctggctgaaaactacccgttcgccaccatcgaaccgaacactggcatcgtaccgttgccggacaagcgtctgccggtactggccaagctggtccacaccgaaaaggtcgtgcccgccacggtgaccttcgtggacatcgccggcatcgtcaagggcgcctccgagggcgaaggcctgggcaacaagttcctggccaacatccgcgaggcggacgcgatttgcgaggttgtgcgcgccttcgaggacgacgacatcgtccacgtcaacggcaaggtggatccggccgacgacatcgacaccatcaacaccgagctgatcctcgccgacctgcagaccatcgaaaacgcgctgcccaagctggagaaggatctgaggggcaagaagatcgagccggcctacatggacgctgtcaagcaggcaaagaccatccttgaagccggcgagacgctcgacaaggccgcacgcgaaggccgcttcgacaaggattccgtctacgacctgcatctgatgaccgccaagccgttcatctacgtgttcaacgtggacgacaacgagctggccaacaaggacctgcaggctaagctcgccgcatccgtggccccggctccggccgtgttcctcaacgctcagttcgaggcagacctgaccgagctcgacgaggcggacgcccgcgaaatgctggccgacgctggtttgagcgagtccggtctcgaccaactggcccgcgtgggcttcgacatcctcggactgcagaccttcctgaccgcaggcgtcaaggaagtgcgcgcttggcagatccacaagggctggaccgccccgcaggccgccggcgtgattcacaccgacttcgaaaagggcttcatcaaggctgac

SEQ ID NO: 2004 - DNA, 5161 bp, Unknown
  R17_18m  MAG No. k141_27552
cgttggagaacaccacgtcgaagtcagtcggcagatcattcagttgcgtagacacatcgcacagttggaaatcaacgtcaggataggttttacgtgccgcctcgatcatgtctggcgaactgtcgacgccgcgatttcgcgcatatcgtcattatgaatgtagtggacggcgcttcgaacgaatggctagagccggtcgaagccgaatacgacgcgctgcgctgcattgatgaggccgcaaagagtatgtgatgaaagctgttatgtgcctatgcgcggcgcactagaacacgaccgccgacacgatcgtcagcgaggccagcgagaacagcgtgcttacgagcacgaagccgaccgcatagtcgggcatgttgttcttgcggccggtgaacatggcgatggtggtcatggtcggcaggccggcgatcacggtaatcatcagaatcatgtcgtgagtgatgggcagctgcggtagcgcgctggccaacgcggtcagcagcgcacagaaagcgagcgggaatgcgatcatcttggcgactaggccaacatagagttcgtagcgtttgaggacgccccaccacttggtcagcgcgaacaggccacccaagtagatcagcgacatcggcgtggccatattgccgatggcgtgcagcggcttgaggatgatgtccggcaccttgacgccaagcagaatcagaatcagggcgagcatcacgccgatgaaggcggggttgacgaatcgtttaagcaggccgaggacgcgggtgcctagcgaggggcgggcggccaccggagaaccgatgttcgcagcctcccccaccgaaccggcgccgttcaccgaaccgttcgcggccacacctcgcgcgccaatcgcgttgccgccagtcgtttcgtcgaccggctcgcacagccctacgccgtacgtccagagcagcgtctggtcgatgatcgacatcagcgccacgtaaatcgcgccgttctgcggccaaagtgccataatcaacggaatgccgatgaatccggcgttgccgaaaataagcgacgcctgaaatacatggctacgcgaacctttgagccgcaacagttcggcgaccagccagaacaccaggatgagcagcacgtacatcacggcggtcagcagcatcacgccccagttagaggcaagctgcgcgcggtccgcaccatcgacggcgttcgaaaacacaagcacggggatgagcacgttgagcagcaacgagcacatgccgtccaacgccgtctgaccgtagaatcgaagcctcacacatccatacccgaccatcagcatgatcagaaatccgactaactggccaatcatgacgccgaactgccccatgcacactcctctcgctcgcgttcccgtgcttttctgtcactggttcatataggcagccatctggacaggctcggcggcacacgcatcagtatgttcgataccaccacatgccaatccacttctcgttcaaccgttccccgtgctaatgcgccgccggccaccccgtgttgccggtgctgcgcgagcaccattacacgtattgcattccggtgatcagcgggcgcaacgtgtgggtcggcgcgaacgtgtcgattctgccgggagtgaccatcggcgacaattgcgtgattggcgccggttcggtcgtgacacattccatccccgccaactccgtcacctacggcgcgccctgcgaggtcgtgcgtgaaatcggcgacaaggaccgcgagtatttctacaaaaatcgcaagctcgacgtgtgggagtgagctttcgcgctactgctctttgagcttaaaacgctcactgaattggcggtcgcgccagtagtagacgtcgtcgcgttcgttgatttcgcgaattaccttgcacgggctgccataggcgaccgtgttggcggggatgtccttggtgaccagcgagttggcgccaatgaccgcgttgtccccgatggtgaccccgggcagcacggtgacattcgcgccgatccagacgttctcgccgatgtggactggcaacgaatactgggcaccctgatagcgcaggtccggacgcacgggatggccggtggctacaagcgtgacgttggggccgatcatggtgtgggatccgatgaagatctcaccatcgtccaccagcgtcaggttgaagttggcgtaacagcgctcgccccaataagtattgcagccccagttcgcatacaccgggcattcgaggtacagaccatcccccgccgcgccgaagaacgcctgcatgagttcggtacggcgcttcgggttggtcagcggcgtggcgttgagttcgagctggagatcacgctgggcggcctgcagatcaaaaaagccgtccacatcatccggcaggtagacctcgccagagaacataagcgccattttctcgcgcgtcgcatcatcgataatcggcttggcgatcggcttgtcttcggtcatcattggctcctgttcggcgttttggcgattgtgtcggtcgaactattctgtcacagactcgttttcgacacccagcatcgagcgcagccagtcaaggattcagatgtgcgattggcaccgtgcgggcctcacacttttcttattgagaacgattcgccgtgcagtcaagccctccatccacccaaaaacgactcgcttttggccacatcatcgcggtaggccttgccgaactcgtcaatgagcccatggaattcctgcaaatccttgacactgaggctcgcatccagcaccacgggcgaataggccctgtggaatgccggatagccggccggcacgtcgaatccaaggaaggcgaacagccgccgcgcgtaggtatcggccacgaatgtgcggcgcgagaacacgtacagcatcagatcgtcggccgtctcgccgccaataccaaataatccaagcaactcggcccgtaattcggcatcggaaatagccgcggcaccctcgggcgcggccccgcaacgctccacataccaccaactcagcgactgtacggtcttggatttgttgacataaaagcctgacggtcgaatcagttcctgcaaacgctccggctccatggccaccagcttatggggttcgagcacaccctccgcgttcaacgccgcaagcgaacgattcacattgccccacgccgtattctgcgtcagcaccgcgcccaccataatctcgaacgtggtctccgccggccaccatccggtcgggccgagtgcgtcagccatggtgcggtacagcaattcgatgcgctccggcacaggccacttgtgtgcctggttggctttcatacgtttcatattctgcattcaggctccgtattagccatccgccattcatttattaggtcgattatgcgttcattaggtcacttgtgatgaacactgccttcaagaatggcttcattccaatgctcattatctcatgctaagcagggcaccgacctaatgaacgcataatcgacctaatgaacgcaacggtaaggaaaaactacagagattcagcgagatatgctcggtccacctggtctggaagtcgaaaatcttgatgacatctaccgcaattcgtgcaggattcgccgcatgaacgggatggtgaccacgaatgtcagcacgtcggacaccgattgggccatttccacgccgagcacgccgaacatcatcggcagaatcagtacgatcggtgccaaaaacagaccttgtcggcacagggccaggaaggaggcgatgccggtgcggcccatggtctgggtcatcatattgcccatcatgttgaagccgttgagaatcaccgtgcagcattggatgtgcagcgcggccacacccaccgccaccacggccgggtcggagcggaagatctcgaccagttgcggtgcgaacacccacagcaacaccgccaacaccacgagcacgcaggtggcgagccgcacgcagaaccagtacccttctttgacgcgcgcgaacaggccggcaccgtagttgtagccgcacaccggttggaagccttggccaagaccaacgatcaccgagttggcgcccagcataatgcgcatcacgatggccatgccggcgatggccgcatcgccgaacggattggcggcgatgttcacgcaggtcacggaaatcgaaccggcgccttggcggatcagcgagggcaggccaccgccggccacttcgcgcatgagcagcacatccggcctgcaattgcgcagggacagtttcatcacgccgaatttgcggctcattgtggtcagaatcgtgaagctcaccgtctggcagatggcggtggccaggccggcaccaaaaattccgaggtgcagcacgaagataaacaacggcgcgagcaggaaattcagcaatgcgcccgaaaccagcccgatcatgccgaacgccgattgcccttggtatcgcagcagtccgttgagcgcgaacgacccgcatacacagggtgcggcgaccaacaacggcgtcaggtattgcacggcgtatggggcgattgtcgaggtcgatcccagcatgacgaccagcggccgcagggtcagcaatccgattgtggcaatcaccaaaccagagagcaccgcacccgcgaagcccacggccagtagtcgggaggcgcgctcattgttctgtttgccgagttcgcggctcatcgagttgcccgcgccgttgccgaagaagaagccgagcgcctgcatcacggtcatgatggagaacgcgatgcctatggcaccggactgcgcggtgccgagctgaccaataaagaacgtatccgtgaggttgtaggcggtggtcaccaagttggagatgacggccggcaaacacagtttgagaatcagcggcttgaccggctgcccggtcatctgccgatatttcgcgtccgcgctcgcgcgtctaatgccatgaatctgcaccatggacggctatcctactcgcgcagggtcctatgcaaaggcgcgttaccgccatacgagtcagcgcagataccgcccggtgatgctgttcggattggccgcgatttgttccggcgttccggtggcgacgatgtgtccgccgctttcgccgccgcccggacccatgtcgatgatccagtccgcattggcgatcacgtcaaggtcatgttcgatgaccacgactgttgcgccgctcgccac

SEQ ID NO: 2005 - DNA, 2837 bp, Unknown
  R17_18m  MAG No. k141_27664
gaacctgactgaagcgagcattctgaccaagcgtgactaccccggtcaggatatcgatgaagccacggttgacgagctgttgggcgcgctgctggagcttggcgcgaagaacgtggtgttgaagggcatcgaccatggcgatggcaaaatcgtcaactatatggtcagcgcttccaccggtgttgccggcaagatcgagctggctcatgaaaagctgccatacatgattcatggcacaggtgacgccttcgcatctgccctgtgcggcgcggtgatggccggccgcggcctggccgagtcggccgaaatcgccggcgagttcgtgcgccacgccatggtcagcacccgtaaccagccgcatttcgaggatcgtggcgtcagcttcgaactgaacctcggcgaactcaccgatttggtgaagtgaccgcaccttggctcccctctccgctcactgggtctgacgtattcagcgaacaactcggcgggttgtctgtcgtcacagggaagccgactggggagccttggtaaaccttctgaactaatggtggataaccaggttttcatccacacgttatccacaacacgccaaaccgcgtcatagtatccacatttgccggttgcgcttgtgctcttacataagtaacccgcacagtggaatcatgaacgctttaccacctacccagccgacgacgaagtccggcatcgacgccggccttgcctttcaccagcccatgctggcttcacctgatccgcaggcaacgctgccttcggaacggattgcggccacgatgggcgaccgcaatctgacgcccaaacagttcggtgcgctcggcgagcagtatgccgccgcgtggctggaggaacacggttggacgaccttgagccgcaattggcatacccgttatggcgaattggacatcgtaatgctcaatcccgagtacacggtggtgttcgtcgaagtgaaatcacgccggtccatgcattacggatatccgcaagaggccatcacgccggcgaaacagcacaatctcaggaaagccgcctgcgattggctgcttgaccggcgtaatcgtgtgccgcatacggcagtccgtttcgatgtcgtcaccatcgtgcttcgggcgggcagaccgctcgtgcatcacatcgaaaacgccttctgaattcgtcccccaaaaaacagccacgttgcgaaacacattgcgaaaggagtagacatggctatcggcagcactctctcagtcggactgatcggccttaaggccttcatcgtccaagtgcaggctttcatcagccctggcttgccatacttcagcatcatcggattgccggatgcatcgttgtccgaagcccgcgagcgcgtgaaatcggcgtgtcaagccactggattcggttggccgcaaacccgcgtgaccgtgaacatgagccctgcggccatgcccaaacgtggttcgtcgcatgatctggccatcgcggccagcgtcctatgcgcggcgggtgccatagggcatgattgcttggaagataccattgtgctcggcgaagtgaatcttgacggctcggtgctgccgattcatgggctgctcccgatcatgctgcatgccgaggaacgtggcgtgcgcaaaatgattgttccccatcgcaatcttgacgaggcttcgatggtggatggactggatgtagtgggtgtgaggcatgtgggtgagctcatcgaactgatgggcggcgatgccacctatacgattactgatacaccggttgccgacgagaccaccacggatcaatcgcccacaagccatcccaacgattgtggcgatatgaacgaggttctgggtcaggaacatgccaaatgggcgctgcaagtggcggcggcaggcggacataatctcatcatgaccggcccgccaggcagcggcaaaaccatgctggcctcacgtatgcccggtatcatgtgcccgttgaacgaggcggaacaactggaggtggcgtcgatacggtcgctgtgcggcatactgcctcagtacggcatcaccgacatgccgccgttcgaggcaccgcaccacaccgccagcacggcggccttggtgggtggtggcagcggcatcgccgttcccggcgcgatcacgcgcgcgcatcgaggcattctgttcctggacgaggcaccggaattcagcgcacgcgccctgcagacgttgcgcgaaccattggaatccgggtatgtggcgctttcccgttcaaaaggcagcacctattacccggcctcattccaactcatcatggcggccaacccctgcccgtgcggatactattacggcaccggcgaacgttgcgcttgccgggaaaaagaccgtatacgttatttctcgcgattgtccggaccgatattggatcgtgtggatattcagatggcggtgccaccggtctcgcgcattgccgtgcaaagcgagccaatcggcgagtccagtgccggaatacaagctcgtgtgattcgcgcccgtcaagtggccaaggaccggttcagacagtacggatgggtgtgcaacgcgcaagcttcgggaaaatggctgcacgccaatacgtcgctgaaagcgatggaattggtcaatcgggccctgtccaatcatcaactcacattgcgcggggccgatcgcgccatgcgtctgtcttggacgctcgccgatctggccggccgcgtgtcccccaccgagcaggacgtccatcagggcatcgaaatgagaacgaggatgacatgagtaacgctactgatatccgacaatctggcggcaccgcaggcagtgtggatcacaccgatacgggcctcgctgtttcgcgcacca

SEQ ID NO: 2006 - DNA, 14134 bp, Unknown
  R17_18m  MAG No. k141_27757
cggattcttgcgggcgatgccgtcgcacagggaggccgagtaagccagctcgtcgaagtgagcttcgccaggcgtgaagtagtgatcgttggacacgaagtccacgtcgtaaccccacttgtcgtaatcgatgccggcaccgccggcggagaccatgaagttggtggtctgcggcttgggggcgatctcgagcagggcgtcgcgctcggccttgtaaaagtcgagcagggcgtcggagctgaagcgcttccagtcaagcagcttgcccgggttcatgaagttgccgtcgccgatgaagcgcggcgggatgatctcggaaaaattgttcatgcgctgcgcccagaatgcggtgccccaagcgtcgttgacggcgtcgatggtgccgtacttcttctcgcaccacttctggaaggcgcgctcagcgtcttcggaatagtcgaagcggttgtgacagccgtactcgttgctcacatgccaagagaccacataggggttgtccttgtagtgctcggccatcttgcggcacaagctgagcgcgtagtcaaggaagaccgggctggtggcgcgccagtgctggcgggcaccgggctggcagacgtcgccgcggtagtcgacccagaggatctccgggtgggcctgggtcatccacatcggcggggatgcggtgccggaggcgagatcgacggcgatgccggccttaccaagcttgtcgatgacgcggtcgagccaatcgaagtcgtacacgccttcttcgggctctagcttggcccaggagaagatggctacggagacgaggttgacgccggcctgctgcatgagggctacatcttcgtcccacacttcctcaggccattggtcggggttgtaatcgccgccgtaccagatgcggggcttgttgcccgcaagcggctgcggccacttgaactctttacgttccatgatgattcagctcctttattgaattttatcgataatctgcgtccgcgggaataaacagcccacagggctgtttgcctaacggctcagctcgtcagagggggggcttggcactattttacctccctctgatgaggaaggttgtctcggcggagccgggacggagggagggaccccgccgcgaggcggtgaagacaccgcgtcggcggagccgactccatcactccttgacggcgcctgcggcgagtccggactgccagtacttctgcaggcacaggaacgcgatcaccagggggatgatcgtgatcagggagcccgtgatcaccaggttctggatcgcctggccgcccgcggtcgaggcctggtccttccactggttcaggccgatggtcagcgggtaccagtccgcgtccttgagcatgatcaacggcaggaagtagttgttccacgtcgccacgatcgtgaacaacgccgtcgtcacgatgcccggagccaacaggggcaaggaaatctgccagaacgtgcggaactcggacgcgccgtccacgcgcgccgcctccagcagctcctggggcacggcctgctcgctgaagatccacatcaggtacaaaccgaacgggctgatcagcgacgggatgatcatggcccacggggtgttcgtcaggcccaatttggcgaacaggaggaactggggaaccgccaaagcgatgcccggcacgctgatcgcgccgatgatgaccacgaacaccgctttgcgccccgggaagcggaacttggccagagcgtagccgcccatgatcgccagcagggtcgcgccgccggcgccgaccaccacgtacaggatcgtgttgaacagccagcgcgcgaagataccgtcctgataggagaacaccgtcgcgatgttgtcgaacagggcgaacgtcttgccgaagcccaggccgaacgtactggtgaagtcggcctgcgtcttcgtcgcgttgatcaaaaggtagacgaacgggaacaggcagtacacggcgaagaccgcgcacaggacggtcaacaacgtggaacgcctcgggttgttcacgttcgcgaaccccgccttcgcgctgcgcctgcgttcggcggcctcgtcggcggcgatcctcttctggcgggccttctccgccttcctggcggccttctcccgggccttgagctcgccgtcggtcaggcgaccggcggccgaagtcgttgctgcactcatcacatacgctccttcacgatcatcatcgattcctcaacacgaacagcagtagtcgtcgtcacttcatctgctccttgaggctgttgagctggacgatgtaggcgatggccatggtgatcacggccatcacgatcgccaacgcggccgcgtagttcgactggttgccggagaagctcaggttgtacgcgtacatgttcggcgtgtaatacgtcgtgatcgcattaccaggaaccatgttctgcaaaatgctcggctcgttgaacagctggaacgagccgatgatgctgaagatcaccgtgatcgccaggctgccgcgcaattcgggaagcttgatgctcttcacgatctgccactccgacgcgccgtcgatgctggccgcctcgtacagggaatgcgggatggtcgacagcgagctgtagaagatgagcatgttgtagcccgtgaactcccacgtcacgatgttcccgatactggccaacaacacgctgggggcgagcacgtcgatgtccgtgcccaggaaatcgttcaacgaacccaccaggccgtacttcgcgccatacacgaaaccccagatcaacgtcgacaccaccgccggcaccgcgtagggcaggaacgtcgagatacggaagaacctcgtgccatgcagcttcatcgaatccaacgccagggccatcaaagccgacaggcacagcatgatcggcacctgcacgcacgtgaacagggccacacgaccaacactgctccagaactggccatcacccaacaggcgcgcgtagttctcgaagccgacgaacttggtgccgccgatcatctgcttcttgaagaacgaaatataaacggcgtacacgatcggcacgatgaacacgaacacgaacaccaccgcaaaaggccacatgaatttccatccacgccaatcggccttgtgcttattcacacgagccttgcccgaatgcacgggcgcagctgcgatatcggctgaagccattcccaacccctctccttcgaaggttgaccaaaatgtttgcgttatcatcataacaccatttgtaacattgtccaatcgtgttgagtaccgtgttgaattaagggtttctcagtcactctgctacaatggtcacgaagacaacgatgttatcgttaccgtaagcgtccctaagataagcgttgtaaacgaaacaccgacattaatgagtcaagcgagggtgaaatgtcgagaccaacacaggtgtccatgcaagacatagcgaaagccgccggcgtttcgccacagacagtgtcccgcgtggcgaatggcagcgatgcggtgaaacccgaaacacgccagcgtgtcgaagctgcaatgaaacgccttgggtatcgtccgaattatgcggcccgagccctaaagcacggccgcttccaggatatcggcgtggtgatgttcaacaccaccgcgttcggcaacgcccgcatccttgattctattgtggccaacgcggccgatgacgattattcagtcaccatccagaccatgcgccacggtgcggaacgcacgctttccgccgccatcgatcgcatgcagcgtcagccggtggatggtgtcatcgtagtgctggaggaacgcatctccgatttcgtcggatacaagcctccgcgagaacttccagtcgtgctcatctgcgaatccgccgccgaccactgccccaccgttgacgccgaccagtatggctgctcgaccgctatcgtcgattacctgatgagcaaggggcacaagaccgtctaccacattgccggaccgtccacctcgcgcgccgccgaaagccgcgcccgcggttggcgagaagcgctggaacaaatgggagcacgcgtaccgagcatgtacatcggcgattggtgcgcggattcaggctaccaggccggcgtggcgttggcccacgaccccgactgcacggccatctacgccgccaacgaccaaatggcatacggcgcaatgctcgggttgcagtcagcgggcaagcgcgtgcccgaggatgtcagcatcgtgggcgtcgatgattcgctggcagatatggttccgcgcttgaacctgacgaccatgaagctgcgctttgacgacattggcgccaccgccttctccatggtccgccgtcaatgcgaaggcgagaagataccggtcggcgtcaaaaccgtaatcccgccggaactgatcgaacgcggttccgtgcgcgacatcagctgacgagcggcatgtgctggcatccactggtacctgtcagtgattcacctgccagtgatccataggcaattccgcaccgaccaatcgactcggttgtgcaatattctgcacatttccaactatgtgcagaatattgcacactttactatactgtgatatattttgcacatgattgtcatggatatcgccgaatacgcgcggcttatcaaggatgaaaggcaacgccagggcatcagtcagaccgacatggcccaacggctgggcgtgtcacgtcgctggctgatcgaatttgaacacgcccgagtccccaatcccggattctccaccattctcagcgctctgactgagcttggcttgtcgctggatgtctgcaaaaccccgcagcccgccgaactctatgaatggtgacaccatgagcgaaaacactctcaatgcatttctcggcgaaacacccatcggccagtttcgaagaacaaacgatggcagcattattttccaatatcacgattcctatcgttggtcgcaatcacccacaccaatatcgctttccatgcccattaccgcagccgaatattcaggcgacatcccgcgtaatttccttgaggccctggtcccggaatcccctcaggcccgagatgaagccatgcgattgcatcatgcccgatcgacaagcgcatttgatctgttgcaagccatcggattcgatgccaccggcgcattacggctgtccgccgacccgcacttgcccatagatgacgattcgcttattccaatcagcgattcgcagatcgcgaatcgactacgcgcagccgcccccacaggcatccagtccgcaagcgtagacgagcattggtcggtcgcgggacagcagggcaagatcgcactgaggaaccgcaatggatcatggttctccaccactggaatcgcgcggacgactcatatcatcaagcccggcataccgacccttccacaccaagcattcaacgaacacatcaccatgcgcattgtggaggcgatgggaatacccgtggcccacacctcttttcacatctttgatggggtcccagccatcatcagcgagcggtatgaccgtatagtgtccgccaatggtacggtgacggccctgcaccaagaagactttacccaagcgctgggcattccctcatcgctgaaatacgaggaacacaacggcccaacgtccaatgcatatgcggaaatgttgcgcaagcacggtctgcccgatcaggccgaaagcaatatccgagccttcaccgacggcatcctcgccagttatctcgtcggggcaacagacagccacgccaagaactactcgctattgctcgatggcgcgtccgtgcggcttgccccgctctatgaccttgcttcggtgttcccttatttggggcatggcaagcagatcataaatgccactttggcgatgaacatcggcggacgccgagatcttcttcaattacgccgcaaacatctggaacgattcgcacagcggatgggattagatgaggaatccgtgattttacgattccacaccttggtggataggctgccggaggcattcgacagcaccgtgcaacccgctcacgacgttatcgcgagcattggtgcgcaggaattcatcgatagctatcgcaagcgcatcatgatggtgtacgacgatgcaatgagctggatggccagtcgaaagggacagtgattcggacgggcggggattggtctcgccatcccccctaagaaatcagatcttaagcggcacacgggaaacgaattcgcgcttctcgcctgttattggatcggtgaatcgtagcacacgcgccactaattgcagcggctggctgaaatcgtcgtaggggcgtgtctggatgcgcgggtagaagtcgtcgcccacgatgggcaggccgagcgaattcatgtggacgcgcaattggtgggttttgccggtgcgcgggtggagtgtgtagcggcagatggggtgatttcccggatggggaccaccctccggcgcttcgcgccacctcccgccagcgggagggaaacagaggtcaccgcgctcgatgagggtttcggcgttggccaaacccggttcctcgaatgcggccatcgtgccgtgttccttggtgatgtgcgatcggcgcagcaatgggaacgggcgtggcggttcgacctgcatgatcgtgccgaatcgtgggccgctgatcggccggcagggtgccaggcattcatagatcttgacggcctgccggttctggaacagcatctgatacgcgccgcggcaggccgaatcccgcacgaacaccaatacgccggcggtcatgcggtccaatcggtgcgctggcgtgatgtccggctcccccagccgctcacgcaatcggatcagcgcggtctgccgataccacatgccgcgtggcatggtggccagaaaatgcggcttgtccaccacgatgatccgctcgtcctcatacagcacgtccatctcaaacggaatatgaggctcgtcaatcacataccgatgtggcttactcaacggtcacggacttggcgaggttgcggggcttgtccacgtcgtagcccttgagctttgccatgtccatggcgaacagctgcagcggcaccacgtcaaccagcgggctcatcagcgttgggcaggcggggcgccagaacaccacgtcagcgtaccgttccacatccgggtcgccctgctcggccacggcgatgatgtacgcgccacgagccttgacctcctcgataccagagatcaccttggcgtgcaacacattgcggccgcgctgcggcggcacgatgaacaccacgggctcaccctcgtccaccagcgcgatcggtccatgcttgagctcgccggccgcgaagccctcggtgaacgtgtaggcgatttccttgagcttcaacgcgccctcaagcgccaccgggtagcccacgtggcggccgaggaacaagaaggagttggcgttcaccatgcgctcggcggccgcctggatggtcttgggctgggtgtcgagcacccactgaatcttgcgcggcatgtctttcagggagtcgagcatctgatgaatctcatcgcggaacatcgcgcccttgacctgcgccagatacaggcccagcaggtaggcggcggtaatctgcgccacgaacgccttggtggatgccacggcaacttccgggccggcgtgtgtgtagagcacggcgtcggattcgcgcggaatggaggcaccctgcgtgttgcagatggccagcaccttggacccctgttcgcgcgcgtggcgcagggccatcagcgtatccatggtttcgccggactgagaaatggccaccacgagcgtacgcggggtcagaatcgggtcacggtaacggaattcgtgcgcgagttcgatttccacggggatacgcacccagtgttcgatggcgtatttggctacctggccggcgtagctggcggtgccacaggccacgacgatgattttgtcgatggccttgaagtcgtgttcgtcgatacgcacttcatcaagggtgatgtcgccattcgtgtcgaagcggccaagcagggtgcgctgcactgcggcagggtcttcgtgaatctccttgtccataaaggaatcccagccgcccttttcggcggccgaagcatcccaatccacggtgtaggtcttcgggttttcgaccacgttgccgttgaaatcggcgacgatgaccttgtcggcggacacgcatacggcctgatcctggtcgacttccatggcgcgcttggtgtaggccacgaatgcggcgacgtcggaaccgaggaagttctccccctcgccaaggcccacgaccagtggcgaatcatggcgggctccgaccacgatgtccggctggcggcagtcggtggccagaatggtgaacgcgccttcaagcatgcgggccatacggcgcacagccttgaacaagtctggcttgccttcgtccgcgataatcttgtccacgatcttgccgagcagcttagcggccacctcagtgtcggtggcggaggcgaatcggtagccttcggcttgcaggtcgaaacgcagctgagaggcgttttcgatgatgccgttatggatgatggccaccttgccgtccatgctggtgtgcgggtgggcattcacgtcgctcggctcgccattggtggcccagcgcgtgtggccgatgcccaccgtggcgagcggcatcggcttgcgctcgatgtcttcgaccaggttcttcaaacggccggccttcttgcgcacgaccaccttatccatgccgggcgcggtcagcgccacaccggccgagtcatagcctcggtattccagacgttccaggccttgcaggcagacctccaaaggcttgccgcatgccgtttcaatatttcccgcgtatccaacgattccacacatggctcaccagcctagcggacgattattgcgcaaagcgaatccaacccgccgcctttgcaggattggaacatgccccttcgtgaaaagcgtacgctgagttcatcagcgtacgcttttggagctgcaacaacgagccttcctacagcacgtgctgtaggcggagccgtaaagcggggagcccagtgggctccccgtaggcgacgccgaagcacgacagtgctgaggtaatataacagccttcctacagcacatgctgtaggaagtccttaaacctaggctcggtggggtggtcgatgatgtcggggccgcccttttctacgactacgccgccgtccatgaacacgatctggtcggcgacttcgcgggcgaagccgatttcgtgggtcacgcacaccatggtcatgccttccttggccaaggaacgcatgacgttgagcacttcgcccaccagttcggggtcaagggcggaggtcggctcatcgaagagcatgatctccggcttcatggccagagcacgggcaatggccacgcgctgctgctgaccacccgacagctgggaggggtaatagtccatgcgatcgcccagaccgacgcgctgaagctcggccacggccaggtcacaggcggctttcttggactggtgctgcacgtggatcggggcttccatcacgttctccagcgcggtcatgtgtgggaacaggttgaagcgctggaacaccatgccgaggcgagagcgctgtgcggcgatctccttatcgtccaaggtctgtagcatgtcctggccgtttttggtcacgtgcttgtagccgatgagttcgccgtacacctcgatggaaccgccggtcagggtttccagctggttgatcagacgcaggaacgtggacttgccggaaccggagggccccagaatcacggtcacagtaccgggcataacggttagatcgatgcccttgagcacatgcagcggcccaaacgccttgtgcacctgcacggcctcgacggcaggaatcacggaaccgtcagccgccttgcgcacgaccggagcggagttggtgatgtcattcgtagtcataatcgcgctcccgccttatgcattcaatccgacaaatgtggtctggttgagcttgtccacgtcatccttcggttcaccgtcggtcttacccggcaatggcgtctgcttgcccttggtgcccaccggtcgggcatcgaagcccctgccgaagtgcgcctcgaggcgggactgcacaaccatcagaatggaggtgatcagcaggtaccagaagcaggccacgagaagcagcggaatcggcttgtagatacggttggcgatggcgttggtggcgaactgcagttcgagagtgaacggcacggcggtgaccagcgaggtggtcttcagcatgccgatggtctcgttgccggtgggcgggatgatgatgcgcatggcctgcggcagcacgatgcggcgcatgatgagcgtgcggttcatgcccagcgccttggccgcctcggtctggccggggtccacggcttcaaggccggcacgcacgatttcggacaggtaggcggcctcgttcagggccagaccaatccatgcggcgttgaatgcggtgaccaccacgttggagtcgatgctccagaactccaccgaggtgaacggaatgccgaggctgatcttaggaatcagcacggcgaacagaccccagaaaatgagctgcgtgtacacaggcgtgccgcggaagaaccagatgaagaaccagctgacgccgcgcagcaccggattgatggatttgcgcatgatggcaagaatcaccgacaggatgatcgccacgaccatggagatcacggtaagctccaaggtatagcgaatgccttcaagcacgttctcgttgaacaggtacttccagacggtgggccaatccagtcgcggattggtaatcaagccttgaatgagcatcgcggcgagcagtaccacgatcactgcggccacaatcgggccggggcgcttgaccggcaacgccttgatgcggttggggatgttcagcccctcaccgtcgacttctttcttcgccataatctggttccttggatgtgttaggcagcctgaactgcaagttgcaactagcgttgaaccttagtgcacgaatggggcgactgtgttacaaacagtgcgccccattcgaattttcgcgacagcttgtcgactattcgacggccgggttgatttcggccttgtccagtgcgccggattcgacgccccagtgctggagaatcttagtgtaggtgccgtcgtccatgagcttttgcatggccttctgcacggcttcggcggtctgggaatcgcccttcttgatggcgatggcgttcggcacttcatcgaagtccttgccgagctgttccagctgaccatcggtctgggcgatggcgtagccgacaaccggggaatcggcgaagaagacgtcggccttgccggtcaccacagcggtggtggcgtcggtctgctgcttggaggactggatggtgatgtctttcttgccgtccgccttgcactgcttggcggtcttgttgatggcctcttcctcgacggtgccggtctcgacggcgacgttcagaccgcacaggtcatccgggttcacgttcttggggttgcctttggccaccgcgtagcccataccggcggtgaagtaggagacgaagtccacggactgcatacgttccttggtgatggtgaacgcggcgatgcccagatcgtacttggagccgatggccggaatgatcgtatcgaagttggaggagacgatttcggtctcgagaccgaagatgttgcccatggcgcgggcgagatccatgtcgtagccgatctgggtcttgccgtcggcgtcgaggaattcggccggggcgtaggaggggttggtgccgatggtgagcttgccgtccttggtcacggattcaggcagcagtgcggcgatggtgtcatccttctccacggagctgacatcgtagctggtgatggtggcggcatcggagcccttggcggaatccgtaccggcatcggccttgtcggaggtgccgcaagcggcggtggcgaacagcatggccgagctcagtgcaatggccataatggacttcagtttggtggactgcataatcgtttcttcttctctcttacgccgcttcaacggcaacgatcaacggttaagcatatttatacactacagtgcatacatatacaaaaagactcccgccgcagggcaacgggagtcttcatagtaaccgaaactactcgacggacgggttgatctcggccttgtcgacggcgccggaagagacgccccacgtgtcgaggatcttcttgtacgtgccatcatccatcagcttctggatggccttctgtacggcctcggcggtcttggaatcgcccttcttgacggccacggcctcaggggtcacaccaacgtcctcgccgagggcctcgagcgtatcaccggtctgcttgatggcgtagccggcaaccggcgtatcggcgtagaagatatcagccttaccggaagccacggcggtagtcacatcggtctgcagcttggaggactggatgtcgatggcatccttaccgtccgccttgcactgctcgttatccttgttgacttcctcttcctgggtggtaccggtctgcacagccaccttcacgccgcacaggttcgaggagtcgaccttgttcgggttgcccttctgcaccacgaacgtggaaccggccttgaagtaggtcacgaagtccacagcctccatgcgttccttggtcacggtgaaggaggagatgccgatgtcgtacttggagccgacggacgggataatcgaatcgaacgtggaggagacggtgttttccttcagtccgaacactgcggccagcgccttggacaggtcgacatcaaagccgaccggggtcttgccgtcctcggccaggaactcggccggggcataggaagtatcggcgccgacggtcagcgtgccgtcgccggccacggaatcgggcagcagtgcggcaatctcgtcgtccttctggatgctgctggtgtcgaagccttgaatcgaagtgctggacgagtccttggatgaatcgccgctcttggatgcggtgtcggtgccgtcagtcgtgccacaggccgccacggcgatcagcatggccgcgctcagggcggcggccgcagcggattgtattcccttgcttagagacattggatttcctctctccggatagtcagctgggcgggtatgtttcccagatggttccagagcgtaggagtgcaatgctacggaagcgttaatcgtgggcgaaatgacccacaacgcggacatcctacccttggctcccctccggaggggagccaagggacgggactagtggcgcatgttggcgtagcgcatggcgcgtagggcttcgcgcttgtcctgctcttcgcgcagggcctggcgcttgtcgaattccttcttgcctcgggccagtgcgatctccgccttgacgcgaccgtccttgaagtacaggctcagcggcacaatcgtgtatcccttggcctcgatgccgcgggcgagcttggtgatctgcagtcggtgcagcagcagcttgcgcttgcgcttgggcgcatggttgttccatgtgccgttcaggtattcggggatgttcgcgccctccagccacatctcgccacggcggtcgatggagatgaacgcctcggacagcgatgcgcggccttcgcgcaacgacttgacctcggtgccggtcagggccagccctgcctcgtacttgtcttcgatggcatagtcatgccgggccttcttgttctggacgatgagtttctcaccggtttccttgggcatgtctcctcctttcgtgggcaataactcgtgagtagcaactcgtgggtagcaacgcaacatccgacgatatcacggaccggcctcgaatacgaaaagggttcctcttcaagaggaacccttcaaccgcatatatcggccgaaccaaccggtcagtggacgaaccagtactgacccaaattggtcaaggtgcggtcgtgcatgttccacggaccaccccagttcatttcggagatctggaatgtgccgtcgccatacacggcttcgactacggcaacatggccataggtaccgtcggcaccatcctgaccaggcaggaaggagagcgccgcaccgacctgagggttgtggtccacgcgcaagccgtacgagggggcgttgcgccaccagtcgccgccattgccgagataggacggcgtgccaatgcccatctgcttacggcgttcatacgcccaatacgtgcac

SEQ ID NO: 2007 - DNA, 12315 bp, Unknown
  R17_18m  MAG No. k141_28856
agcacttccaactgctgcagaccggatggcacgctgcgccatttgcattcgcagaataggagagttttcggtttttctcctgaagccacgatgtcaatttcctcctgactgcgggtggtcggattggcgccccaccaacgtccggcatcaagcatgaggaaaggcaatgcctcggtaccgttatgggaccatatccactgaacacagatgtcttcgaacacctgccccataaagtcggagatagtgcgcataacacggtcggcggcgagatcggcatgaccggattgaatgagggacatgttgttcggcacatatcggtaccagaatcggaagaacgagtcctcgatacggtagatcgtcttgcgaggagcgtcctcgccgaaaggtgtctccttgcgaacgattcccagatcgatgagattgcgcaaataggtggcgcatgaggacgattccatatggcatgcggtggcgatggtgttcgaccgagatgccccggaggcaatggcctggattacggcgttgtactcggccggactgcgcagctcctgcttcagcaagttgtctggctcctcaaacagatagcagcttgggtcgaggatgttccaacggatgttgtctcggatgctgatgccgtcgtccagttgccgaagatactgcgggataccgtcggtaagtccgtaagcagtggcggcgtcctcgttgctgtatcttggcaagaacttgcggacatcggcgtagccgaatggctccactttgatttgagcggtgcgtctgccgtacagggggctctcatacccaagcacctggcgctccatgaacgacatggaagagccgcataacaccatcatgagctggctgtcatccttatggcggtcgatggcatgctgcaggaccgaattgatggtccggtctgctttagccagatatgggtactcgtcgatgacgaaggcgatgcgttgctttgcggccagcgcgaacaccgcttccagtgcggattcaaagctgcggtatacgggcgttgtctcgaacgcctctgagcccttttcatacagagcaatgctgcggcttaacgattcgagattcttggaagcgctggattcgattgccgaaaagaaaatcgtggggcgatcttcgaggaagcggttgatgagtgtggtcttgcccacgcggcgacggccgtagaccacgacgcactcgaactgctgtgagctccagcggcgttccagtgccgaaagctccttatctcgcccgacgaacatggcccttgtctccttgctttgctgtctgccctggcgcacacgcgcaaattatagaatcgtaatttacttaattatgattctataatttggtcgactggtatgcaacaggtctcgagcgtgcattgccgcatgcgcaacgtttcgcgcgacacattccggggaatgtgtcgcgaattgggcccgtttgggggcgcagcgacacattccggggaatgttgcgcttagcgggtcgtgccgcgttgctaatgcggggaacacgcagggttgtaggctgttgcgattggacgcaggccgtctagactagtacgcgtttgcgaaagtcgaacgtgcttcgaccggtgaaggagagctccggtcgtgcggccaatgacaggcgcagtgcgaagcacggctgatcgtgaatcgtggcggcagcgattgccgcgtgcggcgcaggagcatgccgcaccataccataagcaaacaatccccaagaaacggtgatctcctcacatgtacgtcgatccgggaatcgataccagcgcaagcaatctcaaatgggtgctgccatactgcaaaccagacctgccccgcgtggtaggcgcgctcctactgttcatcgccaacaacacgatggccctgaccattccgattctgtccggtatcatcgtggaccgcgtcatcgtcggcggacatgccgacgaactgccacgtctgtgtggactgatgatcctcatgaccatcatccgcgtgggcgcgcgatacggctaccagatgtggatggagcgtttcggccagaactcggtctaccgcctcgtctccgacgaatacgagaagctgcacgagctcgacttcacgtacttcaaccacacacgcaccggcgacatcatgagccgcctgacctccgacactgacgcgatccgccactgcctgagttgggtgagctatcagatcgccgactgcgtggtcatgttcatcggtgccctgtgtgtgatgttcgccatcgattggcgactcgcgctcgtcctggcctgcgtcacgccgttcatttttgtgctcacgcgcggcctgtccacgcacgcccacccgctgttcttcgccatccgcaactcgctggcctccctcaactccatggtcgaagagaacatcgagggcaaccgtgtggtcaaggcattcgtgcgcgaaccgtacgagaccgaaaagttcgacgagcacaacgacgactacatgcagcgcaacatggccctggcctacaactcgcgcaagtacatgccttggctggacggcctcggcttctcgctgcagctcatcacgctcggcctcggcggctttctggtcatcaagggctacatgaccctcggcaatctggtgagtttcaactccttcctgtggatgatcgacggcccggtgcgccagtccggctggttgatcaacgactggcagcgattcaacgccagctgcatcaagattcgtaagctgctcaccgaacagccgcgcatcgtggagaagcccgacgcggccgaagccgtcaagcaggcggtcacgatcgtcgagcaggtcaagcgcgatgatgaggctaccggagcgcccggggcttccggaacatccggtgcccagcagtccgccgaacgcaagtcctgcccgctgcacatcaagggcgacatccgcttcgaccacgtcagcttcgccttcccggacgacccggagaccccgatcctcaaggacctcgacttcaccgtgcccgccggctccaagctcggcatcctcggcgaaaccggcgcgggcaagtccacgctcgtcagccttatctcccgcttctacgacccgaccgtgggccatgtgctcatcgacggcatcgacgcacgcgactggccgctgaccaccttgcgctcgcaggtgtgcatcgtggcgcaggatacgttcctgttctccgacaccatcggcggcaacatcggttttggtgccagcgatgatagcgacgaccgatatatccagaaaatggcccagatcgccggcgcggacaatttcatcaggtcgatgccgcagggttatgacaccgtcgtgggcgaacgcggcgtgggcctgtccggcgggcagaagcagcgcctgtcgctggcccgcgcgctcgcggacaatccgtcgatcctgattatggacgatacgacctcggccgtcgatatggagaccgaggcggagatccagaagcacctcaaggagatggacggcggcaagaccatcgtcgccatcgcccaccgcatctcgtcggtcaaggattccgacctgattctggtgctcgagcacggacgtatcgtcgaacgcggcacgcacgccgaactcgtggccgcacacggccgctactgggacatctaccacaagcagctcggactccagtccggcgccgcacaggggttttagaagaggacttatggcacaacgcaatacattccgcgaggatgaggagctggaggagtccatcaacctccacgacatcgctcgcgtcggcaaatatctcaaaccgtatatggcacaggtggcgcgcattctcgtcgtcgtcatctcgatgagctgcatcgtcgtcgccgtgccgtacctgaccaagatcatgatcgacgaggcgatcccgaacaaggacctcggcaagctcggcatcctcgccgtgatcctcgccgcgctgatcgtgctgtacgagttcgggctgcgctaccgcacggtggcgatcacgcgcgtcggccagctcatgctcaaggatatgcgccgcgatatcttcacgcatatccagacgctgcccttcagctacttcgattcgcgcccgcacggcaagatcctgatccgcgtggtcaactacgtgaacacgctttcggacacgctgagctccggtctgatcaacgtgatctccgacgtgttcaccttcgtgatcacgctgatcgtgatgttcgtgatcgactggcagctggccctgtggagcctgatcctgttcccggtgctcatcatctgggtgcgcgtgctgcagatcttccagcggcgcgcctaccagaagctctccaacaagcagagcaacctgaatgcctacatccacgagtcgatcgccggagtgaagaccacgcagaccttcgcgcaggagcaggcccagttcaggaccttccaggagcagcagggcgaggtgcgttccgcgtggatgcacgccgtgcacatccagttcctcatgtggccgggcgtgcagaccatctccgtgatgaccatctcgttcatctacttcgtcggcgtgatgggcttcgggggcgtgaacgtgaccaccggcgtgctcatcgcgttcgtcggctacgcgaacaacttctggaatccggtgatcaacatcggtaacttctacaaccagctcatcacctgctcggcgtacctcgagcgcatcttcgagacgctcgacgtcacgccggagatccgcaacaagcccgacgcggcggacctgccgcagatccgcgggcgcgtcgacttcaacgacgtggtgttccgctacgagaaggacggccgtaacatcctcaacctcgtggacttccacgtcgaaccggggcgcacgatcgcgctggtcggcccgacgggcgccggcaagacgacgatcatcaacctgctgtcgcgcttctacgacgtgtccgagggctcggtgacgatcgacggccacgacgtgcgcgacgtgacgctcgcatcgctgcgccggcagatgggcgtgatgctgcaggacaccttcatcttctccggcaacgtgcgcgagaacatccgctacggcaagctcgacgccaccgacgaggaaatcgaggcggcggcgaaggccgtgcacgcgcacgagttcatcatggaactgcccgacgggtacgacacggtggtggaggagcgcggatcgactctgtcggccggccagcgccagctcatcgccttcgcgcgcgtgctgctcgccgacccgcgtatcctgatcctggacgaggcgacgagcaacatcgacacgcgcaccgaggaggcgctgcaggccggcctgcagcatctgctcaaggggcgcacgagcttcatcatcgcgcaccgtctgtcgacgatcgagaacgcggatgagatcttctacatcgatcacggccagatcgtcgagcacggctcgcacgcgcagctgctcgccgccaagggcgcgtactaccgcctctacgagtcccagtacgcgatgattcgcgtggccagcggagcgccggaagagtgacgagatgttgcgcacaaggatgcgtttagcggcgtttcacatagcgggtgttgcgaccggcaccgattttgatgatcgtaccggagtccaacagtgatttcagcgtgcgctcaatggtggtggtgctggtatcgggcatgcgagcgagaatatcggccttggagagtggaactagggatcgatcaagcagtgcttcaatccgtgttcccttggtggctactcgcggtgctccctgcgttctgccgcctgccgtgagattgatgcgttcgtcgaattccttgcacgcggacagtatgatgccaagcaggtagttcgtgaatggcgcataatcattggcgttgtcgtcccatccttgggtgcttgcggccagcgcctcataataagtgcttttactttgctcgataaggtgttcgatactgatgtatttgccgaccatatagccattgcggtacagcatcaggagcgtgagtagccgactcatgcggccgttgccgtcattgaacggatgtatgcaggtgaaatcgagaatgaacatggcgatggcaagcaatggatcggtatgtccatctcggattgcttgcgtgtaggcggaacacgcgcgttcgatcagtattcgatgtagtcgaatgatctcatactgcctcattttctgtatcatacgaacttttctgcatcatattttatcaaaatgaggtagaaaatgggctgatgaggcagaaaaggcggcaggatggcggccatctcgcttgccggttgcgctactttcccgggaatgttgcgctcgtggcaagagacggcaagttcaggcggccgagattggcgatacccgtcgtgtagtcgaacgtcttaccggactgccttacgagcgttgctgacggtagcctacactgagaaacagcctacactgagaaaccatgagcaagcaccaccatcgcgaccgtagctgggccccggcacctgaagcattgccggacgatgcccagaccatcgacaaccacactcacgtggcctccgtaatccctttcgcgcgcgctatgagccatgaggcgcaggagaaggggcagcccgaagtcccggtgtacgacgtcgaccaattgctggcgcaggcgcaatctgtcggcattgggggtatcatcgactgcggttgcgagctgccgcacctgatgaccgccgtccagatggccctcgatcatccaggtaacgtgcacgcggcgctcgcaatacaccccaatgagtccgtgctccacgggcatcgcggtgtgccggggccggatggtctgcccctcaaatacaagccttaccatgacacgtctttcgaggacgcgctcgccgaagtacatcgcctcgccaccacataccccgagcaagtggtggctatcggcgagaccggcatggacctcttccgcaccggcgaaggtgccaaggaactgcagcgcgaggctttccgcgcgcatattgccctggccaaggaactgggcctgcccatgcagattcacgaccgcgactcccatcgcgaggtcatcgaaaccctgctggccgacggcgcgcccgaacgcaccgtattccactcgtattccggcgaccgtgagatggccgagattgcgcgcgaacatggctggtatctgagcttctccggcaccgtgagctacaagggcaatgacggtatccgcgaatcgctacggattgtgggtctgggccatgcgatggtcgaaaccgacgcgccgtatctgacgcccatgccgtaccgtggccgcaccaacgcgccgtacatgatcccctacaccttgcgggccatggccgatacgctcgacctgtccatcgcggatgtggcgcgcggcacccgcgataccgcccgcgccgtatacggactgtgagggccgggtgtgcggccgtcgcggcgatgtgttgacttgtaaaatttgtcagaattgtgaacgaggtctaccatgatgtacctgacataagcgagggggatgatctccacctcaatggaggactgaacgtatggctgagtcgaaccaaaggaccgcacgcgcccaaaaagcctcaaaggcccagacagcccaggctggcgccgccaaagccaaggcccgacaggaagaagaagcactgctgagggccgacacctttaccaacgctcccaaggtgtcccgccgcactctcaccaaggaggagcgcgaggcactcgccaagcagagggaagccgaaaccaaggaagccgagaaaatcgccagcgcatggtcgaaaggcggcctcggccgatggtgggcccgcttgcaatccagcccagacaaggttacctggggcatggcgatcgtggcgctcggcgtggtgtacggcgacatcggcacctcgcccctctacaccgcgcagaccttccttgccggtcagggagggcttggcagcgtaaaccgagaggccgtgctcggcatgctgtcgctggtcttctggtcgattacgctgatcaccaccgtcaaatatgtgctcatcgccatgcgcatcgacaacaatggcgaaggcggcatcttcgcactgtactcgttgattcgcaagtacggcgcatggctcgcgattcccgccatgctcggcggcgcggcattccttgcggattcggtacttaccccggcggtttccatcagttccgcagtcgaaggcttgcagaccctgccgccattggaagggttgttcgacgaaaacccaagcctgaccctgatgattaccgtcgtgatcatcgtgattctcttctccgtgcagtcgcgcggcaccgaaagcatcggcaaagtattcggctcgatggtgctggtctggttcagcttcctcgccatcgtaggcgtcacgaatctctctaacgactggtctgtgttcgcggccctgaacccggtgtacggcatcaaattcctgttcagcccggacaatgctgccggcatcgccctgatgggcaccgtgttcctctcgaccaccggtgccgaggcgctgtactccgacatgggccacgtggggcgcggcaacatctacttcacctggccattcatcaaggttgcgctggtgctcaactacttcggccaaggcgcgtggatgttggccaatagcgataacccgcaatacaccgcgatgaagtcgctcaacccgttcttccagatgatgaccccgaacgtgcggtacctggccgtgattctgtctgtttcggccggcgtgatcgcctcccaggccctgatcacgggcgcgttcaccatggtttccgaggccacccgcctcaactggatgccccatctgcaggtgcgttacccggcccgtacgcgcggccagctgtacattccggtggtcaacggcgtgttgtgcgtggccacgctcgccgtgctcgccatcttcaaggattccgaacacatctccgccgcgtacggcctggcgttgaccattacgatgatcaccaccaccgtgttgctcggcgtctacttatggcattccggcaagcgggtcggtgccatcgtgttcaccgtgctgttcttggcgattcaggctatgttcttcatcgcgtctatggccaaattcctgcacggtggttggttcaccatgttgctgaccgccgcgattctgttcgtcatgtacacgtggaatgagggcaccaagctcgaacgtgcgcaacgccgtcacatgcggcccaacgacttcctacccgcgctcgacaagctgcacggtgatttccgcatcccgtattttgcggacaacatcgtgtacctgacctccgactcggaaaccaagcgactcgacacggacatcttcttctccatcttcgccgaccaccccaagcgtgcccgtgcttggtgggcagtcagcgtggaaaccaccgacgagccgttcacccgtgaatactcggtggaggacttcggcacgaactacatctaccgcgtgcgcttccgtttgggcttcaaggtttcgcagtccatcccggcgtacatccaccagatcatgcacgacctgtccaaaaccggcgaactgcctaagcagaagtcgatttaccccaaggtcgacgccgatccggacatcggcaccatccgttacgtgctgattcacaaggccctgatgccggaatccaaggtttccgcacgcggtgccctgtcgttgcaagccaagtacgcaatccgccgcatggccggctcgccggttaagtggttcggtctggcaccttacaacccgctggtcgaggtgcagccgctgttcgtctccacccgccgcccaccgcgtctgaagcgcaccgatacggccaagaccatcacgacgcccacgccgactcgtgcagtggccgacccggccgccgtccccgacccgatggacaccacgtccgggctcgggcgattggtacaggagctcgatgccgccgtatcggccgaggagcggaagatcgctgagaccgctgccgccgctgcggtcgctgagcagggcgataagggcaaggccaagaacggcaaacccgccgccaagcctcagcgctccgccaaacagaagcgataacataccagtttgcagcggcgctgatgcgctctataaagaatggctataacggtcgccgcacgtcgccgcacggtttcggtaagttgaaataccatgtgcagattactgggatacgcgacggcaggtttcaacctgagtctcaacgccgtgttggggcaagacaatgtcgaggatttccgtgaactgtctgaaatccacaatgatggctggggtgtagcccagctttccgatcccgccgaagcaccgcacgtgcgcgacggcggcgcacccaccccggaaaccggcacccgaatctacaagtcgaccatcgcggcccgtcatgacagcacgtttgagacgctggccgacgaaccgtctcgcggtgccatctggcacctgcgcttggcaagctccaatctgccgctcatcatggagaaccagcacccgttctatgcgaacggcctgagcttcatccacaacggcgatatctcggacgccaatggccgcaacatcgtcaccaaccgctcatacccggtgaaccacagcgtgctcctctccaccggcggccgttccgactccgctatcttcttcgcggtgattctggaatacatcggtttcggcttcccgctcgacgaggccgtggcccaggccgtgcgcgaactgcgccaagcctacccgaagtccagctacaactgcatgattcagtccgaggaccagctcatcgccctgtgcgccgccggtcgtgagaagaccagcccgcgcatcgtggaaatctacgatgagtacggccgtggcgagcaggccgccgactaccgtgtgatgcgctaccgtgagctgcgcgacgacaacggcgactccgccggtgtggtggtctcctcttccggctatgagcaggaaggctggaacgtgctggagaacgaccagatgatcatcgcctctaaccgcaacggcacctaccgtctccgttccatctgaaatagcttcataagccgtctctgacgaggggggctgtcagccgacagactgactggggggggggaggcccctagagcctcaaatcatccgcatcccatacttctccgccaacgccggaatatccggcacgccatacttggccaccagatccagccatcgttgtttgttctctccgccaaatcgctcggctcgggccgtatacgcctcgacctgcaggaacttcggcggcactgacttgctatggaacttgtcggcgtacatcaccacttcctgctcgagattcatcggcacatagtcggctggtggcaatggcagctcctggcgcaccacatcctcgcgcgtaagtcccacgccggtatggttgcggcagaactgggcgatggactcgtccacgccctcgtcgagcagatactcgtagcccttaagaccgtgcagaatgtagcgtttcttgctgaatttgagcggttcgtcgtcagagccgtcatgcttgaacacacggtaggtgccgatgtcatgcagcagtccgccgatgagtactaaatgctcgtcgagcagacgcggcggcacatggccgccggtgacgcctgcggtgggcggtacctccgcgtccttcggtaatgtgcagcggcgcgtgaacagcgcgttctgccggcgcacgatctggcagccgatggtcgctacaatcacgcaatgcgtgtgcaccagctcgtacgccgccttggacggcgcgattttgcggtgcaactcgtcgatctgctccagtgtgggaatatatccggtcatgattatcaggtttcgcctcgtacggtcagatttatcctcagattagcgcggcaatgagccgcatcaggattgtcaggagctgattcggacatctcgacatgcctatctccgtttcaaggggctgattcggcatcctcctgaggtctacttccgtttcaaggggctggtgcccaagtatacgcggcgtaaaaacggcggaatgacgttggcatgaagccgtttatactcggggtttggcggatgaccagccccttgaaacggaagtagacctcccggaacacgcaaatcagcccctcgaaatcgaaaaagctcacgatgtttggtatgtatccgaacatcgtgagcttcaggagcctgtgctggtgtgtctggtgtgtattgctgccggacagatcagatcttgaagagtgtgtcggctgcttcggcgatctcgcgtgatgcggtgagcacgataacgcaatgcttcgggtcaccggtgtgcgccagcttggccagcgcggcgaacacggtcacctcgtcatccgcgttcagccctcgtgtcggctcgtcgaggatcagcacttcggcctcggtgctgattgcacgggcgatggccac

SEQ ID NO: 2008 - DNA, 12485 bp, Unknown
  R17_18m  MAG No. k141_29280
cccgtgtggacgccgtcttcgacaagttcaagaagctcaagcccggcgacatggtcgacgatgtggacctgtggcgcgagatgcaggaccgctacggcgattacttcgacggctgcatgggcgccgaagccatcaagaagcgcctgcagtcccttgacctggagaccatctccaaggaactgcgcgaggagatcaaggacgcttccgaacagcgtaagaccaaggccctgaagcgtctcaaggtcgtcaacgccttcctgaccaccggcaacaagccggaggccatggtgctcgacgtgatcccggtcatcccgccggacctgcgcccgatggtccagctcgacggtggccgcttcgccacctccgacctcaacgacctgtaccgccgtgtgatcaaccgtaacaaccgtctgaagcgactgatcgagctcggcgcccctgaaatcatgctcaacaacgagaagcgcatgcttcaggaagccgtcgactccctgttcgacaacggccgtcgtggtcgcccggtcaccggtgcctccaaccgtccgctgaagtccctgtccgacatgctcaagggtaagcagggtcgtttccgtcagaacctgctcggtaagcgagtcgactactccggccgttccgtgatcgtggtcggcccgtccctgcgcatgcaccagtgtggtctgccgaagccgatggccctcgagctgttcaagccgttcgtcatcaagcgcctcgtggacctgaactacgcgcagaacatgaagtccgccaagcgtctcgtggaccgcggcgacgccgaagtgtggggcgtgctcgaggaggtcatctccgagcaccccgtgctgctcaaccgtgcacctacgctgcaccgtctgggtattcaggcattcgagccgatcctggtggaaggcaaggccatccatctgccgccgctggcctgcgccgccttcaacgccgacttcgatggtgaccagatggcagtccacctgccgctgtccgccgaagcccaggccgaggcccgctcgctgatgatggcttccgacaacatcctgaagccggctgacggtcacaccgtgaccatgccgagccaggacatgatcctcggtctgtactacctgtccaccgtgctggaaggcgccaagggccagggccgcgtgttctcctcgctggaagaggccgaaatggccctcgaccgccacgagatcgacatgcaggccaaggtgctcatccgcctgcccgagagcttcgtactgccgaagaactgggagcccggcgaggtcaaggtgctcgacccgcgcgaaggtgaggacgaggtcgtcaaggaagagcgcttccacgacggcaccgtgctgttcgccacctcctacggccgcatcctgttcaacgagaccctgccgaccgactacccgttcgtcaacgagcaggtggccaagggccgtctgtccaagatcgtcgacgacatcgccatgcgttactccacccagcaggtggccgccacgctggatgccctgaaggatcttggcttcacccgcgcaccgtggtccggtgtgtccttcgcgttctccgacgtgaacgagccgcccgagcgcgacgagaagatcgccgagtacgaggccaaggccgacaaggtcaacgccaactacgagatgggtctgttgaccgaggaagctcgccgtcaggaactcatcgacctgtggaccgagtgcaccgccgaggtgtccaaggaagtcgaggagaagttcgacccgacctccaacctggccatcatcgtgcagtccggtgcacgaggcaacatgatgcagatcaaccagatcgcaggtatgcgaggcctcgtggctaacccgaagggtgagatcattcctcgtcctgtgaagtccaactaccgcgacggcctgtccgtgctggagtacttcatctcccagcacggtgcccgcaagggtctggccgataccgcactgcgtaccgcagaatccggttacctgacccgtcgtctggtcgacgtctcccaggatgtcatcgtgcgcgaagaggactgcggcaccaaggccggtctgcccatccgtgtcgccgagcgcgacaacgacggcaacctggtgctcgtcaaggccgccgacggtggcccgtactcccgtctgctcgccgccgacgtcatcgacccggccgacggacagaccgtgctgtacaagcgcgacgacgccctgtccatggacgtgctcaacgacctcgtggcccacggtgtcgaggaagtcaagtgccgttccgtgctgacctgcgagtccaagcgcggcgtgtgcgccaagtgctacggctggtccctggccaccaacaagctggtcgatgtcggcgagaccgtcggtatcgtcgccgcccagtccatcggtgagcctggtacccagctgacgctgcgttccttccactccggtggtgtggccgcggcatccgatatcacccagggtcttccccgtgtcaccgagcttttcgaggcccgcaccccgaagggtgaggccccgatcaccgagttcgccggcagcatcaagatcgtggagaacgatcgcggtcgccagatcatcctgaccccggacgccgattccggcgcgccgaaggaagacggcgtgatcaagccgatcacctaccaggtctccaagcgcgtgccgctcaaagttgccgacggcgaccacatcaaggttggcacccagctggtcgaaggttccgtggatcccaagaagatcctcaccatcctcggcaagcgcgccgcccaggtcaacatcgtggaggaggtgcacaccgtgtaccgctcccagggtgtggatatccacgacaagcacatcgaggtcatcgtgcaccagatgacccgccgcgtgaccatcatcgactccggcgacaccgacctgctgccgggtgagctggtggacaatgcccgcttccgcgagatcaaccgcaacatcgtcaagaacggtggccgtccggccgtcggtcgtccggcgcttatgggcatcaccaaggcgtcgctggccaccgactcctggctgtccgccgcatccttccaggagaccacccgcgtgctcaccgaagccgccctctccgagaaggtcgacgacctcaagggcctcaaggagaacgtcatcatcggtaagctcatcccggccggtacgggcctcgcccgctaccgcaacgccgtggtcgagcccgacaaggccatccgcgacaccatctacccgaacttcggtctgggcggcgatggcgatctcggcgacgcgaccttctccgacgccgacctgtccgacctgaacttctcgaatctcgagttcggcgatctgaagctcggcgacgacttcaacccggatgatttctactccgatcagggcggtcagcctgacatcgaggagtaaccctcctcacccccgataagatggcccggaactcgtgtggttccgggccatctcgcattttcagacagcagtattgttcttgtcgatttacgggggtaacgtggcaacttaggagtgtgggtaccgctcccagtggtttgtggctcggtacgtgcacggaagtcgtaagagaagagacaagtgttggagggccacctatggtggggttaaacacattggtcggcaagcggtacaagatccttgcccagatcggcaagggtggtatgtccaccgtctatctggcaatggattcctcgctgaacaagcaatgggccatcaaggaaattcgcagtgcctctgatccggtgcagcgcgacttggtcattaagagcctgaccgtcgaagccaatatgattaagcgcttcgatcacccggcgattccgcgtatcgtcgacctgatcgaagaaaagggcagcctgttcgtcgttatggattacgtcgaaggccagaccttggcgagcctgctcaagaaggaaggcccgcagtccgaagaagacgtggtcgattggggcatccagctgtgcgatgtgctcgactatctgcaccgccgcaagcatccggtgatcttccgcgatatgaagccctcgaatgtgatgctgacccctgagggcgcaatcaagcttatcgacttcggcattgcactggagaccggcaaggatgcggacagcaagccgctggtcggtgacgaccgccagctcggtacgccgggcttcggcgctcccgaacagttcgccgataacggcaccgtggacgcacgtaccgatatctacgcgctcggtgccaccctgttctacctgctgactggctcacacccgcgcaagaacggcattgtgccgattcgtgagatcaacccggagctttcgcagggcttggaactggtgattgccaaggccaccagcaagaatccggacgatcgcttccagacctgcgccgacttcgcgtatgcgctgaaacactacaagcaggaagacgccgcataccgcaaggcgctgaattccaagtggtggggcttcctcggcacggcgatcgcctccgtggtctgcctggccctcgccggcggcagcctggtgctagccaaccacgcgcagaacaccgattacgactactggatgaaccaggcggcgcagaccaccgacgcatccgccgcagaagccgcctacgtgcgcgcagtggaaatcaagaccaatgccattgaaccgtacgagcagctgatcaagcgttacaccgctgacagtgatttcagcgacgacgaagagcagatctacaacacgctgatcaaccagcacgccgactcgttgcgcaaggactccaccaagtgggccgagctgagcttcgacaccggccgcatgtattggtactactactccggctccaagatggccggccaaagcgcgtccgccgccaacaccgatccacagcgatacgcccgcatccgcgccgcttcgcagtggatgcacaacgcggcacaagagagtagcttcagcaacgtcaagctcgccaagatctacgccgacatcgccgacttcaacacggagatcgtgccgctgatcaacgaaggatccgattcaggcaagtacaagccgtacttcagcaagctgaacgaactggtgaagtccgccgctcaggaagataacggtgtgatcagcctcgaatccgcgaacctgaccttggacgcgttgcgcgtgtacccgcgcaagttccgcgcggacggcatcacgcaacagcagatgagcgatttggccgatgccgccgcatcgcttgccgacaagaccgaaaccaccaccgatgagctggatgccagcaagaaagccgcgcaacaggccgaaaagcccaccaaggacgccatcgccaacgctttcgttgatatcaagggggacgccaagtgaacgccgatatctataggactctggcagtcgtattcctggctttggccgtgattcttgcggtcgtggccgtagtgctgttccgcaagttcaacattcccgccgtgcgtgacgccctgaccggcaagcgcgcggaacgtgagatcgccgaactgcgtggagtgcgcgccggttcgtgggccaacgccgagaatctgggcgaaggctcgcgccgcaagcgcaagaagggtgccctttccgataccaccaccggtacgcatgacaccagcgacatcgaattccgcccggtgaccggtaccggttccggctctctgggttccgccagcaccaagggtggcattactcgccccggcgaagacaagccgtccgcagtgcccggtgccaagcaaaaggcttccgccgctccggccgtggtggacgaggaagacgaaagcacccgtctgggtaccaaggccgcactcgaatctgtggttgagattccggtgtccatggcttccgccgccgaattggcggacgagggcgagacctcgctgatgcaattccgcaagacgaatgaagcatcgtccgacgacgatgaatcccgtaccatcctggttcgtggagggaagaacaagtaatgagcttcgtaactaattccagtttctggcgcaagtcgttgatcggtgcggccgtggctgtggcggctcttgccatgggtgctaccgccgtggtagccagcgccgattcgacttccgacctcaagcccgagcagaccaccggctccgtggtgtccgcacgctccttcaaggccgtcaaggcacagccggctgccgccactacgccgaagatggatctggcttggtatgccgccgataaggacggcaaggtggccgataatgcccagccgctgaccgatggccgcaccaatgcctcgaatgttcgtctgggcgtgacgattactgggtttgatggtttccccgcgggccaatttgaccgtaacggacaatacgtaggtgcggataaagacaaggttgcctttaccgtgaccgtgggcaacttgggcgtcaaggaagtcaagtatggcgacttccaccgtacaggcaatgtgcaggacggctacacctacaccgttgagccgaatgatggtccggcgttcgctctgagcggtgatccggttacgctcgatgtgacggttgccgcgccggctgatcctacagcggcagatgccgccattgacctgaatcagttcaaggatggcgacggcacgagcaccatcacggctcctcaattgtcttatgacagcaccaagcccgccgccgtggatacggcggtgttcggcgacgttgttgatactgattggctgaaaggcaaagacaaagacgcgaccgacggtacctggttcacgaccacgtcgccgtccgtaacctttactccggttgcggctgaggcagccaatgtcgtgtcttatgaggtgacgtatccgaatggcaacggcaccaagaccgatacggtcaaggcagatgaagcatggaccgtgcctaacggcaagaccgacctgaccaagaccacggttacggtcaccaattggttcggcagcgcttccgatgcgaagccgttgagcgatttgctcgacgcgaagaccgttattgttgacccgaatgccggcactggtctgtccctgaatctgaccggtaccaccccggataagggtgctgtcaacaacggcaccacgtattacagcaaggtcggcggcttctcggtgagcagcacgagcgcatacttcgccgatgaactcgccctgctcaaggcgaacggtatcaagttgctgaccgttccggctgctgacggcaccggtgccccaaccccggtgtgcgatgccgctgatcttacgaatggtgccgtggactgcggcgatgccggactggacctgaagcccggtaaccacaccgtaagcctgaactccgcgctgccgggcgcgccgactgtaacgcagtcgttcgccatcgacaccaccgctcctaccgttgcgtggaagggctactccaagaacggcggcattgatattccgttcggaaagacactcttcgcagtcggccgtaaagaacgtgccctgaccttcaccgttacggatgatggtgccggtgtgggcaaggtgattgcaagcggtatcgatcctgagacgggcaagcaggccacggtcacgttgaccaacaacggtgacggcacctacacattcccgctcaccaaggccggaacctacgatttgacggacttcaccatccaagccacggacaatgcaggtacgcagtccaaggctgaaaaggtaaacgcaattgccggcgataagttcacctacacgaagattcgtatcggcaagaatgtccagccgaagaccacggtatcggtaagcggcaccgactacatcaacggcactcccaaggtcacactgaccgtcaagaacaacccgtggctggcggacgaactgaagggtctgcaagaaggtgccggcaccaagaacctgaacctgctcaccagcacattgaccgctggcggcaagaccgtgtaccagggcgcgttcccggtggccggcgccacggtgaacgacgccggtgacaagatcgtcatcgcagcggatgccgccaagccgttgattgatgccaagaacacaaacggccagtatgtcattacggtaaccaagaacctcacattgctggcagtgttgggtgacgtgaccaataacgccaagaccttcggcgtggatacgcaggctccgagcttcaccggtgccgcctaccaggcaggcagagatgaactgacctccaccaaggacgattccatcagtgtcgtgtcccgttctgccgccaccatcactttggacgcgcgcgatctgctgcccgattccacggcaacaggtgccggcaaagacgatgcacagacctctggtctggcaaaggtcgaagccaaggtcgattacaccacgtggaatggcgataaggtcaccggcaagtggaccgaacttcagcgcgtgaacaacgaccccaacaaggtccaactgacgctcggcgaccaggacggcaagtacacgctggccggcgtatccctcagagccaccgataaggcgaccacgaagcccaatgtcagcgatgccgaaaccacattggccacggtgaaggccgcactggccaagtccactgataccaccgtggccgctgcggccaagcagctgccggatacgctgggcgtgagcaagcagaccgcgaaggcgactctgcagctcaacgatgctgacccgcagaatacctacaaggaagatctcaccaacatctccctcaaggtcgccggtgaccccgcgttcgcctaccgctgggatgtggtcaaggctggttatgccaatacagacttgctgaccggtgcggtgcaatacggcgacgccggttcgaagtccttcacgttcaagatcagtgacgccacctataaggacggcgtcatcacgctgggcaccgcaaacctgcccaagcggaccgaaaccgacaaggatgccaccggcaagcagttcaacggcgactaccagctgacgctccagaagaacttcggcaacaatgtcgagctgttcaacgctcaaagcaccggcactaccaactacctgttggacaccaagcgcccagtgctgaccaagatcagcggtccggccggtgccaagggcgagaccatcgtcgataccaccgtgcaaggcaagagctacacggtcttcgccaaggccggtgcacagacgttcacggtctggatcaaggacttgctgcccaacggccagtcctcgaacgactccgccaagaagaacgaagcccatacgtccggcatcaaggatgactccgttaagctgaccattcctgacggcactgatctgaagggcaagacgcttgccgagggcaagacggtgaatgtcacactcgacaacgaaggcaagggacagttgacccttgatcaggaaggcttctacgacctgagcaagatcacggtaagtgtcaatgacaacctcggcaacgcgctggacaaggaaagcttcaagaaagctccggttcaggacaatgtcaaggattacgacgccgtcgttgccgatgtgaacggcaacgataccaaggcatccttcgcggtcaccaagtccgacaactccgtgcccgactccagtgataacaacaacaagtacttccgtggcaaggtcaaggtggcctacaccatcaccgaccactggttcccgatttacgccaagctcaacgccggcaagacgaacctgctcgctggtagtacttcgaacaccacgccgttgaccggtggccagaacgagcagaacatcaagccgttggatgccagcgatgcacagtggactgaaggcgatggctacacgtggacgctctccggccagaagctgttgatcaacggcaagaccaacgaagtggaaggcaattacacgctgcacttcgcctatgccggtctacaggcaaaggccaatgaggcatccacccagtccaaagacgtggtgctcgactggaccgctccgaagctgggcgacctgaccgcttccagtgaagcaccgaagaagtgggattggatcttctccactgatgtcttcacggccacgctgaacggcatcagcgataatgtgtccggtgtgactgcggactccaccgcgttctccaccaagcacttcgacaactggctttccggcaagaacgacccggctcccgtctatgcgggcgacgcggccgccggcagcatcagcttcacgatggatggcgacagccagcgcgtctacctcggcgagaccagcctcaccattcgcgatgaggccggcaacccggtcgacaccggcaagctgaatgcctacgaaggcgtgaacggcaaccaagccgccaacgcgctgaagagattgaacggcgtggccatcgacaccgtggctcccaccatcgcagtctcctacgacaacaacgatgtgcgcaacggcaagtactacaaggcccaccgtaccggtaccgtgacactgaccgaatcgaacttcgatttctccaagaagtatgagggcgatcgtgtggtcgtcaccacgtcgatcgacggcaagaaggccaccattccggtctcctccttcaagaacgcgagtggtgacctgaagacgtacgtggccaccttcgccgccgacagcgacggcgactggactgtggacgccgcctacaccgatccgggcgatcacccgtcgaatacgattcatgaggagttcacggtcgacaccgtggctccgaagctgaccctcaccttcgacaacaacaacgtgaagaacggcaagtactacgcggccgatcgcaacgctaccattcgcgaagtcgagcgcaacttctccaaggacgaatcggtcatcaccgtcaccgccaaggacgataacggcgcggacaccgcagcccccggcccggcgggctggcaacgcaccggcggcacgcgcgaatccaccgagtggacgaactccgtggcattcacgggcgaggcgcacttcaccatcaaggccaccgccaccgatctggccggcaacaaggccgaagaggtgagcgaacccgagttcgtggttgacaagaccaagccgcagatcaagatcgaccgcgtggaagacaagaccgcgtacgccggtaccgtggcaccgttgatcgacttcaacgatgtcaacatcgacatgaagaacgtgagctacacgctggtcggcgaccatcgcggcgaactcaagggcgacaagatgcccaagaacgtcaccaccgatgcggccaacgaccgcaccgtggacttcacggacttcgaacgcaaggtcgacttcgatgacgtgtacaccatcaaggcgcacggcaccgatctggctggcaacacgttcgagaccaagaagaccttctccgtgaaccgcttcggctccacctacacgttcgatgcggacaccacgaacctgcgcggcacctacctgaagaaggcgcaggacgtgcagataacggagatcaacgtctccggtcttgacctgagcaagcgccagatcgtgatcgccaaggacgacaaggcgaccacgctcaccaacaacgactacaaggtcgcgacctctgacgacaagggctggagccgtacggtgtacaccgtgccggcatcccgctttaactccgacggcttctaccgtgtgcaggtgcagtccatggacgaggcgggcaacctctcgcagaacaccatggacaagaagaacgccgaccgtaagggcactgccgaagtgaacttcgccgtcgactcgaccgcgccgactgcttcgctgctcggcatcaagtccggcaccgtgtactacagccagcagggacagcccgcatcggtggacgccaaagacaacctcggcatcaagtccaccgaagtgtatgtcgacggccagctcaaagacagctggaagggcgatgccacgctcaagtccacgccgagtctgacgttcgacgccgacgccaagagccacgagatcgtgatccacacgatcgacaaggcaggcaacgaggcgacgtccacctacgacaacatctacgtggcctccaactggtggcagtacgccacccacaccccgtggctgcgcaacacgatgatcttcggtgcactggtggtcttggccgccatcgccggagcgattgtgatggcgcagcagcgccggaagcagtttgcgtaccgcaagaacccgttcgagcggtgaggtgactgcactcgtttcccgttaacgagggttgtttgcggggcgttgcggtgagtaattgctgatgccatagtgggccagtccaattgattctgggctggcccactaccgttgatgagggattgcgtgatgtggtgttggctgggtatgggttgtctggtcaccggctgtggtgttgaacggcatcgcttgtcgtgcgtagacgttggagcaaaggccatgggtggtccatcggcaacacaattatgaatgcccgaaccgggtataccgattttcggggtatccacgacatgaagaatatcgcggctgtcgacacccgtcggacggtgtgggacaccatgaatattggccagcattttttggcgtatgccaacgcgacgtatgacacgttgaatacggcgaaagtggtgaagccgtttgtgaatccgactgcggatggtggtctgcagtggaagc

SEQ ID NO: 2009 - DNA, 8333 bp, Unknown
  R17_18m  MAG No. k141_29939
catcgccatcgcccgtgcgctcgccgtcaaacctgccgtggtcttcgccgacgagccgaccggcgcgctcgaccaagccaccggccgcgaggtcatgggcattctcatggccgccgcgcgggacaacggttccgccgtggtcgtcgttactcatgatcccaacgtcgcttcgttctgctcgcgcaccgtgaccatgcaggacggccagctgggaggcgtacgatgagcgctttcgcattgtggcgattgttccatcgccccggctcgcgtggcagtgcgggtcatacttcggtgttggccatcattgcttttgccgcagccaccactatctttctcaccgttttgggcggcgtgcatgggttcatgtggcgcgcctccgccgaccacaccattggatgcgcaatcaatctcgacgcttgcaaacccggaacagcggaaatctggaagcagcgtatcgccaatccccacagcctggatcaatacgccacggcatacgtcgtgctggcgttctttgcctgcctgctgctgattgtgccgttcgtggcgcttgccggttccgccgcgcgattggctgcgtcccgtcgtgacgctcggctcgcatccctgcgcttggcaggcgcgaccacggggcaagttattcgccttacggcgcttgatgcggctgggcaggccttggtgggggcgctgattggcatcgcggggtactgcgtgttgatccccctaatcatgttgctgcatttccagaatcagacgtttacgttcgagcaactgtgggtggggccgattgccttgatcattacgcttgttggcgtgaccgtgttggcgctgatctcttcgctggtcacgcttcggcgcgtggccatcacgccactcggcgtcacttcacgcgttgcgactacgctgccgtccggctggcgtgtggtggtgttcgccgtcatcatggtgattgccgttcttctgttcaagaatccgatggtgctggctcaggccggtgaagtagtgatgtacggcgtgatcatcggtttcatgctgctgtgcttcgcgctggtgaacctcgtgggctcctgggtggtcaccgcccgcgccaaagccaaggccaaacggcccaaggacgcggccacgatgattgccatgcgccgtattctcgacaatccgaagcgcgcctggcgcaatgtgtccggcattgcactggccgtgttcatcgccggcatcacctcgatctgcggattctttggctcggccgccgtggtcggtgacgccaacgacccgtccaccgtgttcattcgcgacatcggcaccggcggcatcctgacgctagtgttcgccgctgtgcttgccgcggtcagctccggtgtgatgcaggccggcagcgtgtacgatcaggccggcgaatatcgcatgctggtgttggagggcactgatgtcaagaccttgaaccgtgcgcgattcatcgaggtactcaccccgctcaacatcgtggtgatcgtggccggcggctgttccatgctgcttatggcccctctgttcgccgcttcgatgaccgaaccggccacgctggccagcttcttcggcgggcttgtgctgtgctatgcgctggtttcggtgggtgcgttcgcgtccaatcgggtggccgccagcttgaatctggccgattatcgggccgatgactgaggcggtacggtactttcccgggtgacgacactggtggggaggatgacgtgcatatcaccctgattgcccttgcggctgtcgatgatcatctgcacggcgtgttgggctatttcgctgaacggctgatgcacgctggtcagggagggcatgagttggccggcggggaaaatgtcgtcgaaccccatgacggacaattgctttggcaacgcgatcttatgctctcgtgcggcacgatacgtgcttactgcagataagtcgttgcagcaaaaaatcgcggtgggtcggtcggtgagttccagcagccggcaggctgcttcatagcttgtttcggcggggaagtagtcgccctgttcgatataggactccggcagatccaccccggcctgttgcagagcggcggtgaatccgctatagcgcgcgatgctggtctgtaggttcgccggcccccggataacggcgatgcgtcgatggccgagcgacagcaggtgtttgccggcctggtatcctgcggtccagttatcgatggacacgctcatcacatccgaatcgacggtatcgattgggtcgatgatgaccacgggaatactgcgcgatttcaacaaagacttcgcttgagtggtcagaccgcccatctgctgcataatcacaccttggggatttctatcgatgatgccgcggaaacagtcttccgtggcatcgccatggttggtctgggtgaccgtgatggcgaggcccgcctgctgcgcccagtatgaggcgtatttgatgagttccatcgtgccgttgtgctcaatgtattcgacgacgagctctatggtgggggagagtttggtgttgaccagaggccttgagtaaccgtgatctttgaggatttgctcgacttgtctccgcgtctcgtcggaaatgcctgacctgccattgatgactttggaaacagtggatgcggatacgccggcgatttttgcgagctcgccgaccttgagcttgtgggtggatgtatcgttaaccatcggtgtttccctcttggatattcgccgttcaattactgagacgatttcgtcgttgttcccaccattatgacgcattgtgccgtaacaattccatgttttcttgccctttgtccggccttgaataaaaattttcgcaaataggcttgcaaatttctttattcggacgtacgatatagccgttggttcaccaaggcgaaggagcccgaacacatgagtaccatcaccaaagtcaagacgtatgacttccgattccccacttcaacgacgctttccggctcggatgcaatgaaccccgatccggattattcctctgcgtacgtggagatttccaccagcgccgacgacggcatcacgggtgtgggattcgtgttcaccatcggccgtggcaacgacgtggtttgcaaggccatcgaatcgatgtcgcaggtgctgattgggcgcaacaccgaggaactgctcgacaacatgcgcattgcatgggacctgttcgtgcatgattcccagctgcgttggcttggccctgaaaagggcgtggagcatatggccatcggcgcggtgctctccgcgttgtgggatatcaaggccaagcgtgcgggcaagccgttgtggctgctgctgggcgagatggagccggaggagctggtctccacgctcgatttccgctacatgaccgacgccctgcgccctgaggaagccgttgcgattctcaaagagggtcagaagggcaaggccgagcgtatcaagcatctgctggaggtcggttaccccggctattcaaccgctcccggttggctcggctactcggatgagaagatggtcgcgctcgccaaggaggagacgcaggtcaagggattcaagcagatcaagctcaaggtcggccagaacatcgacgacgatctgcgtcgcctggccaaggcccgcgaagccatcggccccgacgtgcgcctcgccgtggacgccaaccaggtgtgggatgttcccaccgccatcgactggatcaacaagttccacgacttcgatctggcgtgggtcgaggagccgaccagcccggatgacgtgattggccacgccacgattgcgcgcgccatcaatcccatcaaggtcgccaccggcgaacagatgcagagccgcatcctgtacaagcagtacctgcaggccaacgccttcggcatcatgcagattgacgccacccgagtggccggtccgcaggagattgtgctcgaatacctgctggcaaagaagttcaacaagcccgtctgcccgcacgccggcggcgtgggtctgtgcgaggccgtgtgtcacttcgcgatgttcgattacgtggccgtgtccggcacgatggacggccgcatgatcgaatacgtcgataaccagcatgaacatttcgtccacccgaccgagatcaaggacggcaactacgtcgctccgaccgctccgggcaacggtaccgaaatgacgctggagacggccgagaagtacctgtatcgcggctgaccgcaactggaaattcataaccgaacaacacaacttaacacaacaacacacaactactccggctggggtgccgaagccccggccgggcgtgacatggaacacccatgaaacgcagaataaggatggacgaaggagttcccatggatctgcatctcgaaggcaaagtcatcatcatcaccggcggtttcaaaggcatcggcaaaggcatcacgctgcaactggcccaggagggggccatcccggtggtgattaatcgacccgacagcgctctcgacgagttcaagaaggatatcgagcagtacaccaccacctatgatgtgcacttgcttgacctcaacgacaccgacaagatcgccggcgtcgtcgaagcaacatacaagaagtacggccatatcgatggcattgtgaataacgccggaaagaacgacaacaaggatctcgagaccactacttggcgtgagttcgaggaatcgcttcacggcaacctgactcactattacgagctggtccacgcggccgtgccgtatctcaaggaaagccgcggatccatcgtgaacatctcgtccaagaccgcgcttaccggccaaggcaagaccagcgcctatgcggccgccaagggcgcgatcctgggcctgacccgtgaatgggccgccgcattggtgcacgatagcgtgcgtgtcaacgccatagtcgtctccgagtgctggaccccgctctatgccgattggatcaagacctttggcgatgaagcggcccagcaggcgcgcctgtcggtgatcaccgacaagattccgctggaacatcgtatgaccaccaccgaagagatcggtaatgaagcggcattcctgctctccgaccgctccagccacaccaccggtcagtgggtgtacgtcgatggcggctatgtccaccttgaccgtgcgctgagctgacaagcagccctttcccgaatattcgcgcggcaattccggagctttgatcattgctccatccgtacgccgtatccgcgtatgccgcccgtatcacccgcgccctgggtcatccgtttaccaacatggcccagggtggtccacttctcgctaggcaatatcggggaaactcgtatcactaaggagtcaatgatgacatccaaaaacacaaccggttccaaggcgaccatcgccattgtgctggtgacctcactgttctttatctggggcctgaccatgaacctcgtgaacgcgttgaactcgccgttcgcaaactacatagaactcagcagcgccgaagcgtcattactgcaggtggcctattacggcgcatacttcgtcatggccattccggccggcttgatcgccaagcgtttcggttataagggcggcgtcatctccggtctgttcctgttcgctctgggcgcgttcatggtgatccctgccaccagcatggccagctacggcctgttcctgttcgccatgttcgttatcgcgctcggcgcggcatcgctggagaccaactgcaatccgtatatcaccaagctgggtgatgaaaagggcgaatcgttccgtatcaacatggcgcagagtttcaacggcgtcggcaacatcgttggcccgctgattcttggccagattctcggcaccaccgtcgcatcaggcgagtccggcttcgacgccgctaaggcgcagttcctgaatgatacccgcacgatatacattgtgatcggcgttgtgctggtcgtggtgctcgccgtgttcgcgctgttcaagctgcccacgcctccgggagacgaagaggaggccgcgggcggcgcctcctccgagaacagctccttcttcggcctgctcaagcgcccgcacttcgcattgggcgtgcttgccgagttcattttcatcggcctgcaagtggccggcatggcggtcttctccgcctacgcgctcaagcactggggcgcgggcatcacagccggcaccgcggcgatgatgctttccgtgctttccctgctgttcaccatcggacgcttcgccaccaccccattgatggccaaattcgatccctcgaagattcttggcgtatacatgaccatttcagccgtgctgatgttcgtggtattccttggcctgggcaaggtctccgtcatcgcgttcatggtggcgtatctgttcatttccatcggatacccgaccatattctccctgacgctgaaaggtatcaagggttccgcggcgaagaccggttcctcggctttggtgatgagcattgtgggcgccgcgttgattccgctgctgctcggtgtgattcaggatgcggcaggcatcgagatcgccatcctggtgatggtcccgggcttcctgttcgtggcatggtacgcattctggggttccaagatcggtctgaaggaggcctgatatgacactcaacgtaatcgattcccacttccatatctgggatccggatgcgcaggatctgccatggctggcaggattgccctcgctgcaacacaagtacacgattgaagacctagccgcacagtacgccaaatttggcgtgaatttcctcggcggcgtatacgtggaggtcgacgcggccgaccatgagcttgaggaccggctgctgtacgagaatgccagccctctgatcctgaagcgcatgctgcaggggcgggtaagcccttggatgcgtgtcccgatcaacgccgatggcatcagggaaccgctgcatgtggattccgagccgcggggccgtgcgctcgaacccgaattcatcgccggtctacgcgcgatggccgccaagggattgccattcgagctgtgcaaccgtggcccggagttgggcgacatggccaaggcgttctcgcaggttcctgaagtgacggtcatcatcgatcatctcggcaacgtgcccgggcttgatgaggaatcgtgcgccgcactcgcagcgttggccgaactgccgaattcgtatatcaaggtttccggcgacaacccggtggacccggacatcgtgaaatacgtgcgggacacattcggcccgaagaaggtgctgtacagctccaactggccggtcgtggaactcaactcgacctttgccacgcacttccaactcatgctggacacgttcggcgaggacgaggacttcttcgaaaacaacgcccgccgcgcttacaacatcgactaaacccaagccccctctgatgagggggctatcgtccgcaggacgactgggggagaggccgcaaacccggtgccgcttgtgcggcacccctattccgtaacgaaaggaacaatcatgacgagcagcgccgaattctcaggcatcatctgcccatccatcaccatcaccaaggacgacggtgacatcgactatgaacgttgggggcagcatctcgatcatctgatcgaggccggtatcaacggcgtgctggtgtttggcagcatcggcgagttctatgccttccctctggacgtcaagaagcaggcggtcgacttcgtggccaagcatgtcgccgggcgcatcaaggtgttcgcgggcgtgggcgataccaacttgaacaatgtgatcgacttcgcgcgggcagtcgaagcaagtggagtggatgcgctcgtggtcgtttcgccgtattacttcggccctactgcgggaggcgcgaaggcgtacttcggcgcggtcgctgaagcgacgaatcttccggtgatcctctataatttcccaccgcgcaccggcagcgacttgaccccggagctcgtggccgagcttgccgccgcgcacccgaacatcgtcggcatcaaggacacggtcgacacaatcagccacacccgcaaggtgattcgcgcggtcaaggccgtgaatccacggtttgcggtgttctccggtttcgacgagtactatctcgtcaaccgcgtctccggcggtgatggcgtgatctgcggcatgaccaatgtggagccggagaccttcgttacgctgcaccgtgcatatgaggccggcgactatggcaccgcaattgaggccgccgaacgcatcagccacctgatggcgctgtacgatcagaccgacctgttcatctccgccatcaagggtgcggtcaaggccaagggactgaacatttccaccctgatccgtgagccagcggtgcaactcactgctcagcagtatgaggcgattaaggcgattctcaagtag

SEQ ID NO: 2010 - DNA, 11897 bp, Unknown
  R17_18m  MAG No. k141_30010
ccgctgtggtacccggtgaacgcttccggcgagccggattacgatcgcccgatcaccccgagcgaggatcgtctgccgatcgacccgaccatcgatgtgccggaaggctacgacgagtcccagcgtgatgtgcccggcggcttcaccgccgaaaaggacatcatggatacctgggccacctcttcgctgaccccacagatcgtgacccactgggccgagccggacgaggcctccaaggccctgttcgcttccaccttcccgatggaccttcgcccgcagggtcaggacatcatccgcacctggctgttctcgactgtggaccgcgcgcacttggagaacaagtgtctgccgtgggcccatgccacgctgtccggctggattctggaccccgaccacaagaagatgtcgaagtccaagggcaacgtcgtggtgccgaacgagccgatcgagaagttcggcgcggacgccgtgcgttactgggccgccgccgctcgcctgggcctcgatgccacgtacgacatcggccagatgaagattggccgtcgactggccatcaagctgctgaacgccaccaagttcgcgctggccatcggccgtgaggacgagaaccatcacgtgggcgctgccgccgagacctcgtggaacccgatcgatgtgaccgaaccgctggatcgcgccgctatggccaagctggctttggtggtgcgtcaggccaccgaggcgctggaatcctacgagcattccaaggcgctggaagtcatcgaatcctacttctggcagttctgcgacgactacatcgagctggtcaagaaccgcgcctatggcactccggacgagcacggcaatgtgccgtccgagaaggctgtgaagtccgcccgcaccgctctgggtctgggcttggacgccttcgcacgtctgctggccccgtacctgccgtacgccaccgaggaagtgtggagctggatgcacgccggttccggttccgtgcatcgcgccgcctggccggtcgtggacccgtatgtcgaggccgccaccggtgcttcccccgagctgctgacttgggccggcaaggccgtggagcagctgcgtaagatcaagtccgaggccaaggtctccatgaagaccccaatcctgtctgtggcactgtccgctgcttcggaaggtgtgaacgcgattcacgccgccttgggcgatatcgcgcaggccggtcgcgtggtcggcaagttcgacttggtggccaagcacgccgaggaatccgccgccgaagacgcgcccgaaaccgaggtcgccgtcgaagccagcgagctcggtgagccgccagccaagaagccaaagcactgagcgttgcgcacaacaacagtaggtctcacggcaatgccgctcgttccgagcctacgggaagcccaccgggcttcccgcttaacggctcggccagccaagaagccaaagcactgagcgttgcgcacaacaacaaaagaggggaacctcctattgaggttcccctcttttgttttttgacgttcggatgacacgactgtgggacggcacgcaaatatcccgcattgtaagctggcggcccacaatagcgtgggccaccacgcgtgtcaaacgttttatatacgcggcgtcccacagaccgaatcaacaaatccttggaatttagccattcttcaaactatagttagctctgacttacaagagggtgtgggacgccgcatcgaaaaagccagtttttgatgcggcgtcccacaccgataacgcactttacgcgtattgggcacctgtcgcatgcggattttcccgcatacaccatcacaccgtcggaatcacgatgaggtatcgggtttcggcggttttttgttgcgtattggggctatcgagctgcgcgacggcctgcgccaagagcgtgccagcatcgctgatctccacggtctcattgatcagcgcgctcatgtcatgcttgagcagcgtgccgccagtgccaaagccgaacagtactggagcggtgtcaagattgttgccggaatcgccagtatcgctcgacttggctgagtcgttcgttcccgaaccatcgctcttggacgaatcgaacttacctccaccaccgatggccgaagtaagaccacccgcatagttcatcacatcgccagcagacatggacatggtgtcatcgaccagtgaggccttggaatgctgcgactgctgctgttgcgcggctttggcctgcttacgggcggcatcggccttacgcttggcttgggcggcccgggtcttgccgtagaacgattgcgattgcgaatcgaccaggccagtcagtgcctgagcctcggtcaccggaccggaagagacatcaccggacgagccatcgccatcgctgccggaagccgaggacgcgactccttcgaactgatcggagaatcgcaatacaatctggcgcaaggccgtggctttgcccgtatgctcggaggcggtggcaagcgtgctcatcgcggcatcgaccttggattgagcgtcggcgagttcatcgctaccgttggtttcggcgatggcttggctctcgtaagcggtggcgcccgaagacgtgccgccggtcagggcgctcaaattggccgtgtagacgtccgtgtatttcatcgaatacggaatcattgcggcggagagctggctctggccatcggcgtattgcttggagcctcgagtggcttcctccgaagcctcggcggtcagatcatccaccagtccggtggtgccttgctgctggatgcggcgaatcacctcatccaacgcatcgaccgcaccggcatgctgatgtgcggcactgacgttgttcaccgcgttggccaagtcgagtacggcttgcgccaaaggcgtatccccggacagttcgccggccgtgcccatcaacgccggcaactgggtggaggtaccaatcgatccagacaggtgcgtggtatatgagcccacatacgcggccatatagtcttcaaacgtccgcttatgggcggtttcgcgttcggccactacggacttgtccagcgcacgctcattatcgcgcagggtttgaagctgctcgatgagctgttgatgctccccggaaccggcgtcggtcagtgaatcgaccagtatggcggcagaggcgacgagttgggcgacatccgtatcggcagcaggctgtgcggcggcattcgcggcatcgggattagcaccaactaccggactgctggaattggaaggcaatacggcgagcgccacggaactcatggagaagtctttggcgttcatatagcagctgaattccaagccggttgcggcttttccagctgcggcgactacggtattggaaccttgcgtggttaccgtaatggagttgtcagcggaaacatcatcggctacctgcgtaggcacggtaaaggcgacaaccgggatcgtacggttggcctccttggtttgcggcttaatatcgatatacacgccgatcagtccagatgcgccggcaacctcgtttgcctcgacgtttggaccgtcaagcgagtaggtgacgctgactttccatggcagggtggcggcggaagcggggatacgagaagccttggacgtgccggaattactattggcggaatcggtatcagtggaaccgctattgccggaatcggcactggcgccattgccggcgccgcccttccctaccacataccaacggaccggctccccttcggcatcggcgacggcgtacatatcacttgccgtagcgagcaccggaccgtaatcaaccggagtcggacgagacatccaagcaccgccgagaatcgaagccacgcacaatgcgcaactgaccagtgcggcaccacatctcatctacgtatcccattcatacagtcggccactatgggcattccattcccgtattaatgtagtcgctgccggcaacttgccctatagacgaatatccgaaaggtgcccattcgctgcgggcgaatcaggcgaatacgtcgagtacgcccgggtcgccaccggcatcggcgatgcgctggtggcgcttcttggcttcggtaaccacgaattcacggtacatttcggcaatttccggatcaagcccggcatcgatggcgatgcggtggaggcgttcgatctgatagtcctcacgcttggtgtcttcgggcgcgaatccggcgttggctttgagcacgccgacctgcgaggtggccttgaaccgctcggccagtaatgcgatggccgccgaatcgatgttatcgatggtttggcgcagcgctttgatgcgcgccaccgcttgtgcggtttccgggtgggccgccgcctgggcggagtcgatggtggtcctttgccagccgctgctcgtttcgctcatagattcgaggatactcccgattgcggctttgcacgatgcgcaaagtcagatatctcagatgtcatagtcgccgtaggggatatggctggcatccgcatcgccgaacatggccgcaccattgcccactcccaaaacaatcgaacccattgatacatctttcatctcatatatcgtcagcgtgcatgtgaacgttgacggcaatactacaactgcaatgtgatagttgatgtatttgcatcatatacggcaagggctgcgccccgtatcaatcggggtgcagcccttacactattgttcagcggtctgatcagttgccgttgaccgcgttgccggtgttggcctgctgcacgatggcggcgaggaagtcgcggttggtggcggtcttcttgaggcgcggcaccaacgtctggtaggcctgctcgggctccatgccgcccagcagtcgacgcagacggtagataatcggcagttcctgcgggttggtgatgagctcctcgcggcgggtgccggaagcgttgatgtcgatggccgggaacagtcgcttgtccgccagctcgcgggacaggcgcagttccatgttgccggtgcccttgaactcctcgaaaatcacctcgtccatcttggagccggtttccaccagcgcagaggagatgatggtcagggagccgccgttttcgatgttgcgggccgcgccgaagaacttcttcggcgggtagagggcctgcgcgtccacaccaccggacaggatgcggccggaggcgggggcggcgatgttgtaagcgcgagccagtcgggtcatggaatcgagcagtacgaccacgtcctggccgagctccacaagacgcttggcgcgttcgatggccagttcggcgaccgtggtgtgatcggaggccggacggtcgaaggtggaggagataacctcgccctggaccgtgcgctccatatcggtgacctcttcggggcgctcgtccacgagcaccaccataaggtggacctcggggttgttggcggcgatggagttggcgatgttctgcagggtgatggtcttaccggccttcggcggggagacaatcagaccacgctggcccttgccgatcggggaaacgatgtccatgatacggccggtgagcttgttcggggcggtttcctgcttcaaacgctcctgcgggtacagcggcgtgagcttggagaactgcggacggttgagcgcttcttcaacgctttggccgttgatggaatcgatggcctgcagtggcacgaacttctggcgttggttgcgacgatcgccttcgcgcggggcgcgaatcgaaccatggacggcatcgcccttgcgcaggccgtacttcttgacctggcccatggaaacgtacacgtcgttcgggccgggcaggtagccggaagtgcgcacaaaagcgtaggagtcgagcacatcgacgatgccggccaccggcaccagatcctcctgcggctcttcacggcggctatcacggtcattgcgatcgctacgattatcgcgatcatcatagcgacgatcatcatcggcgttgtcgcgatcacggccacgcatgcggcggttacggcgatcgttgcgatcattacggttatcgcgatcgttgcggtcgctacggtcgcggcggttacgacgcacaaactcgtgatcgtcgttctgctcgccgtcttcggacgtttcctcgtgcttctgcgtgggcagcgtggccaggatatcgtcgaggtcacgcacggtttcttcgctgttttccgcagtgcgacgacggcggcgaggctgctcgtcctcatcatcacggactcggcgaatcagcggaacttccacgtcctcatggcgctcgcggcgacgctcggtaggcgctgcatctcccaaatcgagcgtggccagcagatcgccggcctcatcggccttcttgcgcggcttgcggcgagcgaaatcggactggtcgtcatcgcgacgatggcgggccgcacgcggttcggatgcggcatcatcggcggccttacgacgggtgcgtcgcggttcggtctcgtccttcttggcatcgtcggccacgggaagcggcaaatcgagctgcggttccgtggcggccggagccggagccggcgactgggtggccacgtcagcattgtctgtggtattggcctcagcggcatcggactgcggagccttgacgaccttggcggttttggcggccttgggagcgcgcacggtcacaccggccggcggctctccaccattgcgcgccgcctgcagggtggcgagcagctcgggcttgcgcatggtcgacgtaccgcgcaggcccatctgtttagcgagctctttgagctcaggcagcttcatatcctcaagattctggctatttgccactggttgccctttccataccgaacagacccatgcctatccaggcgttaagagtgattattgcggttgcaccgctcatgaatgttcgctgcgtctctgagttttcacgaacttcgtttactgtacaacgccaactcgaccaacgcaaaacggcccgccgaaaaccaaaaaagctccctctgtgacgagggagctcaacaaggtttattcacttttcttcgtggtaggacttttcggtgttgacggaccacacgttcttcttggacgtcttgccggtcttgatgttgccgacggcctccatggcggtggccatggagtggtccatgttgttgtagcggtgctggccgttgcggcccacgcagtagaggttgccgaagccgtcgaggtactcgatgagctcgtccatgtgctcgtaggtgtcgaagtaggcggggtacgccttcttgacgcgctcacgatgggagtcgatgacctcgtccgggccgttgatcacacgcatgcgggtgagctcggagatcgcgaacttggtgacgtcctcctcgctcatgttccagaacgagtcaccctcctcgcagaagtactcgaggccgacccacacggtgtcgtccacgttcttgaccagatacgggctccagttgttgaagatctgcagacggccgaccttgtagcccgggtcctgcacgtagatccagcagtccggcacgatcggcggattgccgagggtggggatgttggtggtgttcttgagcttcaggtgcttgaccagcaggcccacggtcacgaagtcgcggtacggcaggccgttggccacctcggtcatatcggccggggcgggcttggaatcagcggcctcgggatcgtcgccggccgcgtcgatggcgtcgaccaggtccttgaccggcatcgaggagatgaactggtcgccggaaagctcggtgcggttgccctcggaatcctcgtacaccacggaagacacggcgccatcggtctggcggacctcgaccaccctggcgtcggtcagcaccttgacgccggcggcctcgcaattggactcgacggtctcccacagctggccgggaccgtacttcggataccagaactcctcgatcagcgaggtctcgacctccgcgttggagcgcttcctggggctaagcttctggaaggcgttcttgagcacgcccatgatggacaggcccttgacgcgctgggcgccccagtcggcggagatctgggaggggtggcggccccacagcttctccgtgtagccctcgaagaacatcgaatacagcttgcggccgaaacgattgatgtagaagttctccaggttgtcttccggcagcttgtggaacatggacttcaggtagctgaagccggccaccatggtgagcttgaagcccatggccttcaacgtgttggggctcagcgaaatcgggtaatcgaagaagtggcggttccagaagatacgggacacgcggtggcgcttgagcatcaccttgtcctccgtctccggatcggggccgcccggctccatgtcgtggtcgcggccgagcttcttgtcatcataggagggtgcgccctgcaacggcagaacggtcttccaccaatccatgatgcgttcgtctttggagaagaaacggtggccgccgatatccatgcggttgccgttgtgcttcacggtgcgcgagataccgccgaattcgcgggtcccctccagcacggtcacgtcatagttttccgcgccgccatccttgacgagttcccatgcggcggtaagtccagccggaccgccgccgataatcactacggattgcttgtcggtcattatgctccttataaacgcaaaatcagagacagtttactagaagccccggaatcgcacaccgaaagatgagcgaatgcttacagaattctcccgatatacgaccgatgcgccgtcttccatcagcagaaaggcgacgcatccaatcgtgaggtaggggtattcggcaacgctgcgtcacgcacagcgcggcgaatcggtttggtcttgggctaattcgtcagcgacgaaccttccatagattcagcgagattcctgcaagtgcaaacagcatcatcttctatcaaccgcaagcaaacaagacacacgatggcaaggttacgagtttgaacttttgctatgcgttgtatgaacaatgcgcgacgccccgccgtaagatgacggaatgccgcgcattgtcaatacaggctgtatcagacgattgcctgtcagtgaatatcgtcgggaatgtcgatatcggttttctggacttcctcgacgttcacgtccttgaaggtcacgatgcgcacagacttgacgaaacggctggaacggtagacatcccatacccatgcgtcagtcagctgcacatcgaaatacacgtcctgaccagcggaacgcacgttgaaatcgaccttattcgccaagtagaagcgacgctcagtctccaccacataggtgaacagcttgatgacgtcacgatattccctatacagcgcgagttcggcgtcggtttcgtaattgtcgagatcctcggcactcatgcttgtttactcactcactttccgtatcgcgtttgcggccgcggcccagcgtacgccaccatgcttcctttgagggcttgcgttccgcctggccgtacggccagttgctttcctcttcgagactgtggcgcgtgttcttctgcgtatcgtcgtggtgcccggcctgtggctcgactggctgtgcggccgccggcgtctgggcctgggactgcacgtcactcgtcgtgacggcggctgcctcaccacgctgtgccggctcgggttccggcttgttctgctggatggcgatggaatgctcacgcgcggacagcgcttccttgacacccgggttgtcctcaatcaagtgcataccaaaagcgtcaagcgaacgaatcggatcgtactcgtcgaccaacgtgtccatgacgataaggtcctggtatttgttgttttcgacatcccacaacgcgtcgcgcgaggtgccggacggcacgaagccgagcgactggtagaccgaaatcgaacggctgttcttttccggcacgctcacccagatgcggtgcatgcccaggccggccggttcgggcgcaaagccgtaagtcatcacacgcggcatggcgtcacgggagtagccgcggccacggtactcacggcccaagatgatctggatgcgggcggacttggaccagccgtcgatgtcgatgaggaaaatcatgccgatgacattatcggtgctggccgcatcgagctgaccgtcatcgtcatggtcggcgtcagtcaatacggcccatgcgatggtgcggcgggattccgggtcgcccacgccggattcggcgggtgcctgaccggcttcccaggcttgggagcggcggacccatgtgtgtacgatggcgcgttcggtgaccgcatccttgccggtgatcttggatgcgccatagaaggcatcaagttcatccaaacgagccaggtcctcgacggtggcggggcgcaggtgcaccatttcgccacggattggcggaatgacgatgctctgtggcagatcgcgcttcagttgcgcttcggtagccatgctcagcgtctcgttggttgcggtcatcggtatacatcccccggttcggcttgtttcggctcacggtccagtgccgaacatatcttactcgactgggtgaacgctggaaatgctctgagacgactttcttacagaatcaataaaggctcccgctggcgggagctgtccaacgaatttgaactggaggatttccctacaaataagtgctcccgctggcgggagctgtccgcgaagcggactgagggtggtcatccgtacatggcgaccaccctcagtctcactccgttcgacagctcccgccagcgggagccagtgaatctaatcagcccttgatcttgcccatgacgaccttggtgacggccttggcgtcggcctgaccgcgcgtggccttcatcacggcaccgatgatcacgcccatcggcttcatgttgccgctcttgagcttctcgacgacatccgggttggattcgaacgccgcgtcgacggccgcctcgatggcaccgttgtcttcgacgatcttgtagtcgtgcttcttgacgacttcatccggagtgccttcgcccttaagcacgccttcgacggtctgcttggcgagcttgtcgttgagcttgccggaggcgatgagcttctcgacctcggccacatcggccggggtgatcggcagctcttcgagggacatacccttggcgttggcttcgcgggaaagctcgcccagccaccacttgcgggcaccggcggccttggcaccggccttgacggtttcctcaatcaggtcgagggcgtcggcgttgaggatgtcgcgcatctgcagatcactcaggccccactcagacttgaggcggttgcggcgctcacgcggcatttccggcatctgggccttcatctcctcgatgtgctccttggtgatgtggagcatgacgaggtcggggtccgggaagtagcggtagtcgtcggcatcggacttcagacggccgccagcggtggtctgcgtagcctcatcccagtggcgggtctcctgcagaatctccttgccgtcgtccagacgggcggcctggcggcggatctcgtactggatggtcttctcgatgccgcggaacgagttcacgttcttggtttcggaacgggtgccgtagggggcgtccgggctcggacgcagcgagacgttcacgtcggcgcgcatgttgccctgctccatgcgggcatgggagatgttcagcgcgcgcacgatgtcgcggatggcgcgcatgtaggcaccggcgatttcgggagcgcgatcgcccgcgccctcgatcggcttggtgacgatctcgatcagcggcacgccggcgcggttgtagtcgaccagcgaatgatcggcgccttcgatacgaccgtcggcgccacccacgtgggtgttcttgccggcgtcgtcctcgatgtgggcgcgctcgatcggcacacggacgacggtgccgtcttccagttcgacatccaggtagccgttgccgttggtgggcttgtcgtactgcgagatctgatagtcgcgcggcatgtccgggtagaagtag

SEQ ID NO: 2011 - DNA, 3165 bp, Unknown
  R17_18m  MAG No. k141_30051
cgccggcaagaccctcgacgagattctggccgtcgccgccctgatcggtgcagccggcactcgccgcgtgcgcgaactgggcctgaaccccaagtatggcgaagccagtccgatgctctccgtcaagggcgccacccgcgaacaggttgaggctctggtcaagcgcgtgaacaacgcccgaggcccgatctccatcgccgtcaccaactccgacaaccaccacgtgctttccggctacccggaagacctggcagccttcgccctcgaagccgagcgcgagcacaagcaccaggccaagctgcgcgagcagaagctccacggcggcaccgtgttcaacccgaccctcgaataccttgaagtcaccctgcccttccactctccgctcatggccgacgccgtcgagcagaccgtggcctgggccggcgcctgcggctttgaccaggatcgcacccgcgcactcgctgcggaagtgctgctcaaccatgtggactggaatgcccgcgtcaaggcgctgttcaacgccgccgacccggccaagctgtggattgtggacctcggccccggcaacacgctcggcaagctgatcggcaacgtggtgcagggcaccggcatcggcgtggtcgaagccaccacgctgtccgaacgctccacgctctccacgctggaaagcgagcctgagcgcacccagaactggaaggcgttcgccccgcgcgtcatcaacaccccggccggcgccaagctggtcaccaagttctccaagctcaccggcaagccgccggtactgctgcccggcatgacccccaccaccgtggaaccggaaatcgtggccgccgcggccaacgccggctactgggccgagctcgccggcggcggccaggtgaccgccgaagtgttcgaccgccacatcgccgccctcgaagacgagctggaggaaggccgcacggtcgaattcaacgcgatgttcatggaccgttacctgtggaacctgcagttcggctcctcccgcatcgtgcccaagaagcgtgcttccggcgcgccgatcgacggcgtggtcgtctccgccggcatccccgagctggacgaagccgtggccctgatcgagtcgctgcaggcggacggtctgccgtacgtgagtttcaagcccggcaccgtggaccagattcgccaggtcgtgcgcatcgccaaggccgtgtcccccaccaccatcatggttcaggtcgagggcggtgaagccggcggccaccacagctgggaagcgctggacgacctgcttgccgccacctacgccgaagtgcgcgcctgcgacaacctcgtgctggtcgccggcggcggcatcggcacccccgaacgcgcggccgactacatttccggccagtgggcccacgcctacggcctgcccgacatgccggtcgacggcgtgcttatcggtaccgccgcgatgaccgccaaggaggctcacaccagccccgaagtcaagcagctgctcgtcaagacgcccggtattccggccgacgccaagtccgacgacgtgttcgccccgcaggccgcccactgggtgccgtccggcaagtccgtcggtggcatgtcctccggcctgagccacctgcacgccgacatttacgagctcgagaacgactccgccgaatgcggccgtctgctcgtgcgcgtcatgaagcaccccgaagagctcgactcccgccgcaaggaaatcatcgaagccctgaacaagaccgccaagccttacttcggcgacctggcctccatgacctaccttgagtgggcgcagcgcttcgccgaactcgccttcccgtgggtcgacccgacttacgccgaccgcttccagcacctgctgcagcgcatcgaagcccgtgtgaacgacacggactccggcgaattcacctccaagttgttcgccgctgatggcgtttctgctgaagaggcagctgccgctggcctgctgacccacgacgacattctcgccgacccggcccccgcgctcgaaaagctcgcactggcctacccgcagaccgccgaactcaaggtggtcccgaccgacgtggcttggttcccggtgctcgtgcgcgaataccccaagcccatgccgttcgtacccgtcatcgacaacgacctgctgcgttggtggggtcaggaccagctctggcagtccgaagaccagcgctactccgccgattccgtgcgtgccatccccggcccgatctccgttgccggcatcaccaccatcgacgagccgatcgccgacatcctcggccgcttcgaaaccgccgccatcaagcgcgtgcaggacgaacagcaagccgccgatgccgctgagaacgacgatttcgccgcacttggcgaggccaccagcgccgaagacttcatccgcaagtccccgaacatctcctgggtcggccacatcaccgacaacccggcctacggcaccgccctgggcgaccagtactacgaaatccgcgcgtttgacgccgcggccggcaagtacgatctggacatccacctcgacacctactgggacaacgatccggacggcggcacctccaagcacgccgtgcgcgatatcgtcatcccgctcatcgtggaaggcaccgagcccggccgtgtgccggtcgtggaccgcgaacgcctgattccggacgtctacgcgatgctcgccgccaccgcaggcatcggcaacaccgccatcaccggcgacaagctcaccgagatgccgcagcttgacgacaagacctctgacgagcgtccgttcggtaccgcaaccgcaacctacaccctatccgccaacctcggcttcgaccacgaagcggccactggcgccgctctgccgaccaccctgcagcccagccgcatcgcccccgatgcgctggtcggccctgcctggccggcaatctacacggcgctcggctccgtgtacgtcaagggctacccggtgattgaaggcctgctcaacgccgtccacctcgaccacctcatcgaacttgaggtgaacgaggaggacctgctcaagcacaccggcgaaaccatcaccctgaagtcttgggccgaggattacttcgagtccgcctccggccgcgtggtcaccatccacgtgacccacaccgccgccgacggcacgccgcttgcccgcgaaaccgagcgtttcgcgatccg

SEQ ID NO: 2012 - DNA, 13970 bp, Unknown
  R17_18m  MAG No. k141_30284
agagtggtgcaccgatttggcctaccggatgcaccacgtaacgtgccaccgatatcgtcgggccgaacaccctctgaagacactacaaggaaactattccgacagtccaagccgttcggaatcgttgaaaggaagctgtttcggcaaaagaaaagggctttcgaatttcttcgaaagccctgctagcggaggatacgagattcgaactcgtgaggctgttacaccaacacgctttccaagcgtgcgccatagaccactaggcgaatcctccatgctttgcagcgcgcagttgaactgtgttccgcaggcaactcgaataagttaccacaggtttcggataagtgcacgcttcggcgtggcgcgtgtcgcgacgcggatgcgaagaatgatcactgcgagtgaaaggctcactggaaagtcccgcgcaacacccgcacaaggaccgcatgcttgtgcagggcccacacacccgcgcgcacctacacaacccccggtaaagaaatcaccgtgtccaggtgaattttcgatgttcgcccggcgcgcgcccgcaatcgcgcctaggctgttgagtcatgaacgaggggacagcggccgacgtaaccacagcacatggcggccggtcgcgccaatcgaagaaacactcaaagacgtaccgcagcatatccgcgatccttagttggctcacggcccgccgtccgaccacgttatccacatcgctgcgcgcgcgattcctcccttacctgctcacgctcgctatcgcctggctgccgtggctcatactcacctggccgggttcgatgcgcgacgatacgcttgcccaatatctgcaatcgtccggtctgcaccactactacacccagcatccgctgtttgatacgctcacgttcggcctgttctggcatatcggcagcgcactcggctcccctctgatcgggcaggccctgtacaccgtgacccaagcggttctactcgccgccgggtgcgcgcttctgctgtgctacatccgcaaaatcggctcgccgcgctggctcatcggtctcggccttgtctatcttgccaccaactatgtggtggtcggcgcaatcaccacgatgggcaaggactcgttgcatgccgtgttctatctgccgttggccgtgctgttcgtggaggcttgtctgacgcgcggctcggtactggctcgccgcccggtggcattcgcgttcgtcatcctgttgttcgccaccatcgtctccaagcggacggcgctcataatcgtgctatgcgccggctgctgtttgctcgccgtctgcacgcccaaaggcgcgcggcgtcgtgcgttcgcgtgtcttgcggttgccatcgttgtggcgcagggcgtgtggacgccattaagcgcggccgccacgcatgcgaatcgatcgcccggacgtgaggtgtggggcctggtcacccagcccgtggcccggctcgcgcacgatgatcccagtgcgatagacaagattcagcggcggcgactgaacgcgatcatggatctcgactgggccgccgccggcatcaacccgcaccgcaccgatgagaccttccgcactctgcgcgagcaccctaggccaaccgcggcgcaacaactcgcggccctgcaggtctgggtgcagctcggcctcgcgcatccgactgaatatgccacggcctatgccggggtgactcgcggatggtgggacccgcgcgtcaatttcgcgtaccccactgattccgactacctgttcacgcctagctatctcaggcaatgggcgtctttcctgactgaaggtgcttggaagcatacttccgacggagatgccgataccgtggcggccggacggcttgccgccatcgaacatgaccttgcgccgctgaggggtacctccgacaagccgcaatggcagaaaaacatattgcgggcgattcatcggtgggtgcgttcggatggtcatgtcggtgttcgcaaaggcaatccgctgacttcgatggccctgtacgtcacgtggattccgctggctgctggtcttgcgctggcggtgcggcctgcgcgacgacgctacggccccgcactggccgcttacggcttgctggcattcacggtgctgtcgctgtatgcctcacccgtggcactattttggtatccgattccggtattcctcacgttgccgctttttgtggtgttgccgttcacattccgggaaagccatcctctctgagcatagttatctcagatagtgaaataattgcggggttgaaaagcactaaaacgccttctattacctcgcacccgtcaaaaaatcaagactgttgttcaagaatttttttctatagagttcatagttgtttttggaccattcgagtacttgaagtgagaggaattcagcatggttcgtcgcgcctgcgcgcagtccgctgaaatgaacacgatgcgggaacgtgatacgcgcgttgccgtttctcgcgtgcgcgcgaagtcgggcagcaccggtcgtctgcagtcggccacggtctcggctcgtgcatttgcggtcatcgtttttctgtttgcgatgatcgccgcgaccttcctcccctccgccatcattccgcagtccgcgttcgccgtgacgccggcaaccactgccactgctgccaccgtcaagagcgacgacaccaccagcgtcgattacgcgacctgggccgacgttgccaaggccgtcgaagcgcagttgcaggaaggccttaaggaatacaaggacggcaacccaatgggtgccaagtccgatttcggggctgcatacaccaccgtctacgtgacgtccaacttcaacaaagtggtgagcgacaccatcggcgcagacaagcagaccgcgcagcagcaggccttccaggacctgcaaagccaggtgttcacgtcagaccaggccgatcagcttacccagaaggtcaacgacctgaccgccgacctcgacgccacggcccagcagctcgacgccaacaccagcctcgccaacccgaagcagtactccgaagacctccagaagcagatcgccaaggagcgcaaggagctcgacgccaagaagaagcgcaccgaggaaacggccaagacttggaaggaagtcgcggatgcgatgcttccgatcctggacaacgcctacaaggcctatgagggtggcgacgccgccaagggcgccacgctcgtgaacgacgcctactaccagcactacgagaagctcggcttcgagaagaccgtgctgagcgccatcagcggcaaccgcgtctcccaggtggaataccagttcaagctgtgccgctcctcgatgaacaccggcaagcctgcttccgaagtcaagaagtacatcgacgacctgaagaacatgctggccaccgatgccgccaagctcgacggcggcgcggccgatgaggagggtggcttcctcaagttcatcaccagctcggtcggccaggcgttcctgattctgatccgcgagggtctcgaggccctgctcgtggtcgccgctgtggtggcctacctcgtcaagtccggcaacaagcgcttcaccaagtggatctacgtgggcgtgctcgccggtctggccggcgcaggcatcgtggcggtcatcttcatgctcgcgttcggcggctccggcccgctgcaggagatcatggaaggcgtgtgcgcgctcgtcgccatgtgcatgctgctgtggaccagcaactggatgctcaacaagtcctcggtggaagcgtggaaccgctacatcagggaaaagaccgaagccgcggtggcctctgtctcctcgcaggtcgaatccggcgagaaggtggcttcccgcacggtgatttcgctcgccatgctgagcttcctcgccgtgttccgtgagggcgccgaaaccgtgatcttctaccagtccatctacacgatgagccaggatacgcatggcatggtggtcggcgcactcgccgccgccgtggtgctcgtgatcatcttcctggtgattcgcttcacctccgtaaagattccgattggcccgttcttcctggtcacctcgatcctcatgtccgtgctggtggttgtcttcgccggcggcggcgtgcacgcgctcatcgagggcgacctgctgcccgccaactacctgccgggcgttcccaccaacgactggctcggattctacccgtacgccgaatgcatcatcgcccaggtactggcagccatcgccgtcatcgcgctgttcgtggtcggctttgccaaacagcgtaaggccaaggcccggcttgcggccggtgcgagcaagtcggacgcgaaggctgacgaggagagcgcgcaggcgtagcacaacgcccggtgcgaccatctcgcgcaacacaacttgcgacatggcaatggaagcgattccagcccacgccgccacaactaaaaacagataagtcgtgaataatccattcaccacaacagaaggaataagagaaatgatgaagaacaagaagcttgccgctctgctcggcgtgctgctcgccggctccatggctgtttcgatggctgcttgcggttccaccaacaacgcttccgataccaagtcctcgaccagctcctccgacaccgccaagaaagacgactccaagaaggccgacgccccgactgagacctccggcttcgaagaggtcccggtcggcccctccggcaccgccaaggagcaggacaaggccgctggcccgctgaccgtgggcgccgtctacttccagcccatcgacatgtaccctgcttccatgggtctgaaggctgctgacgcttccttccacctggaagccgacatccacgcctcccaggaaggcaccgactacggctacggcaagggcgacttcgtccctgaccttactgtgaactacaccatcatcgacaagtccaccggcaaggaagtcgagggcggccaggccacctccggtaccttcatgcagatgaacgcctccgacggcccgcactacggcgccaacgtcaagctcgacaaggccggcacctaccaactcaagctctccatcgagtcccctgagaagaacggctggatgctccacgttgacccggagaccggtgtcaagaaccacaagttctggaccgagcccatcgaggtcaccttcgacaactgggactacaccccgcgtcagtggtgattgactaagcagacagccccctcgtcagagggggctttacgccgctttagggagataattcttaggacggtctaaaaactcccctcagtccgctttgcggacagctcccctcagggaggggagcctaagatgaacagagaaaggacgcgaatgcttgaacaattcgtggcagtgatgccgggcaccttggcccccgcattgctggtgatgagcctgagcgtgatgctcacggtcggcgaggggcgagataagccgataagctcgcattggcgtctcatcggcctgaccgtcggcctgatcgccgctatcacattcgccggcctgcgcgcctcggccgtgatcaaccagcgcacgttcgtcaactatccggtgctgtggtgcgcgatcattgccgacatcctcaccatcgtcgtggtggtgttcgcacgccgcatcaccaccaattggcagcagcacaaggtgttcatgcacattgcgaacgccgtggccgccatcgacatcgcgctcaccctgttctacgcgctgccggacgtgatcctgcagctgaccatctgggtggagcccggcgacccgatcttcacgtccgacatgttgctgcgcgcgctcggcttcgcgctgggcctggccatgtcgatcatcgtggccgtgatcttccgcacgatgcgttcgaccgcggtgcgtgcctcgttcaccgccgccgtgctcgcggtgctggtgattctgttcgtccggcacctgaccggtgtcatgcagatcctgcaggcacgcggtttcccgatgggccacacgggattcgtggccctcgcctggtcgatcaaccacaacgactggatgatcatagcccaggcgttcgtgttcctgattccggccgtcgcctccgtggtggccggcttccgcatgccgctgaccggcgcgaacgaagccatcggccgcaagcacaaggcgttccgccgccgcgccgtggcctccgccgtctggagcctcgtggccatgatcggcgtcacgctgaccctcaccgtcggcgtcgccgcgacccatcagaccatcactctttcgccgccggaagcctactcgctcaaggacggcgtggccaccattcccttcagccaggtcgaggacggccacctgcaccgtttcgaatacaaggccaaggacggcaccgtcatgcgcttcatcatcatccgaaagaacggtggcgcgtacggcatcggcctggacgcctgcgagaactgcggtgacgccggctactacgagaaggacggcaagatcatctgcaagaagtgcgaggtggccatcaacctggcgaccatcggcttcaagggtggctgcaacccgataccattcccgtacaagaccggccacggcaagatcaccattcagactacggatctggacgcgctgagcgcccacttccagtgagtcaggcaggagacaagaatcatgttctttctgcgtatgattactcgctcgttcacccgacagctgcgccggcgcctgcttatcgcgctgaccgtatgcctgtcggcgaccgtgtccgtatcgatgctgggcgtcgtgttcgacgtgggcgacaagctcaacgccgagctgtccacctacggttcgaacatcaccgtgcagcccaaggcggacgcggtcgtttccgacctgtacaacaccgagtcgggcggcgcggcgtccaccagcgacccgaccgcttttctgaaggagtcggacgcggccaagatcaagatgatcttctggtcgttcaacatcaccaacttcgcgccgcagctcaacatccatgccacggtgaacggtgccaacgtgccggtcgtcggcacgtggttcaacaaggacctcaagatctccaccggcgagaccaccgtcgtgggcgtggaaggcatgcgctcgtggtggcagctggacggcaagtggcccaaggacgattccgatcagggcgtgatcggcaagacgctggcctccgaactcggtgtgaccaccggcgacaccatcaccctcaacaagaccaccgcctcgggcaagaagaacgagcagaaaatcaagctcaccggcatctacgattccggcgacgaggacaacggctcgctctacatcgcctcctccacggcccaggtgctcgccgacctgcccgattcggtcgacaagatcgaggtcaaggccctgaccacgccggagaacgacctggcccgtaaggccgccgcgaatccggccgcgctgagccaggaggaatgggagacctggtactgcaccgcctacccgagctcgatcgcctaccagatcgaagaggtgattccgggcgcggtggccaagcaggtgcgtcaggtcgccgcgttgcagggcaatgtgctgcagaagacgcaggccgtgatgattctgatgaccgtgctgagcctgatcgccgcagccgtggccgtggccaacctgatggtcgcctcgatcggcgaacggtctggcgagctggcgctgctcaaggcgctcggtgccaccgatgccgcggtatcccgcctgatgctggccgaaacggcggcaatctcgctgctgggcgcgattgtgggcgcgttgcttggttccggcgtggcccagctgataggccgggtggtattcggttccggcatcacgatgcggccgatggtgttcgtgctggtgttcgtgctgctggctgtcaccgtgctgctggcgtccgcctcctcgattcgttcgattctgaatctcaagcccgcggaggtgctccatggccgctgagtttatctacgtaggtgtggaaggaggaaaccgatgaccaacaccggtatgttcttcagaatgctgttcagcgccgtgttccgccggcgttcgcgcgcggtgatggccgtggtggcgtcgctggtcggtgcggccacactgttctgcctggcgatgatctgcctcgccgtgccgcagcagatgaacgaggagatgcgtgcgtacggcgcgaacctgattgtcacacccaccgaatcgaccaatgccgacggcaaggccggcatcgacaaggcgatggtgcagcacaccactgaaatggtcaaggccaagggttccgcgaaatacgccacttaccgctacgagaacgtgcgcgtcaacgcctcgccgtacgtgatggccggcgtgaatgcggcgcaggtcaagaacctcaaccatcactgggtggtcgacggctcgtggccgaccgacggcaaggtgctggtcggacgtgacatcgccgacgccatcggtctgagaatcggctccgccatcaccatcggctaccgtgcatccgataacgccagcaccaacggcacttcgtcgaactcctcgatcgaccagcaaaccaaagacggccgcgtttccagcgacatcatggacacctccggcaccgaattccgcgtggccggcatcgtggacaccggcggcagcgaagactcgatcatctacgccaccaacgccgacgtcaacaagctcaccggcatcacgcgcggcgtggacgtcatcgagtattcggccggcgccagcgatctcgcgggcctggtgtccagcatcaacgacatgacctccatgcacgtcaaggcgcagcaggtcaccaagatcaccgcctccgacacccgcatcatcaccatgctgcagacgctgttctggatcgtctcgctggtggtgctggtgctgacgctcgtcggcgtcggcaccacaatcagctcgatcgtctcgcagcgacgcaacgagatcggcctgcgcaaggccctcggtgccagctcgcgcgccatcggcaccgagttctacatcgaatcatcgctctacggcctgatcggcggtcttatcggcaccgcaatcggctacggactcgccagttggctgtgcgtggcggtgttcgaacgctccatcggattcaactggtggctggcgctgatctccgtgctgttcagcgcgctggtcgccatcgtcgcctccatcccgcccgtccaccgcgccacccgcatcgaccccgccgtcgtgcttcgcgaagaataaagaaagagaaacgtcatgctacttgaactcgaccacatctcgaagatctacggcgacctgcatgccgtggacgacctcaacctgaccgtgccggaaggcgaatggctcgccatcgtcggctcctccggctcaggcaagaccacgctgatgaacatgatcggctgcatggacacgccctccaagggctccgtgaagctggaaggccgcaagctggaggacctgaacgccacgcagctggccgacgtgcgcaagaacctcatcggactggtgttccagaagttctatctggtgccgcacctgaccgccgtggaaaacgtgatggtggcccagtactaccattcggtggtcgatgagaagcaggccatggaggcgctggaaaaggtcggcctgaaggaccgcgcccaccacctgcccggccagctctccggcggcgagcagcagcgcgtgtgcgtggcccgcgcgctgatcaacgacccgaagctgattctggccgatgagcccaccggcaacctcgacgagaagaacgagaaaatcgtgctcgacctgttccgcaagctgcacgagcagggcaccacgattatcgtggtcacccacgatgcgcttgtcgccagctgcgcgcagcgcgagatcatgctcaaccatggcgtgctcgtcggtgagaagtggaatgacgaggatgcgcgcaaggcctacgaggcggccggcggcaagcccgcctccacgggtgcacaggtcgagggcgcgcagaacggcgagaccgccattggtttcgctgaccccaccaaggccgcgaaaaccggcggcgaggagtaggaccgtcaggggcatcgagcagtatgtgaggaatacatggcaagctgatggtctctcccccagtcagcttcgctgacagccccctcgtcagagggggcttaaggagcgtgaatatgaccgaaaagaatacgttgaagaaatccgcgacattggcggcggccggactggtcgtggctggcgcgctgctggccgggtgtggcgaatccaaggccacgccgatggacgatgcgtacgccggcaactcgggcgagaccgagaagtcgcaggaagagcagtcgcaatcccagccgaacggctccgatagctccgacggctccgattccggctcatcgcacaacgacccgtccaccaccacgtccgacaagaaggacaccggcaactacaaggacggcaactactcgatcaacggccagtacggcccggtcggcgaggattccatcgacgtccatctgaccatcaaggacggcaacgtcgagaccgtcaaaatcattgggcacccgttcaccacgatttccaagaaccatcaggacgacttcgccaaagccatcaacggcgtagtggacggcaagcccctgaagggactcaaagtggacaaggtcgccggtgccagctggacctccgacgccttcaacaaagccctcgaagtcgcccgccaggaggcttcgattcaggagtaagaccgctacttcagcaatgctggccacagcagatcggccatgcgcgaggcccaggcggtgtcgtcgtccatcgctttgccctcgatggcctcatacgccaccaaagacccgataatcgtggacaacagcaacttctcgtcaacgtcctcgcgaaacacgccctgcgcgactccctgcttgaggaacgcccccacacgctccagccacggggtcaccacctggtcgacgatgtgctggaagaactcggcctcactggacaatacaatgcccacgcgcttgacgtcgatgtcgttgtcgcgcacccaatcgaccaatcgctgcaatagttgcgtgaaatgctcacgcgtggggctgggcactgggccggaatccgggatggccagatacatcgcgctgatctcgcgcagcagctcgtcggcattatggtatcgacggtaaatcgtggttttggccacgccggagcgccgggccacctcctcgatggtcacgccgctgatgccgcggtccaccgcaatctgcagcgtggctcgcatgagcttgcgatccgtcgcctcgcgcgtgcgctcaccgcgcggtgtcgccgtcgtacctgtcatctccgtcatctcttctctccgaaatatgctcccgtacgctcccgttggcgggagctggctggcaaagccagactgagggtggtaagtccatgccgtttgtaggcaacccccggataatacctactagcccagcactttagtgctctcgactttggccacataccactggttgaaccgcaccagtggcttcctgagcaacagcccaagcaacagcagcggcggcacgaacgccagcagcattccggcagcccgccagtaatccatgtcgtagatgccggcgatggccgcacgcatcatcgtcaccgcatgggtgagcggcaagaacggactgactttggcgatgaagtcgggcaacatctgcaccgggtaggcagcgttcgcacccgaaatctgcacgatgagcataagcacgccgattgccttacccacattgccgaaactcaccaccatcgtataggtgaagaacgagaacaccagcgaggccagccatccggacaacataaacagcagcggatgcacggcctgcacgcgcaggaacagcagatcgccgccgagcgacaccgtggattgcagcagcgcaatcagcgcgaacaccccgtaatgcccaaggaagagccgatgcggccgcggatcgcccaaggctttgcgcgtccggcgagacacggtggttttcagcgtcaccaccatcagcagcgcgcccacccacaacggcagcagcgtgtagaacggcgccatcgacgaaccgaaattcgccaccgggaatacggccttgcgcctgagctgcaccggcgcggccaacgtactggccagcgtttcgggatcattgcccagcacctctttggccatgctcatatcgccactgtttagtgcgtcgctcagtgtgctgttgaacgaagccagttcggcaccggcggaacgcagtttgccggacaccttgcccaaggtggtgcgagcgtcgctgagcatatcgctggcgtcgtcggaagtccttttcaggtcgccgagcgtggagtccaactgggtggcgccggaactcagtatgccggaggcgtcagagacggtggacgacagggagtcgatctgcggtttcaccgtggccgtgaaatccgacttgatattggcgatactgttctgcgcttgatcggccagatccttgacctgcgcatgctgatcctgcgcgtcctgattaccttggcgaatatcggtcgccgccgtattcagcgcttgccgcagcctgttctgccgtgcgattgaacggtcaatcgccgtgatgatggatgagtcgttgcccagtatgccggccaacgtgttgcgaatttcagtgtatttctccgtctgcttgccaatggccgtggcttgacggtccaattcgtcggcggccgtggtggcaccatcattcgcgtcggaatacagcttgtctatggaatcggacaccgcgccgaaactggaggcgctcgcgtccagtgagctgctcatcgcgtcagcggtggtgcccagggctccgaccacgtcggtgactccctgcttggcgctggcgagatccttgcctccttgtttggcggcagaggaaacctgcgtgatcagcgagttcgaggtgtcaagcaaggcgccggccgtatcggtcaatgcgctgtatgtgccaagcaaatccgccgtatcgtcaagccgtgtggcgaaatcggcgatattggcgttgaaggtattcagttgctctttggcttcgggcttggacagctgatcggccagcgaagacgcgatttccagccctgccgaagtgatggtcttggcgaacgtggtgttgatttccgccgccacctcgtccgtgccctcgttgagcagattcggtgccagcgcgttcttcttctcgttgcggtaataggtcagttcggcatgctgcacatcgtcggagaagaaggtcatcatgtctttgctgaacgacttcggaattacgatggccgcgtagtatttgccggatcgtgcgccctcgacggcatcggctttggacgtgatcgtccaatcgagctgactgttggcgcgcagcgcgttcaccacctgatcaccgaccgtgactttcaccgggatcaggtcggaacgatacccctcatccacattcgccaccgcgaatttcaggttcttcatattcgagaacgggtcccagcatgcggccacgttgaaccaggtgaacaggccgggaatcatcaccaagccgatcacgatgatgatggagaccacgttgctggtcaggcgtttgatgtcgccggtaaatagtttccacatggtgttcatcgtgcgtgcctgccttccttggtcggcggaatagtggggatgattgcggtaacggcggcgctcgggtccgcttcttcgtggcgttcggcggaggtgtcgcgacgcttggccttatgcccgtacagcatggcgcggatcgactcgtcggagaggttgccgagctcggtttggcggcggatggaatcgcgcatgaattccacgaccatcaggaagcccatgatgatgagcacccatgccagccatgtgcccatgaccacgattttctcgctggtggtcagcacaaacacgataatgagcgcggccggcaccacgaatccggcgataagcgcacccagcagcagccggggataacggtaggcgaatttggcggcccgacgttcgatggcatgacggtattcgtcgcggtcggccagtgccgcaatggcctgagtgacacggtattcgctgccag

SEQ ID NO: 2013 - DNA, 19538 bp, Unknown
  R17_18m  MAG No. k141_30705
atagtcgaacggaccacggcggcccatgccacgggatgccaccgcaccggcattccggctgcggcaccgggcatgcagcgtcacggccgcatgccgcgaggcatcacagcttcgcggcgaaccagcgcgtgatcgtcgtcggatgcgtgatcgcggtgcccaccacggcggcccacgcgccgcattccatcacgcggtgcagctggtcgggcgtgtggatgcgcccctcgcacagcaccggcatgtccgggaacgccttgaccatccgctcgagcagttcgaagtccgggccgtcggtcttgagacgctcaccggtgtagccggacagcgtggtggagatgatgtcggtgccggcctcgaccgcacgctcggcgtcggcgaaactgccgcagtcggccatcgtgatcacgccctcgtcgtgcagtgcgtgcacggtgtcggcgtagctcagaccgtccgggcgaggcctgccggtggcgtcgatcgccacgatgtcggcgcccgcggccgcgcagcaacgggcgtggcgcagcgtcggggtgatatagacgccctcgtcgccctccttccagatgccgatcaccggcaccttcacctgtcccttgatggcagcgatgtcggcaagtccctgacagcggatgcccaccgcgccaccctccaccgcggccatggccatttgggccatcgtctcggggtggcgcagcggctcgcccggatacgcctggcagctgacgacaagcccgcccctgatcttttcgattacctgatgcatgatgcgcttcctttcctcatgccttgacattgcttcatatgggtgttgacgattgcgcgacgaattgccggagagcgccggctcggggtcctcccgaggggagtcccagcccggcggcggatcacgggcggccctgcgcgacatgcctgcgcacggccaccgcggcgccgatcagcggagcggcgccgcccagttcgccctccaccagcggcgcggacctgaccagctgcaatgcggaatcctcgaatcccgcgcgcagggcgttccaccacagggggccggccttgaccaccgacccggaaacgacgatgacgtccgggtcgatgagattgcccatgccgccgatgcactcgcccagcgcacgggcgctgtcctcgatcacgccgacggccaggggctccccagcggccgcgcgcgccgcaacctgggagccgtccgccaccggttcgccctcttcggcatcgcaacgggcgttgtagaggtccttcagccccgtgccggacgcgaccggctcgatgtgcccctcgagggtgccgcacgagcataggaatccgcggcccagcgcgctcggcacgtgccccgcgtggccggccacgccgtgcgcgccggtgaacagggcgccatccaccacgatcgcgccgccgatgccggtgcccacgccgatcgagagcaccacgcccctgccgcgtccggcgccgtacgtcgcctcgcccagaccgtgcgcgcccacgtcgccgatcatgtgcaccggcaggtcggtcacggccgcgaacgcgtcgtagatgcgctggccgcgccagccgggcaggatgtccgtggcggagacgatctcgccggtttcactgtccggcacgccggccgccgcaatgccgacgccggcgatcgccacgccctcggcctcggcgcgctcaagctggcggacggcgaaggcgacgatgcggttcttcaggtcctcgccgccgcgcgcggcctcggtcgggatttcgcagcgggccgtcacctcgggcctgccgtccgcgcccgcgtttgcgtttgcgcttgcgggcaacgtcacgaatcccgaggcgaccttggtaccgccgatgtcgaaggcgaggtaggtgggcgccgcccccgcgctcatgcgacgaccgcctcgtggatgcgcgcgagatagtcgaggcgctcctcgaccgtcgcggccttgggcacgcacaccttggcgcccagatagtcgagcgggcgctcctgcgtcccggcggcgcgcacggcggccttgatggcggcggcgtccatgagcgaggtcggctcgtccgggttcatgggcaggtggccgtcgatccagccgtagccgtactgggtctcctccgggccggcgccggagaacatgaggccgctcagtacgccggccttcgcggcggcctccacgtgcgccacggcggtttcgggtgtgcgcccctccaccaccgagcgtccccagttgacggtgagcccgatgccggccgacccgcacagcgcgatctcgtcctcaatcggcaggaagcccttttccggcttctgcccctcgacgtacttgtcgcagtgctcgatgaccagcttggcgccggaccagtccagctgcgcgagggcctgcaacgaggcggtcatcgcgtcgcggctggcaatgcgcgtgggcgccgtgtggatttcgacgaacttgacgtcctggctgccccgccactgtgcaaagtcggcgagcgcgtcgcgcagctgcttgaagaacgccagagcgaaccggcgtccgtcctcgtccgggctggccagtccgaagttcgggtccttccatacgtgctgcatggtgcccggaatggcagtgaccgtattgttcttccaatgcctgggcagttggccggcaagccagatgcggtcggcggtttcggcaaggtcccccgggaaggggatctcggtgccgtcgatccagggctgaccgcccagcagatcgtaataggcttcctgggcttcgcgcccctgcggcaatgacgcgtacgcgccgacgacgaatgatggcatcgctttcctccttgaaatgcccgatgcgggttcgctgagcattcctatcgtactatcatcagacatctgatatctaatctgttaaaggcagattacttcggcgtgtcttctctcggcctgccgaccttagcatcatgcattcgcttactatgcttgcccccctggaggggaaccagaaattatcaacaaatagtgacatgggatgctaaccgcggccagccggtgaaatggcatgcgcttatacggtttcaccggctggcgcccgctacggcggagttttcgtatggccctgtacgatttcaccggctgacgggcacccagccggagtttccatatacggtcatacgatttcaccgtcttagccgcagccagccggtgaaatcgtatgtggactccgtgcggcaacaagtcagcgggcaagcggcacggccccgacaagccgcgcaatccgctcactaacggaacagcgagacgcccctgcgggccatgcagaatgcgttgccaagccacgtgtgcttggaattcggccacaccgcaccgagcctcggggcgttctagctcagccagatgctgggcacgcggccgtcggcgctgcgcgagcccagcaggttgaacccgtttttctcctgaagccagcccggatgctgcgtggcgatggccagtccctcctcgagcgtgagcggaatgcgctcgtcggagtcaatgagcttgcgggccacgtcgggctcgcggtttgtgtgtacttggtaccggtgcgcggttccacgacgatgtagaacggtccctcgggcggctcgaagccgtcctgcggcaaaaagctcgcgatgtcgcgcggcggcatcgtggcgaaaccggccatgcggttgatcgacgtacgggaaatcagcgattcgggcgacaccagctcgcgcgtgggcgccagcaggatgcgctcgtcaaaatcggtatgctccagcgcctcgatcagcggacgggccagggagcggaacgccgcggcgctcacatccgccacgtccgggtaccccaatgccacgatgcggtccaactggcgctgcgcttctaccgacgccttcgacatgactcccagtgcagagcatcgcggcggggcggcgccgtgacgttccagccggttccggcgtcccgtcgcaccggcgatccggcccagcatacgggcacccggttcttcttgttccgcccgattcgtaagattgatggatacgtgtggccatttcgctacggctgcccgaacgtgaaatcaatccgtcaaacccagaaggttgttatgtccgaaaagttgaaagtcggcattctcggcgccaccggtatggtcggtcagcgttttatcacgctgcttgagaatcacccgtggttcgaggtggtcacccttgccgcttccgcgcacagcgccggcaagacgtatgccgaggcggtcggagaccgttggaagatggaaaccccgatgcccgaatacgtcaagaacatggtggtcgtcgatggcgacgatgccgagtccgtggcctctggcgttgatttcatgttctctgcggtaaacatgccgaaggaccagattcgcgccattgaagagcgttatgccaagaccgagaccccggtggtctccaacaacagcgctcaccgttggaccccggacgtgccgatggtggtgccggagatcaacccggagcacttcgaggtgatcgagcaccagcgcaagcgcctgggcaccactcgtggtttcatcgccgtcaagccgaactgctcgattcaggcctacacgccggcactggccgcatggaaggaattcgagccgcgtgaggtggttgtgagcacctatcaggcgatttccggcgcaggcaagaccttcaaggattggcctgagatggtgggcaacatcatcccgttcatctctggtgaagaagcgaagtccgagaaggaaccgctcaaggtgttcggccatgtggacgccgaaaagggcgagatcgtgccgttcgacggcgacctcaagatcacttcgcaatgcatccgcgtgcccgtgctcaacggtcacaccgccaccgtgttcctgaacttcggcaagaaggccaccaaggaagagcttatcgaccgtctggtgaactacacgtccaaggcttccgagctggagctgccgcacgcgccgaagcacttcatccagtacctcaccgaggatgaccgcccgcaggtcaagctcgacgtggactacgagggtggcatgggcgtttccatcggccgtctgcgtgaggattccatcttcgattggaagttcgtgggtctggcccacaacaccctgcgtggtgcagccggcggcgccctcgaatgcgccgaaatgctcaaggctctaggctacatcactaagaagtagttgaatctcgttaaaatcgcaaaagccctccgcaaggagggctttcatcgtattaggcgcggaattcgcggctcagcggccagtaccgccgtacaccacggcttcgatctgatcggcatcgagaccgtatgcagtgtgcagcgccttgacggcgtcgttgagctgatcgagcggcacgagtgcggcgatacgaatctcggaagtggagatcatcagcacgttgatgccctcatcgctcagggcctggaagaacttggcagccagaccggcgtgggtcttcatgccaacacccaccacggctaccttgccgacgttggtgttcacatcaaaggagtggtaacccagcacttcctgcttgtcgagcagcgtgttctgcacctgcttgacggccgattcgggcacggtgaaggagatgtctgcagtgccaacggatgcgccggcctgcacgatcatgtccacgttcacgtcggcggtggccagctcggtgaacaccttggctgccatacccggctcgttcggcacgccacgcacggtggccagcgcctcggaacgatcgtgggcaatgccggaaatcaccggtgcctcggggcccaggtcagggaacaggtcgcccatggatttcgcttcttcttcagtcatgtcttgccttgtcttagttgaaattacttacgattattgttcgctgtagccgcgctcagtcgaggttcggcagcgtgcgcgggtcaatgccgtcaggcacaaccagcgtgccggggcgacgggagaacgaagagcgcacatgcagcggcatgttgaaacgctgagcgtactctacgcagcgcagtgccagcaccttggagccgcaggaggccatttccagaatggcttcgtagccgatggaaggaatacggcgggcggaaggcacgatgcgcggatcggcggtaaagatgccgtccacgtcggtgtaaatctcgcagatgtcggcaccaagggccacagcgagtgccacggcggacgtgtccgaaccaccgcggccgagcgtggtggcgtcacccttggcgttgatgccctggaagccggcaacgatggcgatgtctcccaatgagagcgcgttcttcacgcggtccggtctcacggccttgatgtgggccgcgccgtaacgggtgtcggtgaagaagccggcctgctgaccggtgaaggagtgggcgcggctgccttcggcgtgaatggccatggccagcaggctcatggaaattcgctcgcctgcagtcatcagcatatccatctcgcgctcgggcgggttggagtcgatgctcagcgcctgatcgataaggtcatcggtggtatcgcccatggcggagaccaccacggccaccttattgcccttcttctccgtctccacaacgcgcttggccacacgtttgatcgaatcggtatcggcgaccgacgagccgccgtacttctgcacgatgagagccactgctgtcctttgttcttctcttagggatttgtttggtcgatattctacgcaaacgcaacgattataagggctgtcgcgttcaccccgcgaccccgcgccggcatgcggacacgggtatggcctacgttgttcagcaaatattcaagttttcaccggtggttctttgagacagccgcatccatcctttgagattcgagcggttaactatcaattaccggcaaacgaaagcaaaccggcgaggtttccgcagaaccccataactgaataccttcttcttcctctctccttttcaaggcccggtcccgctctattgtggaagttggaccattttcgttgtggaagttggaccatccctattagggaagttggacactagattacgaactagactttttcggacttcttatacccctacattgcccctatatggcccctatatggccctcgtcggcatgttgcatgaaaggcttggtgcggagtaacgtttcgcagtgtggcacgtgcggcgttgccacttgcggcagcacctatgccaaccacgactaagacgggccggccgtcttgtataagcaaatcatgagcagatcaagcgaaggaacaggcgactatggcattgctgcatcgacgttcgacgagtaaccgtgcctcacagaaaatgcgggaaaacaacgcggccatgcctgatgacacatctgcaaatgacaacgtttccccagcgcgtcccaagcccacagcattcgttccaactccatttgacgaagtcatcgatattagcgatctcgtggccgagcgccgacgcctgcaacgcaatctgtgggcgatgcgcatcatcaccattgtgttgctgatcgccgcaatcgccgtggcctgtttcccgctagcgttgcaattcgagtccgaccgcaacttggccgccaccacagccaccacagccaaagaagtagccggctggccttacccgcaggcgaaagacaagctcacggcggcccgcgcatacaacaagaagctcgctgaatccggccagcccatcttgggtgaagccgtcgatccgttctccgccgcccaaggaggatcccaagccagcggcgaggattccgcctcaaagaaagacaaggaataccagtcactgcttaataccggcaacggcgtgatgggcgcaatcaaggtgcccaaacagtccatcaatctgccgatttatcacggcacttccgaggaagcactggcttctggtgccggccacttgtacggcacgtcgctgccagtgggaggtaaatccacccattcggtcattaccgggcaccgcgggttggttgaagcgctgatgttcacccgtttggacgaggtgaaagagggcgacttcttctacatcgaagtcatgggcgaaactttgggctacaaagtggaccgcatttcggtgattttgccggatgacacgtcgaagctcaagattgtgccgggtgaggaccgtgtcaccttgatgacctgtacgccatacggcgtgaacacgcatcgactgcttatctccgggcaccgcgtggcaattccgatgccggcccccgagccgaatgacgtgcttgacgcgcgcaatatcgcccttggtgttggcctgggcatactggcggcaggactgttcattatctggttggcacgacggcacaaggccgcgcgcatcatccgccacggcgcattctggccgtggatgcgccgcaagggcgaaagcgccaatgatacgctggcctaggcctcacgccgaccggccagcgccctgcccagcgtgatttcgtcggcgtactccaagtcggagcccaccggcaggccgctggcaagtcgggtgaccttgacacctacgggtcgcaatagctgggtcaagtagctggtggtggcctcgccttcaatattcgggtcgagcgccataatgacttccttgacctcatcgccttctaagcgtttgagcagactgggaatacgcaggtcggcagggccaacgttggccattgggttgattgcgccgccgagcacatggtataggccgcggtattcgcgcgtgcgctcgatactcatcacgtccttgggctcttcaaccacgcagatcaccgaacggtcgcgtctcgggtcggcgcataccgggcaggggctggattcgcacacgttgccgcaaatatcacagaagcggatcttggccttgacctcctcgatggcctcggccaaatcgcgcgcttcatcttcgggcgcggacagcatgtagaaggcgatacgctgcgcgcccttcggcccgatgccgggcagccgcccgaaagcgtcgatcagtcgctgtattgcgccgtcataagcaagtgccatgggtattcctcgttattcgtcctcattattcatccgagtgcttcttggcaggctggatgttcttggggttcttcggatcatctgccgcgaattgctcgacttttttgacctcgaatagctttttcagatcgtcaagattcatggccgtcgcctcgccgagcgactggtcgttcatcgagtattcgtcgtcctcggccgcgacttgcggttgcggctgcggctggctattccacgggtcggcattcggcgtcggctgtgcgggctgcggttgattccacgggtcatcgccggcagccggctgcggaaccgattggggctggttccacgggtcatcgcccgacatattgcccgacatattgcccgacactgtctgaggaaccgaagaagccggagtctgggactgcggctgattccacgggtcgtctcctggctgcggagccgcctgagcatggttcccctgcggctgattccacggatcatcgtgaggagactgctgatatggctggttccacgggtcggcttcgaccggttgcagtgccagcgaggccgtagcctgagattgcggctgattccatggatcatcgcttgcgccggcaactgccgtagcgggagctgcggtggctggctgccccgtggactgtccagtgggtccagcggacgcaacggacgcagcgggtgcaacaggagcagccggagcggcccacggatcaacaccatcactgatgtccggaaccgcaacatgcttcttgtgatgctcttcgggcgcaggcgcagcagcgggctcgttaggtgcgaacccgtctgcagattgcggtgaagcgttgcttacggccggcttggcccaagggtcatcgtcactccagctcttcgccgccgtggatgcactggattggccggctcgatggctgtcgtccgtatcctcggcttggcctgttgcagtcggcttcggagctttcggctcgctccccatatgaatgcccagacccgcgcccaaactcgacgcggccaatccggccttggccatggcaatctgctgcttgaccttggccaattgctccgggctcatacgtttgacggattcgactcgctcgccattcgccgcgaccgcagaaggtgcaataaccgcattggcaccgaactcgttgcgcacggcatccaacaccacggacgccgccttcttaccgctgttgtccacggccaaggcgaaagcgtgctggctcagcgacttgtcgaacgtcatcgacaggcaaggcagactcttacggttgggaccgaattttacggtcggcaccttgtctcgtgacacatattcacgaatggtttccggcaaagcggcgacggctgcatcccacttctcgtcgatggaccgattatccgatgccgcaggcgaggtcaccggttgggccgggacggccggcgacgtggcgggagcaccccaggcattggcagcagcagttgctgcggcaggttgcgcagacggagagcccgcgggccggtcgctgactgggctgctgacagggccattgtctcccacagcggattcatgggaagcggtgctctgaggcgcggctgcttgctggttgcgtgcagcaccggagaatccaccatgtgaggctccggcaaacccgcctcgcgatgcgccggcaaaaccactggcacccgtaccggaagcggctgacgtagtcgaagtcgaagaagcagccgcaggcggcatgccagaagaagctggcgcgggagcggctgttgcaaagcctgattcactgccggccaacaatcgtgcggccagcagttccaagcgcatacgcggagaaatggctccggtcatggcacccaacgtagtgttgatgatgtctgccatggcggtcagtgcgcccagtcccagcgccttggcttggcggtgcagatcgtccatatcctcggcctcagccgtgtcggacagcacggattccgcacggtccccggccaacgtaagcaccagcagatcacgcacacgagccagcaggtcttcgacgaatcgtctcggatcgaatccgccgaccacgactttctggataacgccgtacagggcttcgccgttgtgattgattaccgcatccactgcctcaccgatcagcgcctccggcgtgaagccgagcagggctacagcggcatcatgggtgataacgccttcgaccgaaccaaccatcagctggtcaagcacagacagggtatctcgcatggagccgccaccggcgcgcatcgccagtttcagcacaccgggctcgggcttgatgccttccttgtcgcagatcgtctccaggtagggacccatgacttcctgcggcaccagacggaacggatagtggtgggtgcgcgaacggatggtgccgatcaccttgtctggttcggtggtggcgaagatgaacatcacatgttcaggcggctcttcaacaattttaagcagcgcattgaagccctgctgcgtgaccatatgggcctcatcgagaatgaaaatcttatagcggtcgcgcgcaggggcgaaaccagcgcgttctcgcaattctcgagcatcatccacaccgttgtgcgaggccgcatcgatttcgaccacgtcgatggaacccggaccgccggtggccaggtccttgcagctttcgcattcgccgcaggggtgggaagtcggccctttggcacagttgacgcaacgggccaggatacgcgcggagctggttttaccgcatcctcgcggccctgagaacagataggcatgcgtaagcttgccttcgtccaaggcgcgcatcagcgggaccgtgacttggtcctggccgatgaccccttcgaaggtgtccggacgatagcgacgatacagtgcaagtgccatagctactaacctacctttgccctcagaattaaccgataaaaagtcaagataaaccgggctcatagctgccgaatcgggaaaactctttatattccaacgacattcatctgacaacggttaccgcatttttattgttattaaccgctttctttgtattaacatagtgtcaataacggttgtagtcaggaggtacccatgagcgatatcctcgacgagaaacgccccacccgtggcgatgcccggcgcgacgccatcgtgcaagccgcgcgcaaggtgtgtctggaaaaaggcttctccaaaatcaccgtttccgacatcgcaagcgaagtcggtatgacgcgttcgctgttctaccactacttcgaagacaaggaagccgtagccgacgcagtactcgatgacgtcatcgacgaaatcctcaccacgttgaagcagtggaaccaagcgcgcgaaacaggcaacgtgaacaaggcattagacgacatcgtgcatgtgctccgttccctaatcgccgacgagagccccttctcaaaccgtatgatccaagatggcaacgccgaactgtatatcaagttcattgaccgcgcggcggaccgtattgccgactacattgcccagaccaccgtacgtgatttcgagcagatgcatggtctgccaatcaccaacgtccatgagacattcttcacgctaatcgtggggcttatctcgctggttcgctcgcatccgaacatcagcgaccgaaccatcaaagaggtcatggcgcagacgctgcatatcgaaagctatgtcgtctgaggtctgacggccattggctctggtaccgctctcccgcactcccctcagtccgcttcgcggccagctcgtccgcaattgcggacagcctacggctgactttcttctggttcgactatcgtcgaaccctcgcctacaaacatcccactgggctgtttgctttacggctcagcctaatgaggggagccaatataatcaggtcaggcgaactggccggttacggggtcgcgaccgtctcgggcgatggcgtcgagcacttcctgtcgggagtccacctcacgggcggctacggccggcggtaccagcacgcgtagcgcgcagtcctcggccactaccctgaatggcagatgcccgatgtattcgccgtccgccatcagcaccggtggctcgtcgccttctgcggctcgcgtgacttcgatctcgcgtatgcgcttccacccgaacacctttgaggcgagcagcttgccgttataggcgttcgagatggccaccgcacattcgccgaagttcggcacatgattcatccacaccaggtccaacagcccgtcggagaagcaggagtacggtgagacctcgatgccgccaccgatatgacgcgaattcgcaatcgtcagcaacggcgtgatgatgtctcgttcatccgtggtaccgtccgccagcgtggccttgacgtggtacccataacgcttcatatgcgtcagctccaccagcaccgccgcaaaatagcgcatggtgccggtcggcagatgcgaatgattcgcacggtcgttgatacttgcgtcaagaccacaggacagcatgcccgcatagtaccggtcaatcgggtgctcggcagacttgttctcccggtactcgtattccccgccagtggatgggttcacggcatagccaccatccaaagaggtcacgcgtcccatgtccacatcaatgtgtgatccgcgcacgatagcgccgacgataccttccactgcggtttcgatgcgattgaccggcagcttaagtccccgagcgaaatcgttgcccgagcccatggccacgatgcccagcggcttaccgccgcaacccacggcattggcaccgagtgcgatcatgccgtcgccgccgaccaccaccagatagtcgtactcgtgcgcgcgttcacgcgcctggttcagggaatcgtcgaaacttacgccggtgatgtcgatgacgtcgaagttatgggcacggccggcgtcctccagcagtcccaatactcgcgcatccaccttggcaccacggcccttatcggaagtgggattgcccaccatggccaccacgcgacggcgttctgtgcgttcactctcgctcatgctctcaccttaaccaaaggtccagaagcccgccagagcatcagtgcttacggtccattattgtgataattgtctccttccgtacaattcaccggtccggcccgagccatccgctccacggatgatgccaccggaaccatggtttccaccttgatggttaccaacacgtcttcatcccgcacggagcaggagcccagcgtgacgccattcgcttcagccatgtttgcagcaagcgcgcatggatcaccgatatccacatgccacagcgcatacgcggcgtcaaaggcgatgagatcggcgagggaacgcgctcgattctggcagatcatgaggttgcccacacttgccgccaccgcgagcgcaatgcccaccgccataaccagcatggctccggccatcgtgcccgatccctcctcataacgcattccctgcaccgcagttcctttctattgcggccgcccagccagcagccgaccagttattggcttatcgccgtagcgttgccggtgacccgcgttggagtgacatccagtgggccgggcagtaccgaacattcgaccatcacgctcgtcgattggccgttgtgggcaatgctgacgcggggatctccccctgcaacgtccgcagctatgctgcgcgcggatgattcgtcaccggtaaccacaaactcgcgtgcagccgccgtcgcggcaccttggcagtccatggaaacgatgaccacacgtcccattgccagtatcagcccggcgatggcgataacgctgggcaatacgatcgcgaattcggcggtggccgatcccgtgcataggtctggcggcagtctggcgagcctccaccggcatctcatggtcttcatggctgtcacccgactttcagagcctgtttgatgatgttggtcagcaacgtcttgatggcatccgacttcaggatggcgaccagcaccgccgcaaagcctgtagccgcaacgagtacgactgcgtattccgcagtggctgcgccttcttcgggctcagccatgagggcgcggatgcgtgcgtccatgaggcatagccgttctttcgccttggcgttcagcgtggccacacgagccttgctgtgcgcaaagatgccggcctgcccgtcgacgatgacggggataggggtattcattggcgttcctttcggtaaggaggggaagctgcgcagtggcttcgcaccttccccatgcgtatgtgagtggttggcccccgcgccgggttgacgcggggtgcataccactgtggactatcaacgcttcatgcaccaggaaaaacggggtatgtggttctagcttgccgagttatccacacctcgacgtgtcgtccaccacaaatgtggataaccaaacgcagccaagtacaataccgagcaatacaacaagattcagcctaagcgcactcagttcacgcctatattcacatcatgaaggacgcaatcgccggaatgactcctaccagcacgaatgccggcagaaaacatagccctgtaggcatcagtagctttaccgacagcttcgcggcattccgttcgatagcagcacgctcgtcacggtccagctgttcaatggcggattcgaggcgcacaccaggcatatcgccatgcgtccatgacgattccaaagccgattgcagcaggccaagatctcgttgcgtggtattcgtatttcccttggatggactatcagctggcgcaccctcatgctgaacagccatagcggcatgccacgcatcagcccagggaacccctctggtcagggagttcccgacctcgctcatgcgagcgccgcagtcgccgccgacggctttgcccaccatgtcaagcgcccggggaatcgaggagccctgacgcaaggacacctgcaacatacgcaatatgagtatggtccatgacgacccgcaatcatgcgctacggccggctcctcgcccggcaagcggctgtcatgacgagacagagccttatacagccaaccagcaatcgccgcacagcctgccgcggcgtgtacccacaccgtactcataatccgctgcctttcaacaatgcccgcatccatgccaagccggcagcataacaacatcctcccaatgtcaagcagaccacaccgcgtggcgatccaagcaagaacgccaatggtctagctcccagaagctcgcccaatgccacagtgacggccggaagcgcgctcagcagccccacagtggctttaggaacggcacatgcttgcgatcgcaagttctgcatcagcctcatctgccggtaagcagtcaataccgcttccagacatggcaccgcttggcaaccgagctcatcgctcaaaaccgctgcggcggcgaccccgcgtgcagcttcaagtacctgcgctggtgattcgtcgggcagacgccgctgttcgaacaccgttatgagccgttccacagtaatgcgatgagtggcgaagcgtctgctggattgttcctcgaatgcttcaaccaatgtgccgccacctcgcaatcgcgcgatggcggacgtaatcacctgcgcaacgcccacgcgaggtgagtcggcatatcgaggttcgtttatggctgcggaatcgaccgcgcgcccgcggtaagccagccggtacagcctcccggacttgttccccggccatatcagcacggcgagcgccaccagaacagcacaccacatcatcacccaccaccactcggcctgggaacgatgccccatcgttcaatgaagtgcccccattcggcggcataccgaggaggatggcagccattccataccgccagcggtgttcctgccagttcaccatgtgctacgcgcagttcgccgatctgcgtgatacgccgctgtccgttcactcgctccaaatgcaccaccgcgtcgaaagcgcctgccgccagcatggtcaacgcctgtggactgactccggcgagtaatccaagcgaaatcagcctggacggtactcggttcacgccgtccgcatgcacggtggtcatgccaccgtgatgaccagaattgaacgcgcgcaataggtcgacgatttccgcgccacggcattcgcccagcaccacgcggtcggggcgcattcgcaacgtcgctttgaccaagtccgccaggcttatggctccgacgccctccacattcgcctcgcgtgttaccaacgagacatgatcgtcgcgtcccagttcccccagttcacgaacttcctctacggtgacgatgcgctcgttcacgtcgcattgcgccagcagcgccttgagcaaggtggtcttgcccacgcctgttccgccggtaatcagcactgtggcatgtttgcgcaccaatcccacgaacgtcggcagccaagcagccgggaatacgcctaatttgctcaggtgctgtagcgatgccatggttcggtcagggaatcgtatggaaatcgcggcaccttgtggcaccaatggggcaatcaccgcatgcacgcggatgccatccggactggcggcatccgctatcgggcaggcatcatccagtctgcgcccgagctgcgcgcacagttggacggcgtattctcgaactacttgcggcgagcggaacggcacatgcaatactgtttcgcgcatgccattgccgcggtccgcccaaacgcggccatcacaggtcaccgccaaatcggtaacctgcgggtcagatgccacgtcatccagcagaccgaagaatatggttctgagcgctgtgccagcctcattggctcgcgtgctgacggcagccatagcatcactggtccttgtgagaagctcccgaaaccgggcgaatggcctgttctacgagatcggcaagcaagttcatggctttgcgactgcctttggtcaccgatctgatgccgaggccttccagtacgtctccgcacagattgacacttggcttgatgggccccaataccgtggcagtcaaatagtcctgcgcctcgccaatacccacgtggcctctcccacgtggagcgccacgtggttccacacctacgatatgtggcgcttcacagccccatgaatccaatctggaccggtgcgacttggctctggccagccccattaccgacaattccgcggcaatcacctgcaggccactgcgcagatcgggtacggtctcaatgagtccaccctgaccggcatctacgatgacaacgtcgttcgtttccgccaaagcccgaatggccgcttgaacttcccaccagtcaggctggcgcgcgctccaagggtcatagggaagtactcgcacaccctcccacatcatcagctcatggttcatcgcctcaccctcgatacggccgaggggcgcgtcgacttggctgaaccgcaagcccggctctcgttctacaccaagcagcaggtcaaggcatccggccacgaaatcagcgtctatgagaacgcagctgtgttcacgtctcgccaatgtccatgcaagcatggaagccatgacactcaaccccacgcctccatgacctgacgtcatcgttacaatgttatggaagctggtgtctgtagttagggcgagtgccggagcctcgcccgatctctgccgttcgcatgaggccaacggcctgggcggcggagtgtagtagcgatacgctggaattggcgcatcgtccgtgggcagcggaatgcccggaggtgctaccgctggcgaggtgatcctacgcgccacgcggggtgtggtgttgctattcataagccgattgaaacgtgtccgagttcaatgctcaacacgaatcgaccattgtggttctagcttgctgagttatccacaccccggcatgtcgtccacgacaaatgtggataaccacgctgctgtttcacgcccatctcatgcagaaaaggccctgacctcacatgcacagtcagggccttcattttcacgacgattccttatgcggtaatctacatttcttgcttacttatcgaggttcttaatgccgtcttccatagcatccaactgagcatcggtcaccttggccggcttcttcttgccgaacttggccttgagcagaccgatgatggtcggggcgagcgagaccagcagaatcagcacgatcaccagctcgaagtggtcctgtactgccggaatgttaccgaagaagtagcccagcagcgtgaacaacgtggaccagcacaggccgccgagcactgagaacggcgtgaaacggctccaacgcataccggaaataccggagatgaacggcatgaacgtacgaatgaacgggaagaaacggcccaggaacacagccagcgggccccacttctcaatcatgtgctcggttttggccaaacgctccggggtcaaggccttcaccttgccggactggatgatgcgacggccgaagaaatgaccaatgaagtaattgcactggtcgccgataatcggggcgcaccagaccaccggcagcagccagaacagcggcagcgcggccttgccggtcgcggcatcgggagcggcgaacacaccggcggcgaacagcagggagtcgcccggcaggaatgggaagaacaccacacccgtttcgataaatacgatgaggaagatgaagccgagggtcggc

SEQ ID NO: 2014 - DNA, 9118 bp, Unknown
  R17_18m  MAG No. k141_30721
ccgctgcgcagcattccgaatcccgaccagtggtcggaggttttcctgtaacgccaagcagcggagcgccggtttatatcaggtcgtacggcatctgacgcttgaccagccagaagatgccgaggccgatgaacaccagcagattgaatccgccactatgccaccacaccacggcgatcagcgtcgccatgcgcgccacatagaacgccacgcgaagccacccttcgcgcggccgggtctctatcgtcatgtgcgtgaagctgccgccgaacgtgcagccgccgcgcaaccatggcaccacgccctcgaagaggatgagcgccgctaggaagaggatcgaaccggtccagtcaaacggttccatcgactgccatgagccgttggagcccgagggcaggttcgattggacgatcatgacgaacagatgcgtcggcatcacggcgaacccgatcagcgtcatgtcgatgatgaacgtgatcagccgcctcatgaagccgggtgtggtggtcggcgtcgtatcggcgacccgcgccggaatcaggcgcagcgagaacatggccagcgcgaacccgatcagcgcgccggtcgtgttccacaggagatcgtccacgtcgaacagacggtaggcgcacgggaacacgcccatgaggccggtcagctgcatcgtctccagaaacagcgacgtggcgaatgacagtactgcggtaaccggcagcggccaacgccagatacggcccatgatgaagcccaacggcaggaagaacacgatattaaacgcgatttgcagtacggcggtgagaccatcggtacggatgtcaccgatgaactgcaatggattgagctgtggcgtcagatggtgcgcggcgcaataggctgccgcatcggccggcatcggatacagtgtgaagcacagcaggccgagcaggtacagcaccgtgccatacgccactatggccgacgacagtcggatgcgattgtcgcggtgatacagcaacgccagcaccggcacggtcagcagcatggacacaaacggccacaatgccatcgcgaatgcaaacggttcggaaaagttcttaagaaatcccatcttcaatgctccctgcttcggcccgctccgttcggtttcggaccttgactctcgacttctgattccaaggtacggaacatgacggcacgcgggtatcagccatgagagcgaaatcattgggatgaaaggcgattcgtctcattcgcatggatgaggaagatgcaccagttaccattgacgccgacgaggatggcgtggtcggcgccgtgaccgcgcagatgagcgagcgtacgtcgttcatcgtgttggaccagattacttccgccaccgctatgctgtttccggcccagcgcatcgccgccgaagcccatcgccgcggcatccgcattttggttgatggcgcgcacgctcccgcccaactggccgatccggccggcggactgcagtccgattggtgggtcggcaattttcataagttcccgtgtgcgccgcgtggcacggcattgctggtgattccgcccgaaggcggtcaggatggtcaggatttgtggccactgatcgactcgtggggtttcgctgacccgttcccggagcgattcgatgagcaaggcacccaggatttatgcggtccgatcgccgcgcccgagtccctgcgcgagatcgagcgactgtggggctgtgatgccgtgcgccggtacatgtccgatcttgccgattacgcggagcgtcgggtatccgaggcggccagcgcggtcggcggcgaactgtacctgcgcctcaccgcccacgcctacgtcaccgccgacgccatagaccgcttcgccgaacaatctatcccaaccatcgtcggatggctgcgtaagcgaatcgtatgttgcgtggtgccttaactatggatgattaaggtgccaatgcaacattcatgaagccatgtctttgaacagtgagcaacgcgcggcgactatccgcgaatttcaggagaacatgagccggctgggtctgaccgccgaacggcggcagggattttggcgtcagcggcagcagagtggagcaaatcatcaccctcaagtcgggcgtgctggagtatccgtggattatccgcgcctatctgctgagcagagctgagacacagggcgtggaactcacgccgttcatggcgttacgcggaaatccgcacgattattggttcctcgacggcgactttatcgaccgaggcgaaatcgattaaaaccgattgataatcggccatttacacgcaagaggcgccgtcaatcgcctcgcgcatagaggccatcgctctccgtgcaggtggcgatgcgtgtgtagtattccgtcttgtcctcatggtcgatacgtgcgccgcaatgctgctgcaccgcaagacttgccggattggttttgtggacactcaggtaagcctccttgatgccgagctcgcgggccttggcaagcgtgagcttgagcccggcggtcgcgtagccgtgaccgcggtattcgcgggcgacaccgtagccgatgtggcccggaccgttgcgcaggaagtcggtgagccggtgacgcaggttgaagatgcccacatagtcgccctcatcgttgacgagaatgtatttggtggctggcacccagccgtccggcaggccgacgccaagcgactcatcacgcaaccctcgcacatatgcggcgaaccgttcacgattcatgccggccgctgggttctcgaatcccgtctcctccgccgggaatttcgcgaacaagtcaaacgcgcgttcctggtccgccagccatgtctcaatcagccgcattggtcacactcctcctgttgacacagcagaccacactactactgtgctcgaccaacggccgcaagccttactagggtgtgtttacagataggcagcaagtgtctgccaatgcgtttatcgcaggatataccaggttactttccccgatacacggcagcgacgccgaagacaaattgtatgatgaacaatcccagcaggaagatcagagctcctggccggtacgtgcggtagaagtcgaccatatctggctgcgccaaaggcgctgccatgatatacaccagcgcagcgaacacggcgccgagcgcggaaacaaccaagaacgcgcctacggcaaaacgcagcaggccacgatccgaggtcctccggcgcagaccacggcatcccacgaagacgaataccgagatcagcaggtagaacagcagcccgtacgtgggcagcatgtcgataatcagcagatcgttcatggcatatcctttcgtggcgcaatcccattcaacctgcgcatggccaaaagcgcaacatcgtgtcaagtaatcgcatgatagcaggtttcgtccggctgcgaccgtggccacgatgagcggcatgggacacgataacatgaccggggctgcggcgcggtcgatccgtatcgcccgtattggacaatgatccgttcgccctggatgcgatgtgcgcgatgatctcggccgtttccaaggacttttatgtaatgcgggggcacgggttcgcccgcggtggcgatcgagcattgccataacccgcataccaggccggatgcgccggtgttggatatggcgttggggaaaaaaatcacgggcgctgacgtgtgccggcgcatccatcgcaggagcggcgggacgggcagcgtgttcacgtacgtgcaccgcgtggccgacaagctgggagtcgccagccgcaaggaggtgctggacgcatgcgccagatacgatctgctctgccccggctttccgaccggcttggcctgcggcatgccgggcatccggtgatcgcggcgtcctgcgccgtattgtccgtggcggtgctcgcggagtacgtgttctcgatggcggcacgggtccccggcaccgcgaccgtgcgcgatatcatgttggctctggctgtgcttgccggcttggtcggcggcatgttccgcccggaccggttcctgtggccggcgcttgtcacgggcgtaatcctcatgctggatgtcccgatggtcacgccgggaccgacggcatgcccgccgacgaacacgaataccagcaacagctcgacgaattgcgcgacgccgccagccgggccatgggccacacgcacgaggtcatcgactcgctcgaagaacacacaccagcgcaagccagccggacaccgaacaagcccactggcagctggaggccgtcattccctttaccggcgtgttacagacaatggaatggtgatgttcgcgttccagttgtcggaatcatcggtgatgtcgaacgtcccggacatggattcgataacggttcggtatctcttgaggccgctgccgagtccgagccgtaccgcttcgtcctttagtacgtcgcttgccgaaatgatgacgtgccgccggtcgaaggagatcgtgacggcgtaccattcgtgcggggcggcgtgcttggcgatgttcgcgtacagttcgttgagcagtccttcgagaaggtcgaggatgtcgtccgccagtggatggtcgaacgtcccgaggatgtcgtcaccttggaatccgaggccgccaaggcgacgtcgttgcgattgaatgatgccgtcaagccgttcacgctgctgttcgattttcctgtcggttttgtcgtcgttatttgttttgacgatgcggctgcgatcgtctggtttgtcggtgcgttcaagttgtcgtatcacctggtgggtgtggtcgagcgccgtttcggcgatggcgcgcagatcggtgagttggcgctgatattgctcccgatcggcggggcaatcactgcggcttgcctggtcgatgcgcaggatcatgtaggcgaggtcgttgctgatggtgtcgtgcaggtgacgcgccgtgtgttcgcggtcgagtcgttgcctgagtgtcgcggtcgcctgccgttgggcgaacagcaggttgagactgaaccccagcgacaatgggcataggcacatgatgatcatgcctacgatgttcgacgaggtgaggttgttctgcatgttgttcgcggcgagggcggcgagggccgccagtgcggaagcggctccaaggcggggtttgacgaacgagaggaccgctatggaggtcagtgcggcgatcatgatggtcgtcaacggcgagaacagccacagcaacgcgtatcctgagaccgcgaacagcagacaggcggcccataccggtgccgctccgagcatggcgcacagggacggcgacgagcagcgatatgcgtatggtcgaccatgacagcaggttctgggatgagtacacgcccatctctacggggatcgccactgcgaggaccagccccgcggccagtatggctgggtggtgtatacggttcagagcagatcgtatcgggcgcatatggcgagggcctccttgcggtcggcggcatggagcttgcggcatgccctgttgacgtaggtgaagacgctgcccttgctgacattcaggagcgcggctatctcgtcggtggatgatccatgcgcgtagaggcgcagtacgtcccgttccctggaggacagcgatggcttgtcgttttccggcagccggccctcggtcgcgtgtccttcgttgagtttgcgattggcttcccgtgcggtggagaatccggtgccggggacgggctcgccctgtgccgcgcatcgtatggcctgcgggagctctttgacgatgtcatctttggctatcaggcattgcgcgcccgcctcgaccgcgtcttgccgatatggatcaaggtcataggaggtgacgcacaccaagccgatcgtcggagtgcgccgacggattctggcgcatatgtccgcgccggtgatgcctcccaaggccatgtcgacgaccagcacgtcgggtcgcgcgccgtgggtcatgcagcgctgcaatgccatcgccggggacgtggtgctccagatgatgtggaaccgcggggagagacggctcgtcatcacggctatggcgttgagggcgagcgaatcgttgtccagcaccccgatggagatggtatgcgagtccgataggtctgtcatgccacccatcgtatgcgcatcccatgctcctcgacgtatcgttgtcatgcgcgcgcatgacagtcttttgctcccggatcgccgtctgtgggctaatggttggcgacagttgtgcaatcgtccgaaggagcatgatgatgaaatcgggaacacgacgcagggccgccattctgaccgcagtgatgctgctgtccggttgcgggacgactccgaacggcggcacctcgggaagtggcggcatgctgacctggcagcaagcgaacgaggaatacaaggcgaccgtcgaggatttcccctttgaactgatgaacggcgatgcgtttccagcgaatatacccaaggcgcaggccgcgtcctcgctgtatgccaagggaagtggggaaggacaggcgtatgtctactggcagtgctcggtggaacgcgacattctcgacaacagccagaccaacgcggaagcagcccgaggcgccctccagcagctgcgcaagctgctggataccgactggttcaagaactactacgaggacaaggatggcatatacgagaacgatgtgatcggcaaatccgaactcggcgactattcgaccatgcgggacttctacaccacggactgcacatggtaccggcatgagaacggactgacgaaatgaatgcgatcgcaccgttcaaatgcctgttggcgtgcgtgacggccacgacgatgtgcgcgatgatgacggcttgctcgccgtcgcggacgccatcgtccgacgcctcctccacggcgaagcggccagcatccacggtcgaggtgcgtaggggcggcatcacgccgttgtcctcttcctccaccggcgtgcaggtggctcctgtgttctcgcttacgactccggcgaaaggctggttccactccacgactgatcaaggagcatacgtgcatgcgggcgacgtgttgggtaccgtcggcgatcagcaggtcacggctccggtcgacggcgtgatcgaaacggtcgcgcaggacaacgacatggccgcggactatccgctgttctcgatacggtatggcggcatgagcgccagcgtggacgcgaccgcgctgctggcgaccatagacccggaccagccgttgacgggccgattccagatcaccgacgcgcaggggcccacggactgtgccgcggtagtgaatgacggcgtcgccactccgccctcatcagcggaagatacggccggatcggcgacgactgcgcatgggacggaatcgactcgcacactgcaatgcctgttcccaaaggacgtgcaggcgcgtcccgggcagaacgccaccgtggtactgaccgcgacggcggtcgaggacgccttgatcctgcctgtcaccgcagtcgccggcaggctcgcctccggccaggtcagcaggcgtgacggagattcgttcgccaccgtgaacgtgaagttgggggcatcggacggcacgtcgatcatcatcctcgacggtctcgaggaaggtgacatggtgtccgcgacagctccgaatctcacaccgggagcgcaatcatgagcacactcatccggttggaacatctgagcgccgaagtccggctgcccgacggcgaacgcctgacgacggtggacgatgtcagcgcatcgttcgagaggggaacgtccaccgccatcatcgggaaatcaggatccggcaaaaccagtctcgcctccatcgtcgggctgctcaacaacgactatgacggaacgctctcctatgacgggcgggactgcgccgcgtggaacgacgccgaccgggcgcgcttccgctgccggcatgtcggcttcgtgttccagaactactccctcataccgcatctgagcgcatgggagaacgtggcactcccattgcaataccggggaggcatccccctgcgggtcatcagaagacgagcctcgcgcatgctgcacaccgtcgggctcgggagccggacggtgtgcagcatgccgtcgcgcctgtcgggaggcgaacagcagcgcgtggccatcgcccgagcgctggtgggcgatcccgatctgctgatctgcgacgagccaaccggcgcgctcgacaccgaaaccggcgacatggtcgccgacatactgttccgacatgttcgtgaactcggggtcacactcatcctcgtcacgcacgacccgcagctcgccgcccgatgcgaacgccgactgacgatcgacagggggcgactgtcgtgatccgcatgatcgccaaggatctgcgcatcaacccgttgcgtaccagcctcaccgccctgtcgatgttcatcggcatcatcgccctcatcgccggcgttctcgtcggcacgctcggacgcgactatctggaagcggtcaacgcgcgactgggaggcaagtcacccacctatagcgccatcgtcgacgtgccatcatcggtgaacatacaagtcgtcacggctttgcaggaacgcctcgcgcatttccgtccgggaatcgcatcggcgcaatatcacctcaacgacctcgccatatgggcgtcgtccggtgacggcaacacggagatacgccgcgtcaccatcatcatcaccgacgccgaacggacaagaatcatgcccgcccccatcatcgagggcacatggctgaccggagcggacgaacccgccacgctggaaaccgcagtcaacgaaagcgcccgccaatacgtgcacgatggcaccgtggcactcgcccggacaggaaatccgcaacaggtgccggcacgggtgaacggtgtcatcgccgacgggacggacacacccaccatctacgtcaacgcgaccacactgcaacgctactggccgcaagcctgggaaccggatgggctgaccatcctcgtccatcccaatgaaggcgtggacgatcaacacgccaaaaccgtgttggacgatctgttgttcgacgtcgggaccggcagcatatcgtcatggaaccgttccgacaacgccgatgattacgagcaggtcatcggttttctccaactcggcgtcaccgtcaccgcgatattactgttgtcggtatccgccatcggcatgatcaa

SEQ ID NO: 2015 - DNA, 9479 bp, Unknown
  R17_18m  MAG No. k141_30847
gatcgacgcccgccgccaggccctgaacgtggcccgcatgcgtatgctcggcgccgaagtggtcgaggtgaccctcggcgacaagatcctgaaggatgccatcaacgaagccctgcgcgactgggtcaacaacgtcaaggacacgcactacctgctcggcaccgtcgcgggcccacacccgttcccggccatggtgcgcgacttccagaagatcatcggcgaggaagccaagcagcagctccaggactggtacggcatcgaccatccggacgcgatctgcgcctgcgtgggcggcggctccaacgccatcggcgtgatgaacgccttcctggacgacgagcgcgtgaacctctacggctacgaagccggcggcaacggccccgaatccggcaagcacgccatccgcttcgcccccggcaccggccagctcggcatgttccagggcgccaagagctacctgctggaaaccgacgaaggccagacgctcgacacctactcgatctccgcaggcctcgactatgcgtccgtgggccccgagcacgcatggctcaaggatatcggccgcgtgaactacagctgggccaccgacgaggaggccatgaacgccttccgcgacctgagccagaccgagggcatcattcccgccatcgaaagctcgcacgccgtggccggcgcgtacaaggccgccgccgatctgaaagccaagggctatgacaaggccgtgatgatcgtgaacatctccggccgaggcgacaaggacatggccaccgccggcaagtggttcggctacctgaccgacgatcaggccgccgcgcttgatgtgaccggcgcccacggcaatactgtcgcctgaacaagaagaggagattgttgattatgaccaacgaagcaaccacgccgtccggccagccgctgggcatcagccacaagcccagcaagtcggacgctatgttcaccaagttcaaggccgagaacaagcccgccttcatcggctacctgccctacggcttccccaacccggacgtctcgcttgacgccttcaagacgatggtcgagcacggcgtcgacgccgtggaaatcggcctgccgtactccgacccggtcatggacggcccggtcatccaggctgccgcctccatcgccctgaacaacggcgagaccatcaagcgcgtgttcgaggccgtcgagaccgtggccaacgccggcggcgtgccgctcatcatgagctactggaacctcgtgtaccactacggcgtcgagcgtttcgcccgcgacttcgagaacgccggcggcgccggcctcatcaccccggacctcatcccggacgaggcgggggagtggatcgaagcctccgaccgtcacggactcgaccgcatcttcctggtctccccggactcgtccaccgagcgcctcgaaaccgtggcccgcaacgcgcgcggcttcgtgtatgcggccgcccgcatgggcgtcaccggcgaacgcgccaccatcgacgcctcgcccgaactgctcgtggagcgcacccgtcaggccggtgccgagaacgtgtgcgtgggcatcggcgtgtccaccgccgaacagggcgccaaggtcggctcctacgcggacggcgtcatcgtcggctccgcgctcgtgcacaccctgctcgcggacgacaacaagaccgcacgcgacccgaaggaaggcttgaagctgctcgccgccaagagcgaggaactggccgaaggcatccacaacgcccggtgaacacccggtgcgcctcacgcgggttgtgccgtgacacggtagggtagtcacagagcatcaagcacaacccgcgcgtggacacaccatgagcaccagcaagtagaggcacgatgaatctggcttatattccctcgccgaccttctccaagttcgagatcggcccgttcactatccacatgtacgcgatctgcatcctgatcggcatctgcgtggccgtatggatcctcaccacacgttggaagcggtacggcggcaccttcgaccagattctcgacaccacgctcgtcaccgtgccctgcgcgctggtgggcgcgcgcctctaccactgcatcaccacgccggccgactacttcccgcccaccggcaacttggtcaacatcctcaaggtgtgggaaggcggcatggccatcttcggcggcatctccgtcggcaccttggtggcgttcctgtggtgccgccacaagcactatccgttcgcgatcttcgccgatgccatcgcccccgcgctgcccgtggcccaggccatcggccgactcggcaactggttcaaccaggaactctacggctggcccaccacgttgccgtggggcctgaagctcaacgacgcggacgccatcggcaaatccgaaatctgctattccggcgcgcaatgcccggactacagaaccacgctgttccacccgacgttcctctacgagatgatctggaacctcatcggcgccgcgctcatcatctacctcggccacaagctcgccgaccggctcaaggccggccagcagttcgccatgtacctgatgtggtacggcctgggccgcacctggatcgagaacgtgcgcatcaactactccacggtgatcctgggcctgaggaccaacgtgtggaccgcgatcatcgtcttcgtgctcggctgcatcctgttcgtcgtgctctaccagtacggtccggaccccaaggcgcaggcgcgcgggcttgcggcggtcaccgccgacgagctcgaacgccagagcatcgaagaggaacagcttcgccagaagaagcaggccaagcgcactaagtgacaccacaataaacagcgccgaaacagcgcgaaacacgggaccccaagtcccattgcacagataaggtaggaaaccatgagcaatatcgcaatcgcacccagcatcctgtccgctgacttctgcaacctcgaacgtgatctcaaggccatcgccaacgccgacctggtccacgtcgatgtcatggaccatcatttcgtgccgaacctgaccctgggcgagccgatcgtcggccgcatctgtcaggtcaccgatctgccggtcgacgtgcacctcatgatcgaggacccggaccgttgggctcccgaatacgccaagctcggcgccgcctccatctccttccacatgggtgccacccacgcccccgtgcgtctggcccgacagctgcgcgagatgggctgcaaggcctgcttcgccgtgcgtccggccgaaccggtcgagccgatcttcgatatcctcgacgagttcgacatggtcctcatcatgaccgttgagcccggcttcggcggccagaagttcctcgacaaccagatggccaaggtccgccgcctgcgcgatgagatcacccgccgtggcttgaagacccgcatccaggtcgatggcggcgtgagccccaagaccgcgcacatcgtggccgaggccggcgccgacgtgctcgttgccggttccgccgtgtacggcgccgagaatcccgcccaggccatcgacgacatccgcaccaaggccgaggccgcgttcaaggcctgagctccaagcctgaaccgcaatccacctttcatccataaccgcaagaaaagaatctgaatcacatgaagacgtttgaatccctgttcgccgaactgtccgaaaaggcccagacccgccccgaaggctccctgaccgtcgacgagctcgacaagggcacccacttcatcggcaagaagatcatcgaagaggccggcgagacctggatggccgccgaatacgagggtgcggaccgcaccgccgaggaaatgagccagctgctctaccacgtccaggtcatgatgatcaagcacggcctgacgcttgaggacgtctacaagcacctgtgagaggaacgcaaatgctgagaatcgcagtgcccaacaagggcatgctatccgaacccgcgtggaacatgctggccgaggccggctaccgtctgcgcaccaaccctcgccagctggtcgtgcaagatcccgacaatggcatcgagctgttctacctgcgtccgctcgatatcgccgtatacgtgggccgcggcgccatcgacgtcggcatcaccggccaggatttgctcaagaactccggtaccgccgcgctcgagcacatgccgctcggctttggtgcctcgaccttccgtttcgccgcaccgaacgaatccccgatcaccactctggaggatgttcagggcaagcgcgtggccaccacattcgataagctcgtacacgactatctggtcgagcacggcatccaggccgagaccatccacctggacggtgcggtcgaatcctccgtgcagctgggcgtggccgacctcatcgccgacgtggtctccaccggcaccaccctgcgcaacgccggcctgcgcgtgtttgccgaaccgctcatgcactccgaagcctgcctgattcgctcgccgcgtctgaacgagcaggatccgcgtctggccgtgctgacccgtcgtctgcaaggcgtgctcactgcacatcagtatgtgctcatggactatgacattccgatcagcaaggtcgccgccgccgtggccgtgacccccggctttgaaagcccgacgatctccccgctgcatgacaaacagtggaacgccgtgcgagtcatggttcccaaggccaaggtcaaccagctgatggatgatttgtacgaagtcggcgcacgcggcatcatcgttaccgctctgcaagcctcccgcatgtagactgttagtcgatatgaccaaccagaaagtcaacgccagatacagtccggaagcacgtgacatctatttcaccgtgcccaatttgatcagcgcgctgcgaatcatctcgattcctttcatcagcgtgctgatctccaagcatgaggtgattgcggcgctagccctgatcgccatttcctcggcttcggacggactcgacggcatcatcgcgcgcagattcaaccaagtgagcaagatcggtcagattcttgatccgatcgccgaccgactgctcattttctgctcgattctggctctcagcgtcgccggcatcatcccatggtggatgctgattatcgtgggactgagggatctgtggatggcgattcaggtgctatggcttgcccagtacggttatggcccgctgcccgtgcatttcgtgggcaaggctggtaccgcgctgctgatgatttccatcgtcagtcttattttcgccgatttgggcaccagtacgttcttccacttgctctacatcgccgcgctggccgccggcatctggggcatcgccatgtattggctcgccggatatatctataccaagcagggcgtcggattgctacgcaaggaactgggggagaagtatggcgcttgaggccacggccccggtctcattccccgtacccaaggagactgagccggtacgacgccgcgccgtgttctcccactcagtccgaggcgcggaatcgcatcatgcgctttccccggatgacgccgccgccatccgcaccccacgccgccgtaaaaccaacgacgattcgcttcagctcatcgatgatcttgtcaatcgtccgatggatccgatgttctccgactcacgactggtccatgagcatcgttcgaccttctccatctggtttaatcgcatcgtcgtattcatcatctgtgtcggcgttggctttgcctgcagcctattcgtgcaacagttgcaatccgatccgcgtaagcaggtacggcagactttggccacgcaattggagaatcgcaactcgcagatagacgaactcaccacggacgtcaataatttgcgatcccaagttgacgaacagtccaagaaaatctccggcagcgtgaaaagcgacacgcttatccaagacgaaatggtcaatggtgccacggtggtcgaaggtgaaggaatcaccatgacgctggccgatccaatcgcggcaagccagtcggatcaatcctcctcgacgagagtcggcacctccacgaacatccgagtcatcaccgatctggatctgcaacaactggtctccctgatgtttcaaaacggagccgaagccattgccatcaacggtaataggctcggcgcgcaaacctcgatacgcaaggccggcgggcatattctcatcggcatgaccgcgatacaaagcccctataccattgaagccataggcgataagagcgtcttggccgaagcgatggggaagaagaaacttgcaagtctttacgattccttcaaggaagccggtatctacccgcaggtgagcaaatccaattcgattacacttgaggcagcagtcactggcgaagtgaagtacgcggaaaggaatgaataatggcagccgttctgggactgatcatcggcgtcgtcatcggcgtgttcgtcaagccggacattccgatcatcgtgcagccatatctgccgattatggtggtcgctgctcttgacgccctgctgggtgccgcgcgagcctatttcgagcgcagcttctccgaccgcgtgttcgtgatctccttcctcgccaacgtggtgacggcaacactgctcgtgttcctcggcaaccagctcggcgtcggttcgcagctgcagacggccgtcatcgtcgtactcggcatccgcatcttctccaacgtgtccgcgatcagacgcttcatcttccgaggctgacaagggtactgacgtatggcacgtaaagcacaatcagacaacatgctggagaaaatgcgcgaccagcatgcacaagacaaggtcaacgaccggatggaaaccgggtcgttccccacggtgcgcaagaagccccggaaggatctcaaccgggccagcaacaaatcacggctactatcctcgattctcattgctctgatgtgcgcgctgctgggtttcgcctacatgagccagatcaataacactaaatccacgtacgaaacgatggacgagagcgaactggtaaggctgctgaacgagtcgaatacgcaaatctcgaatctcgagcagcgtaaaacccagttgaacagccagctcgactcactgaaatcggcggctaacgagcaggagcaggcgcgtaagatcgccaagcaaaacgaagagaccagcggcttgatctccggcagactcccggcgaagggccaaggcgtgaccatccggatcggacgaggctcgacgactaaagtggacgcctcaatcatgttcaacctcatcgaggaactccgcaatgccggcgccgaggtaatcgccatcaataacgtgcgcgtcatcacctccacctacattcaggacgccgaggaaggcttgatcgtggatggcaccaccatcaagcccacatacacggtgaaggccatcggcaatccgcaggagctgtccaacgcagtcgatatcgccggcggtgtgggcgctcagctccaggtgaaatacggatccaacgtcaacgtgcagccttctgacagcatcattatcgacgaagtacgcgaagctacgcaaaaccagtatgcaaagacggtagaataggggattatgaccaacccgattcctagcgcaggcgaaaccaccattatcggcctgcccgcgattaatgtactgcccattaccaccaccggcgatcgaccgctgactcaagaggatctggacaccatcaccagattgtccgagggaacggcattgctgatttccgccaggggagcggtctcaggttctcgttacttgcttgacgaggatgaaatcaccgtcggtcgtgatccgcgagctgatattctgctcgacgactccaccgtatcccgtcagcatgccgtgttccgcagggtcaacggtcagttctttgtggttgacgcaggaagtctgaacggcacctacgtgaaccgtcagcgtgttgatcaggcgtcgctgaagaacggcgacgaaatcatgatcggtaaattccgtctcgtgttcttcacgaaatccgccattatttcccaatagtccacacccagcacggggttagactgattgcagaaattgcaatcatgtgattacaccagtgtgagtcacatgcgagacacgcatgagttaggggagtgccatgggacagacagggctgcatcttcatgtttcgcttgaggaccgtcagaatctgaacgctgacgcgattcagggggagttgttctccaatgtcgatactgaggagatcaagcgcggctaccgtggcactgtggcctccaaggtggccggcatcacgtaccgacagctcgattattgggcacgcaagcagattgttgagccgtccatcacgccgtctcatggctccggttcacgccgactgtactcgtttaaggatgtggtgattctcgctgtatccaagaagctgcttgatgccggtgtgaatctgcagaacgtgacggcggccatcggattcttgactcaacgcagcaccgatcagctggccaatgtgaccatcatgtgcgatggtcaaaacgtgcacgaatgcactaccagcgaacagatgctcgaactgttgcaaagcggtaaggcagtgttcgccgtgtcggtgggttcgttgtggcaccagattgagacggccttggaacaggaagaatatattgatcttgaggccaagccgctgacgattgccacgggccgtccgattgatgaactgactgccatgaggatgcgcaagaagctcgaggcacagcgcttgcaacgcgcaaccgcctgatacatgtatggttgttggcgacttgccggctttggtcggcaggtcgctttgttgtatgtgttgcttttgttgcctgccatcttatgtttttatatgttgcggtgattattatgactgattggaggaccgggtgaacgggattgttgttggattgttgccgggcgttctgtggatggtcgccgtcatctttgctgtgtccatcatcactataacggtcagccgaggccatctgttcacgccgaaacgccggcgaccgccggtcgatccggtcgactggtcgatggtgaaaacgcatttcatgtcgtttgcggcggcgctgattccgtttcccgtgttgacgttcaccgcagatctgatggatgctcgcatgctcgcgttctacgaccacgcgcaattgcccggagcaatcatcatattcgtgctggtgctgctggaactcatcgccatgtatctgcaggcacgcaacgcctcagaaaccgcgatggacggccgcctgggtgtcgccgcccgccgggatgatgacgatgccggaatcgtgcccgatagagcgaggagcgggaatgagggagacatggacaaacagggcgaagactgattggatggctgatgcgggggagggacatgcaaccgtcgaccgggttgggtggagggagaccctgacatatatcggtatcgtcatttaactttgcctcatagtattggaattaaagacattgcgttggcgaatcgaaggggtgtgagaatgatgaggtgcaagaggattttggctacccggggtgcggttttgctgac

SEQ ID NO: 2016 - DNA, 13406 bp, Unknown
  R17_18m  MAG No. k141_32050
catggcgcggatcgactcgtcggagaggttgccgagctcggtttggcggcggatggaatcgcgcatgaattccacgaccatcagtaagcccatgatgatgagcacccatgccagccatgtgcccatgaccacgattttctcgctggtggtcagcgcaaacacgataatgagcgcggccggcaccatgaatccggcgataagcgcacccagcagcagccggggatactggtaggcgaatttggcggcccgacgttcgatggcatgacggtattcgtcgcggtcggccagtgccgcaatggcctgagtgacacggtattcgctgccaggcaggtgcaccggctcgccgataatcatgtcgctttccttgatttcccgcgcgaacaggcggttgagattggccagtttcggccgggcgccgaggccaagcgcaaaggccagaaccgcgaaaaccagcaatttgccgatataggcgaaccagaggccgtcgtagaagccgccgatggtttcacgcattgcgtcaatcgaataggtgaacggcagcagcggatagatggcgcggaagaacgcgggcatcatttcaatcgggtacaggccggaggcgcccggcacctgcagaatgaccagcgccacgcacacgcctttgcccacgtgcatgaacgtggtggagagggcgaaaatcaccgacatatacaccagtgaggtgatgacgcaggtgagcagaaacaccggggcgctcgcgcattgaatgccgatgacaagatcgccgatggccgtgaccaggccttggacggcggccagcgtggccagcagcaggaaacggccgagatagccttgggttggcgtgagatcgtcgatgccctcgtcgtcggtttcgagtttgggaatgaccacgagcacgaacgcgcccacccacaaagacagggtggtgaacagcggtgccatgccggaaccataggaggcgaccgggtagacggcccgttcgctgataacagtgggggagagcatgaagtcggcgattgtggcggcatccagtttgccgtcggtgccgatcagggaactgagtgaactggagatgctcagggctttgatgtcggtggtcagcgtttcgagcttggtttgcacgccggccagcgccttatcggtgtcgtgcagggcggtcaccgtggtggaggcggctttgtcgagttggtcgagggtgctcttcgactgatcgatgagtgagccttgcgacgtgatgccggtcgacagagtgttggcggtcgagctgagggtgttgaggccggtgttgagctgaggaatggcgccggagatgatggtgccgcgagcggtattggcctcgcgcaccgtggtttgggtggcggtattgagatgctgcgccaatccggcggtgtctgtggaggcgttgccgatagtggtgttcaggctatcgaggttgcccagtgcgccggcaagctcgctattgtggctttccagtgtggcaatggcggattgcagcggttctcgatcggcgttcggcagccctttgagttggtcgatgatgtcggcgttcgcttggttgatgtcttccgccgtattgatcagtccgcctacctgctgattggcggcgctgatggttccggctaccgtgcccacgctttggttggcctgtgctgcggcctggctcagcaggcttgagccttggtcaagcgcttcggacgtggaggtgacgaagccgttcagactggcttgggtagtgccgatcagggtggagacgccggccagaccttccgcggtgtcgatgccaagtgcgcgcgcgtcgtccagcgcctgacgtgcggtgcgtgtctgctccggggtatcggtgagtttggtggtgagcttggcgatggtgctgcgtgtgtgctgcacgtcgccggaggcctcggcaagggccgtgagggccttggctttggtggtgtcttcggtgctgatggctttgccgccaaccgtattgatgacttcggtaagtacttcggatacggtggagacgaatgtggaattgaccgtgcggtccacagtggacgcgcctacgtcggtgactttgggggcgatggcgctggctttttcgttgacgtaatactccagagtgggccgactcttgccgccggtcaccacgccggcgagatcgtcggaaaagtctttggggatgatgatggctgcgtatgccttgccggattccacctggtccatggcctcggcttcggtgacgaaggtccagccgagctggtcgttgcttttcagctgcttgacgatttgatcgccgaggttttgcttgccgatgagcgcgttgtcggtgccgtcgtcattgttggcgatggcgacggtgatgcctttggtattgccgtacgggtcccagaagccgacgatgttgtaccacgaatacagtggcgggataaacaccatgccgaacaggatcacccatgcggccggcaccttgaacaggcgcaggaagtcgcgtttgaggaccttgaagatattgcccactgatacctccggagcttggtgttgcttgattgctacgttttccgtagcgatacgttaatcgtagcgctacggttgtagtagcgtaatacggctgccggagattattggggtgattgatgatggttttggcggaataacgccgctgcccagcggcttatcgtgtgtcgctgggcagtgtgcctaattttttgtggctggggtgctgtgtggccgggtgtgctgtgtgtgttggtgtgaggctgccctccatggggcggtaaaaccttcattgggtggtaagtggcccatggggcggtaaaattcccatggggcggtggcttaaaatggctttattccgcggaatgcggttttgggctaaccgccccatggggtaattaccgcctcatgagagagctaccgccccatgggtaaaccgttgtatcagctttcgatggtgccggattggccatcaatggccgactgctcgttctggctggatgactggtcggagttggagttaccggaagtatcagaacctgtgccggagctgctgccggtgccggactggccatcagtgccttggctggagcgaaaggcgttctggaacttattgacaagatttctggatggtttttggatgtttcctgaaagcgatagcgggctcggtgtccggcaatgtagacagacatgtaccggctatccatcaagttcggcaaaactgcaatcgggtgatagtgtaaggggacgctatgtggggaggaaaccatggttgaattcaaggacgatggcacggccactacccctggcaagccgcgggagaaccgtgacgccgagtccgcagtcgtggctgatctggtggccgtcgaactggacgacgccggcttgaacccgaacgccaagcgattaccgattctggcgcgcatctatggcgcggtcgtgctgctggacggactcgccacattgccgattatggtgatttccatcctctatgccgtgcgcgagattctggatggtcatgtgcacgtcgatgcgatgagcctgactttcatcctgtccgcgattcatgcggttgtgctggtagtcagtgccgcatgcctgattgtgttcggcgtgatgctgctgcgcaatcatcgccggtatgccgcgcgctggacctacgtgctgatgccgttgacgttggccgacggcatgctgtcgctggccctgaccggccttggcttcaacctgctgctgccgctgattcagatgattattctcgtcgtgatttcggtgaccgccgatccctccctgagcgaggaacgccgtttgcagcgcgcgctcaaacgcatggacgatcgcgatgattatgaatcggcggtggcggccggcatgctgggccgcgaccaatccggcaagggctatattgcactggacttcttcaatatcttctggctgtttaccatcgcttcggtgggtggcctgattatggagacgatctaccatatggcgctgtataacggtgaacttcaggaccgcgcgggtttgctgtggggcccgttctcgccgatttacggctgtggtgcggtattggtaaccgtgtgcctgaatcgcctgtggaaggcgaatccgttcttgatcttctgcgcttcggcggtgatcggcggcgcgttcgaatactgcaccagctggttcatggaagtggcgttcggtattaccgcgtgggattacaccggccgttggctgtccatcgacggacgtacttcgggccaattcatgttcttctggggactgattggtgtggtgtgggtcaagtggctgttgccgcgactgctggctctgattaatcgcattccatggaaagtacggtattcgctgactgcggtatgcacggtgctgatggtgatcgacattgccttcacgctgatggccttggattgctggtatgggcgcatggccggccagccgcaggattcaccggtcgcgatgtggttcagcgaacgctacagcgacgcttacatggccaatcgcttccagaccatgcatatcgacccttccaaggccgggcgtatgtgaatggctggcaagtaattacgcttcgcgggcagaaggtgcgtagaacctaagacagccttcgcgtgtgggtggtaagtgggatacactttcgagcgttgaaggaatgattccctccgctgatgcgctgttttgtgacgcgcgtgatgacgatgggacaatcaaacgaaaggcaaggcacatggccgaagctacagcaaacattggtgtgattggactggccacgatgggctccaatctggcgcgtaatctggcgcaccatggcaacacggtggcgttgttcaaccgtcactactcgcgtaccgagaagctcatgaacgagcatggcgccgaaggcaacttcgtgccggccgaaacgctcgaggaattcgccgcgtccctgaagcgtccgcgtaccgccatcatcatggtcaaggccggtgctccgaccgacgcaactatcgcgcagctggaagaggtgttcgaaccgggcgacatcatcgtcgacggtggcaattccttcttcaaggacaccatcaagcgtgagaaggaagtacgtgccaagggcttccacttcgtgggttgcggcgtgtccggtggtgaggaaggcgcgctcaacggcccgtctctgatgcctggtggcactgcggaatcctggaagaccttgggcccgattcttcagtccatcgccgccaaggtgaacggcgaaccgtgcgtgacccacatcggcaccgatggtgccggtcactttgtcaagatggtgcacaacggcatcgagtatgccgatatgcaggtgattggtgaggcgtatgacattctgcgccgtggactcggcatggataccgaggagattggcgacgtgttcgctgaatggaacaagggcgaccttgactcctacctgatcgagatcaccgctgagattctgcaccacaaggatgccgagaccggcaagccgttcgtggacgtggtcgtggatcatgccggcatgaagggtactggtacttggaccgtgcaggctggtctggaatttggttctcctgtggctgctatcggtgaagccgtgttcactcgtgcactgtcttcgcacggtgagctgcgtgaagacgctcagaaagaaggtctggctggcccgaacaagaccatcgatctggccggagaagacaaggccgcgttcgtcgaggacgtgcgcaaggccctgttcgcttccaaggtcgtggcctatgctcagggcctgaacgagattcaggacggtgctaaggaatacggctgggatatcaacctgtccgaagtggcccgcatttggcgtggcggctgcattattcgcgcccagttcctgctcgaccgcatcaccgaggccttcaagggcgataatttgccggcttccctgttgttcgatccgtacttcgagaagatcatcggcgaatcgcaggatgcatggcgtcgtgtaatcgtgcgtgccgtggaggccggtatcccgaccccggtgttctccagctccctggcgtactacgatggtctgcgctccaagcgtctgcccaccgccctgacccagtcccagcgtgacttcttcggtgcccacacctacggccgcgtcgacaagcccggcgtgttccacaccctctgggcgcaggaaggccagcccgaggaacagcaggcttgagcgtctgcgacaatctgtgggccgggcccctcattcagggtccggcccacaggaggcgccatcacaactcggtgacggtttcttcggtggagaaccaggtgaactcgtccactccgttggcgtaggaggacgggtaatccgggttgttgggccgctcgaagacatgggccagcgattcggctttgccggcaccggcggcgaagaaccatgtacggcgcgagcgggcaatcagcggcgcggtcaacgagacgcgcaacggcggcatcttgggggagtggttcacacccacggtgagcctatcggtaaccttgacctcatcatgacccgggaacagcgacgcatagtgaccgtccggtcccatgccgagaatcatcagatcgatgaccggttccggccccaattcattcaccaactcgcgctcatagtcgctcgcggcatcgtccagcagcgcatcattcgcggcatcggcggcggcgcgaacggaagcgtcatcactatcggcctgatccatcacatcggcgatgtcatcggctgaacgggtatcggccgccatctcatgaatattcgattcaggcagcttgccatccgccaccagctggtcaagcagcaggcgacgggcctccagagcattgcgatcggtgtcgtaagccggcacaaaacgttcgtcgctccaccagaaatgcacgcgcgaccaatcaaccgcatcagccagtggatcgttcagcgccaaacccaacggctgtgcggccgaaccgccagacagcgccacatccacacgtgtgcgatgcgtgccatcaggcaatcgttcggcgagcaaatcgagtagcgccaagacaaaacgttgcgcgccagcctgaatcatcagatctttattcggatacacaatgagttttcgagttgccatgtatggtccttatatggggtatgtgtcgtactttgcaatgtggattgtgttgtcagttgacaacgcataatacgggtggcatgccgggaatccagccatttgcagcaatgaaatgtgttgtcagttgacaacacaatgtacattgtgcgacatcgcatatgtcactttattactccgcggtcatgagcttcggcatcgcatgaggtaggaaacgatgagcaacggcgttggcatggctcgaccacaattgccgaactcatgccaacgccgctgtggcaacggttctaccgacttcagtgacgaatcagatcccagccttcgttgatgacctcggcgtagatctcatcgggatcgatgcggcgcagttcctcggtcagacagtcctcgatggtgcgcatcggcacggacacttcctgcggagtctggccgggcagcgagatcagcgcttggtcctcatacgggcgttccagtgagatcacaccgtcctcacgggtcaggtacacgccggtcacggcctgcgcgtcgggcacgaactcagtttcgactggtacgccgagtttcagacgcagccatgcgcacagcatttccagaggcaggaagtcggccttgccggtcaccttcacggcggtgatgggcaggtgcggcggctgatcgagcatcgaggcgagcattgcgcgccagacggtcagtcgtgtccaggacaagtcgatgtcttccggtgtccaattgcggcgcaaacgctcgatcgtggcctccggattattggagtgcagcgcgtcggtgatgcgactgcgggccatcgcacccatcagatccttggccgggttcgacggcggtgtggtcggccaccacgccactacaggcgcatccggcacaagcagcgggataaccagcgtatccgggtggttgataaggccaccgcgcggacgcaagatgataatctcaccggcaccggcgtccgcgccgaatcgcacttgggcgttcagattggaatcgttcggatcgttcgggccgtcggtcaaatcgacggccggattatcgcgattcgcgctcacctcggcggccacttcggtctcgttcggttcgccttcgccggactgatcggcaggattggtatccggtactacggcaatcacgcggcacgggtgctcacggctggccgagttcgcgatttccagcgcatgctctaggtccgcgtcctcggtggcgatgagtagcgtcaacacgcggccggtcgccgattcgccgcgctcctcgtgcagctgttcgattttgtgcgcaatctcgcgggtgcgggtgttcggcatatcgatgatcatggcatcctccagtggcggccgtcgcgcgccagcatttcgtcggcctgtgccggaccccacgtaccggcgcggtaggcctgcggctggccaagcgtggaccagaattgttcaatcggatcgaggatctcccagctgaggttcacctcttcggtggtcgggaacaacggcggatcaccgagcagcacgtccagaatcagtcgctcataggcttccggcgagttctcggtgaaggagcggccgtagctgaagtccatgttcacgtcacggacctccatggtggagccgcccggcaccttggctccgaagcgcatggtaacgccctcgtcgggctgcacgcgaatcacgatggcgttcttgccgagttcgcgcacggcggtctgctcgaacggcagatgcggggcgcgcttgaacgccacggcgatttcggttacacgcttgccgaggcgcttgccgcaacgcaggtagaacggcacgccagcccagcggcgggtgtcgatatcgaggcggatggcggcgtacgtttcagtggtgctcttggggtcgatgcctttttcttccaagtagccgaccacttcgtgcgagccctgccagcccttggcgtactgaccgcgcgcggtgttggcggcgaggtccttgggcaggcgcacggcggaaagcaccttggtcttttcggcggtcaggtccttggcggtgaagctcaccggctcctccatggcggtcagagccatgagctgaagcaggtggttctggatgacgtcgcgtgcggcgccgatgccgtcgtaatagccggcgcggccgccgatgccgatgtcctcggccatcgtgatctgcacgtggtccacatagttggcgttccagatcggctcgtacatggcgttggcgaaacgcagggccagcaggttctgcacggtttccttgccgaggtagtggtcgatgcggaacacggagctcgggtcgaacacttcggataccacgctgtcgagttccttggcgctggccagatcatggccgaacggcttctcgatgatcacgcggcgccatgcgccctcggacgagcgcgacaggccggaggcggccaactgcttggcaacctgcgggaaggcgcgcggcggcaccgacatgtagaaggcatggttaccctgcgtgccgcggtcgcggtcaagctcctgcacggtggcgctcagacgctcgaaggcctccggatcgtcgaacgtaccctgcacgaagcggatgccggcggccagattgcgccaagtcgactccttgaacggcgtacggcaatgcgcccggacggcggccttgacgaattcgatgaaccgctcctgtgtccagtctcggcgggcgaagccggtcaggccgaagctcggcggcagtaggccacggttcgccaggtcgtagacggccggcagcagtttcttttgtgccagatcgcccgtgacaccgaaaatgacgaggctgcacgggccggcgatacggggcagtctgaggtcgcgcgagtcgcgcaggggattgctccaattgggggattcactcataatgtacaagggtagccgccggcggctatctatcgctagaggcgatatgcgatttgggctgcgatttgggccacattgcgtgtgctgtgccgtgcgttgggccaatcgcgtacgcaaacgtgtacgcaacgccgtagttgaaatatcccaaaacggtgtgtattttagaagagttgcccctttagctcaacggttagagcagcgtccttttaagtcgtgggttgtgggttcgaatcccacagggggcacaacaaatccttggaatcgcaatggttccaaggattttttgtttcgaccagcctggctcctagagtggtgccccatgtcatgcaccacgattcttgtcggcaaaaatgccagttacgacggttccaccatcatcgcccgcgatgacgattcgggctcgggccgttacgatcccaagcgcttcgtcgccgtcgcccccgacgaccagccgcgccactaccgcagcgtgctgagccatgtcgaaatcgaactaccggacaatccttgccggtacaccatcgcaccgaacgtgctgaataatcgtggcattctggccgaagccggtgccaacgaacacaacgtggcgatgagcgccaccgaaaccatcgctgtcaacgagcgcgtgctcggtgcggacccgatggtcgagttgcggccggctgtcggcgggccggacagcaccgattatcaggccgagcagcccggcggtatcggtgaggaagacatcatcacccttgtgctgccgtacgtcaccaccgcgcgcgagggcgtcgcgcggttgggcgaactgctcgaaacctacggcacctacgaatcgaacggcgtgattatttcggatgcggacgagatctggtacgtcgagaccatcggcggccatcattggatcgcccgccgagtgcccgacgactgctatgccacgatccccaaccagctcggcatcgacgacttcgacctcgccgatgcgttcggcgagcagcgcgaatacctatgcagcgccgacctgcgcgagttcatggccacgcatcaccttgaccgcacaatgggaacgtcggtctcttccaacggccgtcacgtgcatagcgccggattcggaacaaccgttgcccttcccacccgcttcaacccgcgcaaggccttcggcaccgcgacgccgaaggaccatatctacaacacgccgcgtgcctggtacatgcaacgccgcctcaaccccagcgaggactgggattcgccggccgcccgctacacgcccgaatccgacgacatcccgtggtgccgcgtgccggaagacaaggtgagcctcgaagacgttgatttcctgctgtcctcgcacttcgaaggcacgccgtacgacccgtacggcacgaccggcacggcggaatcgcgccaccgttaccgtccgatcggcgtgaatcgcaccggccatatggtggcgattcaggtccgcccgtatgtgccggcggccaatcgcacggtgatgtgggtatcgttcggctccggtccgttcaccgccgccgcgccgttctacgcgaacgtcaacgacacgcctgcctacctgcgcgacaccacgcccgaagtctccaccggcaacctgtattggacgaaccgcctgatcgccgtcgtggccgacgcgcattggtatgagacgaaccggttcatcgagggctatgcggaaggcgtgcgcgcgttcgggcaccggctcatcgagcgcacggatgagcagttgcttgctcgaagcgatgccgaatcgacgggtacgaatgcatggccgctcgatggcggccacggcgatgagaaggatgtgcagggcgtggcggatgtgctcgaagcggccaacgacgagatggccgactacctgcgcgagcatacaaccaagctgctgaacgacgtgctatacacctccagcaacctgatgcacaacagcttcgcaatgtccgaccgttgggccgagtagcaagacctcggctggggaggtaatagggatgccctgctgataacgcgtcagcagggcaaagccgcaatccgaatcagttgaagccgacgatgcgttcggcgatgagatagccgttgcgcacgatccagcggccggttttaccaggcagattgagcgcgcgggacatcagcttcgagcgcacatccttgccgatggccggagaataggcgtcaatcgcatcccacagctcggttttcttaacgtagttggccggatcgcgcgagagaatcaggaacgccgaggtaacgcatgattcgatcgtcaggaagtgaatcatgtaccggtacagcccctccggcaccgtaccacgttcgggcgtggcctcggtcatcagccgattgacgagccgcagctgatccacacgcttaatcatcacgtcggtctgcacgctctgaccctcgcgcccgatgaagtagtggtagaacggcacgtcgagatactggatgcgcttcacccacgggaacggctggtacgagtaatagaaatcgacgtagaacgtatgctccggcagcttcagcccggaatcgcgcaccacctgcgtgcggaaagtgagcgcatgcatgatgatgtactgcgccagaccgaacttgcccaggtcatcccagccgagcacgcggccggcctccatcacatgacggaagttcaccacgatcttgtggcgcttggtcactttgtcatacacatagttggtcaccagcatgtcgatcggctcgctggcctcacgttgcgcgcgcaacgtggccagaaccgtgtcgatggcctgcgggtcgacccaatcatccgcatccaccaccttgacatacatgccggtcgccgccgtgataccggtgttcactgcgccgccgtggcctttgttctcctggtgaatcgcgcgcacgacacctggattggtgcgttccagtttgcgcgcgtactccagcgtgccgtctttcgaaccgtcgtccacaatcagtacctcgaggtcgctggtgtcgcttgccgaaagcagcgagttcacgcaacggtcgagataggactccatattgtatgcggggatcacaaaggtgagcgtctttgccgtgctggccatgaaagtcttacgtcctcacatatttagtcgttctgttcagtttcctgttcaaaccgtagcacttcgtcttccgactcggcagagtgttgcgcaacctgtgcccctgaactcacattctgcaaccctgaatcttccctgagcgtgtggtcgaggtccgtctgctctaagggcgatgatgccttgccgtccggggccggtgtttcggcatcgatcccgcgcttggcccggcgctcggcctccttccgggccttgacgccttcaaacaacagctgcggcttggaatcgagccggctcaggccatgccatgccaggtccacgatgtacgcggccagctgctccttgctcaccttgggccggtcggcccagtactggccggtgaacacggtcatgcccaccagcatctgcgcatagtac

SEQ ID NO: 2017 - DNA, 2646 bp, Unknown
  R17_18m  MAG No. k141_32083
cggtctgctgctccgcggcatcaaccgtacggacgtcgagcgtggccaggttgtggccaagccgggctccgtcaccccgcacaccaagttcgagggcgaagtctacgtgctgaccaaggacgaaggcggccgtcactcgccgttcttctccaactaccgtccgcagttctacttccgcaccaccgacgtcaccggcgtcatcgagctgccggaaggcgtcgagatggttcagccgggcgaccacgccaccttcaccgttgagctgattcagcccatcgccatggaggagggcctgaccttcgctgtgcgtgaaggcggccacaccgttggctccggtcgtgtgaccaagatcctcgcctgattttcatcagacaagaatcttcgcttgaactagcgacttaagaaatccccttcgaggaaactcggaggggatttcctataaccgcagcaggatatggatatgtaccacgacttccggcctggatgcgctagtgttgctttccaatagataaacggactgctgcactgcgagggtatgacactgatggcaggccgggaaagaaggtcgatgatgactggttcgcaagccgcacactgtggttctgtatccgcgctttcactgggactgcccgtctccacggcgattcccgaagccaaaggcacactgccgaaagccttgttcgtgggcaaggcaccgatttcaggcaaactcaagcagcgattggtgaacgaaatcgaatccattaccatgctggcgttggtccggtcgattaacactgggcttgcggacggcaaactggttccggaagtgctggtcatcggactgaagcttacggccaaagccactggcataccgaacgaggtcatcgatttgattgccgggcagcgtaaatcgggcatcgtgttcgtgtgcgtacgcgacgtgccgttcgagggcagcacacgtgaggaatgtgcgttcgccgtgcgtcgggcgataccggggcgtgccggccacacgccgatctatcgggtatatgccggcgattggcagccggcgggggaggcccagctggagctggccggctctactattgatgagctgtgggcctcgctgtgctcacagaccattctgggcacgccggagatcgaaaatctggatgcgcgcatcattcgccatactgaaattgctcggctcgaatccgaagtggacaagctcacccgcgaccatcagcgcgtcaagaatcctgttcagcgcaatgaaatctatgccaagctccacaaggccaaaacacagctcgcaaaactgcgcgaagcatagtgatatgaaaaccattggggtcccgctggcgggagctggctcgcaaagcgagactgagggtggtccaggtccgtggcctagggctacgcccaagctaattgaaatattcgtgcatcatacagcgtacagttaaaccatgttccctctgctcgaaactctggtcgccgtatacgaggtgggccagttcacgctggctgccgacgaactgaaggtgtcgcagtcgacggtgtcgtcgcgtatcgcccaattggagcagatggtcggcgcgccgctgttcgtgcgcaatgcgaaaagcgacgtgacgcccacacaggccgggcggatgctgtaccagaccgccatcggcatcgacggattatggcgggatacgcgtgagcagatcgcccgcgtgcaggaggcgcgtgagccgctggccgtttcgttctcgcacacgaccgcggcgattctgctgccgaaggcgttgccggtgatggctcggaacatggacagtttcgacttcgccgtacacgtgatgaactcggatgcgattctcgaacgggtcagcatgaaggccgtgcagctcggcgtggtggaaaagccgatcgtgaacgattcggtggaccgcgtcaccctgtgcgaggaccggctggtgttggcgggggagcccgacggcgtgtggatggtgcgcgagcacggttccggcgtgcggtattacacggatttgtatttcaagaccgctcaggttgtgcctgcacgcacgatggaagtgtccagtaatgcggcgattgtggcggcgctgtccgccgggttcgggcagtcgttgatttcggaagccgccgtgccggcgggcgtgccggtgcagcgggagcttggcgatgagtttgtgcggcggttctatgcgctggtgccgagatccggtctgacgcacgatcagcgggagttggcggagatgattattgctgcgctgcgcgggtagtcagatagtcgactgaggggaggtcgcgaacgttgtttctctctctccgtccgcctgcggcggccacctccctcatcagagggagatcaattaggtatcgacaaaatcgatgatatgtattggttgcaatgatttgaccgatgtaaatgcttgagcttcaatagacaccgtgagagagttctgtacaaaatggtggaagcgcattaccaccgttgacatgttgttcattggcgttctgactctgctggcctcgctgttcgcctcctggctcaagcagttccccggattcagcctgttcggcgcgcttatcatcgcgctgctcatcggtatgatcatccagttcccgatccgcagtgcctacgtcggttccaatgatggccgcaaggcaggc

SEQ ID NO: 2018 - DNA, 10384 bp, Unknown
  R17_18m  MAG No. k141_32547
agggcgaaggccacgacgtagcccatgaagccgatgaccggaatgccgaagataatcggcttcatgccggcgtagtagacaatcgacgagccaacgaacaaaccgaccacaatcagggccatcgtcagacgattcgccatatccgaaagcagctggaacggctcttcggagccgaccagttccatgttgacgcgcaactgaccacgggtcagcatacgggccacggtcttgagttcggtcatggtgccgagcgtggcatgcaaagcctgatgcccctcaacgcccagcgacttgatctcgtcttcggtggcgttcttcagcgatttcgacgtggcgatatggtcggaaatgatttcgatcatattcacatcaggaatgaactcgtccagtaagccttcgagcgtaaccaacgcgcggccgacggtggtcaccgtactgggcacctcgatgttgtggcggccggccatctgcgtcagtgcggtcaggaaagcggcaatgtccagttcggccagatccacggtgccgaattccttgacgatcacgtccagatcggccaatagcgcgggatagtcctccggatcggcctcggtgccggcaaatcgcagcagcccctcggccagagcgggcgaatcctgtttggcgacggcgaaaatcatttctttgaggactgcacgggtgcgctggtcgagccgaccggtcataccgaggtcgataagtacgatctggccgccccggatgaggatattgccgggatgtgggtcggcgtggaagaagccgtcgtcgagaatctgtgtggcgtaattgtcgacgagcttggtgccgatctccttcaagtcataaccggcgtcgatgagctggcccgggtgggagacggagatgccgtcgatgtactccatgaccaccacatgctcggtgcacagttcggcgtacaccgtcgggcagtccatgtatttgaatcgggcggcgaaacgcttgaattcggcgagattgcgggcctcgatcagaaagtcagtctccgattcgaaggtgtcccacagctcctcgaccacgcccttcaggtccacgatctgcgaggtgcgaatcaccttagtggcggccttggctatggagcgcatgatggagacgtcctgggccatgatttcgcgcacacccgggcgctgcactttaatggccacatcttcgccggttttcagcgtggcgcgatgcacttgcgccagtgaagcagagcccaacggcttgggatcgatatgcgcgaacacctcgtcggcgggacgcccgtattcggcggcaagcacatccaacaccgtggaatacggcatcgggtcggcgtcggcgcgcagtttggcgagttcgtcgcagaagctttgcggcagaatctcggagcgcatcgacagaatctggcccactttgacgaacgtggggccgagcgcctcgaacatgaggcgcatcttgaccggagtcaggccgtgcagcacgtcgaattgctcgacgattctggtgatctgccccagtcgtttgatcttgccacggcgcgtcagatggtagcgcgtggcgaaatcgttcctgcgtccgaacagtgccagcgtttcgtcggatacgctcggagtcgccttggtaacggtctgcttgagcgtgtccgacgtgtcgacggaccggttcgccgccgcctcacgttcggctttcgcaggcgtcagaatagggtcgaccctgctggaaagcggggtcgaccctgattccggcgtagtgcgtgtgggcttggtcactcggccttgccctcgtcagcgggcttgtcggcggcactggtgtcggctgcggcagcagctttgtcgccggcttcggcggcggccttcttggcgtcatccaccgtctcgctcaccttgcgcttgagctcggtgttcagcgccttaccctgctcgaccgtaatctcacccttcttgacgagttcgtcgacgagctcgctgctcttctcatatccggtggcaagggctccgatgcccgccagcaggaccttgcgcaggccatcacccagaagatcaaaatcagccatgatacccctccttcgaggtccgacatggcctggtgccatgtctcgtaccaccaagcctagcgcaaacaacagggcaatgtactagaccctcagactgatttcgactgatttttcgctgattggtacttaccgaggactcaccgagaattcaccgaggacgttcggcggcagccttgcgcgcgttggtggctacttgatcgagccgggcgagctccttggcttgttcgggggtctgatcggacgtatcgaacgtaccgtaacgacgagtcacggcggtttcgataaggaaatcgctgatggcggggtttttaggcagcaacgagccgtgcatgtaggtgccgatcacgttgtgcacgcgcgcgccctcggtatggtcttcgccattgttgcctcggccgtcctgatcgacggtgccgagtggctgaacgccttcgcgcaggaaggtctggccggagtggttctcgtagccaatcacatcgccgaactggtcggaatgctcaacaagattgccgatcatacgcacgttctggcccacggtataagcaccgataacgccgatgccatccagacgggtgccgtccacggtttcaaagtactcgccgaacagctggtacaggccgcagatcatcagcatcggcgtaccgtctgcggcaagcgagcgcagcaggtcggcgcgatggtagaagtcgtcgatgattttcttctggccggtgtcttggccgccgcctcccagaataaggtccacctggtcgggccaatcgtcgccttgattgtactggtggacgaccggttcgtaaccgtacagttccagccggcggcggatagtcagcacgttgccggaatcgccgtagatgttcatgtctttgggatacagggacaccacatcgattgttctggccatgtcacgttctccttgtcgatgtcttcccgctaaggggaagtcttattcctcaccatgtcctcctgcaggcgggaggtggcgcgcgggcgctagagggtggttacttgcccacgccagcgtcccgtacttcggtgatgcggcccagtacggcgcgggttttgagcatggcggtgtaggtgcagtagatgtgcttgcgtgtgccgggattggcgttgacgaatgcggtgaccgcctgttcgaggtcggtgttcgtatcggcgactggcacttggtcataccccaagcgcaatgccatgtcccaggcgcgcacgccggagaccatggcgacaccggacgcgcgcaaagaggtgaagtccacgtcccatagccagctcatgtcgcggccgtcggcatattcgtcgttgatggcgatcatggtgtccgcgttggccgggtcgaagctggcgagcgagaggcggaagcccatcgggttcttgaccagcagcagttcgaccggggaaccgttgacgtcgatgacctcgccacggccgaaagccggcgtgacgcgggaaacggcggcgatgagctcgtcggcggacacggcgcaggcgttggctgcggcagtggccttggatgcggcggcattgtcttgcatcaccgcacgtaccacggcgagcgcggcggccgcgttgtacaggttgtagacgccttcaagtttgacgtcggtggcgtagtcctggctgtccatctggaaggtggccttgtggtcgcccacggcggtaagtgtcacgtcggcggggagttctgccgtgcctgcggaagctcccctctccgaggggagctgtccgcgaagcggactgaggggagtactgactgaagggagcggcccggccataccttccaccgacacggtcgtggccatgtcgtcatcggacgggaaatagtggcgcaaatcgtcggcgaggccgaagtatcgcactgtggtgccagccggggccttcgcggcgagcgcggcgatacgcgggtcctcgcggttcagtaccacagtgccggtagtcgccgcagccacatggctgagcagtttggccgtggtgtcgatttcaccgaatcggtcaagctgatcgcgcatcacgttcagcagcaacgcataacggggcttgacctgcttgacgaagtggacggcgtacgcctcatcgagctcgagtacagcgatgtccgcgtccaatttgccgccgaaagtgacttcggtgagcagtgcggagaccacgccgcgcacgaagttcgagccggtcggattggtgaacaccttcaatcccagatcggagagcatcgaggcgaccatgcgggtggtggtggtcttgccgttcgtgccggacaccaataccacgccaagcggcaactgcccgagcgtacgggtcaggaagccggggtcaatcttttctacgactttgccgggcaaagccgaaccgccatgtttggtgacgcgggatgcaaaccgcacgaagcggcctgcggccacggtggcgaacgcataccacggtttgcgggtctgcaccacggacgattggtcttgcgaaacatcgcgtgaaacgttgcttgccatcatcacaccccctgattgctgttgtagtcctgcggcatgtccttgaatttggacgtggcaccgaggaaggcgaggtggaaggtttcggtcgggccgttacggtgcttggccatgatgatatcggcctcgccggggcggtcttccttgtcgtagaagtcagggcggtggaccaggaacaccacgtcggcgtcctgttcgattgagccggattcacgcaggtcggagagctgcggcttcttgtcgttacgcatttccgggccacggttcagctgggaaagggccacgaccggcacttcgagttccttggccaagagcttcagggcacgggagaattcggacacctcttgctgacgggattccacggccttgcccgaggtcatcagctgcaggtagtcgatgactacgagtttcagatcgttggtctgcttcagacgacggcatttcgcacggatctccatgaggctcatgttcgggctgtcgtcaatgaacagtggcgcattctgcatcttggtccagaactggttcagggtgttccagcgttcgggggtgatgtcgtcggcgcggcgcagggcggccatcggaatattggtttcggcggagataatacgctgagcgagctccaccttgctcatctccaagctgaagaccacggaagtcatgttgtggtgcaacgcggcggcgcgggcgaagtcgatgccgagcgtggacttacccatggccggacgtcctgcgacgacgaccatctgtccgggctgcaggccctgggtcacgtcgtcgatgtcgcggaatccggtcggcacgcccttgttgacgagaccctgctgcagtttgtccagctggtcgagcgcgtcgtggaccaccgggccgatggcggcatagtcctgacgcaccttgcccatcgacatctcgtagatctcggactgggcgaggttaaccacatcctcagcctgcgatccctcggcggaataaccgagctgggcgattttggtgccggcggcgatcacattgcgcaaaatggcccgctgatggacgatctccgcgtagtacatggcattggcggcggtcggtacggatgcgacgaggctgtgcagatagtccgcgccgccgaccttgtcgaggttgccatccgccaacagctggttggccacgagcaccacgtccaccggctgactggcggaaaacagatcgatgatcgcgttatagatcgtctgatgcttgggctggtagaaatcggtgacgtcaatggtctgcgaaacttcgccgatggcatccttactcatcagcatgccgccgagcacggccatttccgcgtcgtcatcgtgcgggggcacgcggtcgaaaatcgggtcgccagctgccgccgcctgcgcgccgccccggcccgcgcggtcgccacgatcgccacgatccgagccactgccgaacccattctgatacgagtgttcacttccttctgccatagccctcaagtataggaggtggcgtggcgagcggaagatatcgcacgactacgttcattaggtcgattcctcactcattaggtcactgtgcttggtaacaccacaaaccatgcgcttggaatggcggcattctgaggcgctcgatcaatatctctcaaagtccaccgacctaatgaatgcacaatcgacctaatgaacgcatgaaagtgcaagtcgtgccgaatcatcgcgcaccaatttcatcgttggttcaccttgcggtcagcgcggcgacacgctgaagcgtcaaatgtggatagaaaaatagttatccacattttggggataattctggggataatccactaagttatccacatactggggataacttggtggatagtctggggataacattccgcgtccacaacaggtgcttgcgcaatgtagtcaggcgtgatatgcgtgtgagcgtgcacatagactcttccgacgccaaagccaccagttccggcgataccacacgccgcgatggcttcggaaccccgcatgccggcgcaaacacaaacaccagcaacggcccgaccgacgcccgctccaccaaccgtcggatcatggcgctggccctgccgaccttcggccagctcatcgccgaaccgaccttcatccttatcgacacagccatcgtcggccatatcggggatgcggcgttggccggcctgtcaatcggctccaccatcatcctcacggcagtcggactatgcatattcctggcctactcgaccactgcgcaggtggcgcatctgctgggagcgggtcgtcgtcgcgagggactgcaggcaggcattgacggcctgtggctggccttgagcatcggcaccgtactgggattgggattgttcgcggctgccgagccattatgccgggcactgggcggtcagggcgaagtattggaacaagccgtgacctatacgcgcgcaatcgtgctgggtgcgccaggcatgctgatggtatatgcggcgaacggcattttccgaggattgcagaaggttcgtatcacgctgatcgctgcggtgggcggcgcggtggtgaacacggcgcttgatgtgttgttcgttattgtgctgaattggggcattgccggctccggagtggcgacgctgatagctcagtggttcatggggctgttcctggtaatccccgccattctgtggtcccgggcggacggtgcgagtctgcggcctcgtttggccggtattgcggcagccgggggcgacggactgccattgttcattcgtacattggcgattcgtgcggccatggtggctacggtcgcctgtgccgcgcgcatgggtactgccgtgttggccgggtttcaggccgtgaactcctcttggaattttgcgatgaacatgctggattccgtgggcatcgccggccagacgctggtggccacaacgctgggcgctggcagcgtgcagcaggcgcggcggttgacgcgggcgaccgggcgtgcggggctggtcaccggcgcggtaatcggcacggcttttgcggtagtcggcctgttcgccggacacttcttctcccctacgccaaatattcagacgttgattgccgttggcatggtgacgatgggcatcttcttcccactgcaaggctggatgatggcaatcgacggcattcttatcggcgcgcgcgactaccgctatctggcaggcacctgcacgctgaccgccgtggtgtatgtgacgctcatactcatactggccaatatggtgacgccggcgctgacgagcgacctgatgcgtaccgccgtgctctgggccgcgttcaacgtggtgctcatgggcgggcgcggcctgtccaacgggctgcgcgtgcgctcggacgcatggatgaagtaggtatcggccgcgcgaagtgctgggcgattccgtttacatcgcggcgcgggcggcggaatacatgccgcgcacgatttgttcgcgccacttggaccagccgtattgcttggtgatggtctcaccggcggtggcaccgagcgaggagccgtcggcccgggtcaggtcgaacagcatatccaacagcatcttgtcgtggtgcaagcggtcggccaactcctccgccacggccggatcataggggtccttacccgtggcaaattcggatagggtcaaatgctcacgcaccagcacggtggcccagtcgacgatgtccggcgcgtagcccatacgcttgagaatcaccggcacatggcgggcaccctcggcggcgtgatcggccacgaacgcgcgcttgccgatgtcatgggtaataccggccaacagcaacgccttgaaatgatcgtcatcataccgtcccccggacggtgtctcacgacccagacgcgacgtgacctccaccatatgccgatcgatggtgtaccggtgggcggccgaggcggacggacggttgcggacgccgagccattccggcatccatcgacccggaatgtccacgaagtcgatgctctcccacacttccataagattcggcccgcatgcaagcagacgaataaacagctcgcgcgattcgtcatcccactggttgtcgtgaatcgggcagtgcttcagattaaccaaggtagacgggttgatgggcaaaccgaattcgccggccgccacggccatacgcaacgccagcttggcatccttggcaggctcggcaccgggtgccaacaccaattcgccttcgtgcttggccacgccgggagccaccacgtcgaattgcggggcttcacgcttgccgccagagcgctgagagaacatctggaagaacgcgaatcgcggcttttcgtgggtcagcgaatgtccagcgcgggatgcggtggaatcaagcgagaaggagatgcgccggccgatacgggcaagcagcgtctgcaaatcgtcgatcgagtaggcggcacgctcgttttcgggccaagtcggatcggcgaggccaagcatggcagccactttggcctgatagggcgtcagcatcaggttggtatccttgccggccaccagatggatgcagtcgcgtacgtcgagcagacgttccacggcttcgtcgtagatgccgtgcgggcggtcggccagccatgaggcggcgagcgcggagacgagcaccgcatcgcgcaaacccccacgggcctccttgatgtcgggctgattgacgtattggagccggccgaattcgtcgagtcgggctttggcagagtcgagcagttcgggcaggcgcttgcgggcggccttgcgccagcgttcgaggatggatgtggcggtggtggtaatcagagcggtgtcgccggcgatgggcttcacgtccagccagcccatggcggcgggaaggtcatggtcggtgacttcctcgcattgggcgcgcgtgcggatggagtggtcgaggtccagaccgctgtcccatagcgggtaccagagtttgttggccaactcgttgagctgctggtcgttcaacgtgcgaggctcgtagatgatgaccaagtcgaggtcggagctggggcccagttgaccacgtgccagcgagcctaccgcggcgaagccgatgccggagtcgggcacggggaaagagacatccttgcaggccgcattccacagctccgtgaggcattgcatggccagttccgtgcgggctttacgcttggtcgcaccattccggtagacaccatcgtcatccggctggctcatatccatgaatcgttgtttcaagccatctactgctgaagtcattgcttcatctttcattgccaaaaaggtccccgcacggcgtcaattcgcggcgtgcggggacctttcccatgcagtccatccccttctaggcatggacgtctgtgttatcagatcgcggcggaaccggtctcaccggtacgcacgcgggccacggagtccagcggagcgacccacaccttgccgtcaccgatggtgccggtgccggcggacttgatgatcacaccgaccagcgtctcggcatccgcgtcatcggacagcacttcaacgcgaatcttcggaatcaggtccacggtgtactcagcgccacggtagacctcggtgtggccgcgctgacggccgtagccgttggcctcggacacggtcagaccgtgcactccggcggccgcgagggcctccttgacgtcgtcgagcttatggggctggatgatagcggtgatgagcttcatctcacctcacctccttgagaacagagctggcagtaccagcaaaatcgtaagcacgttcgccctggtcggcaagatcgatgccgccgacttcctgagcttcggtgacgcgccaaccgatggtcttctccagggcgaaggcgatgatcgcggtgatcaccgcggagtagaggatggcgacgagagcgatgaccagctgaacgac

SEQ ID NO: 2019 - DNA, 10662 bp, Unknown
  R17_18m  MAG No. k141_33392
aacatgcagtgcccggcatcagtgtatgtacggaaagcggcgatgtggatattagcgatgtggatatcgtcattcggtgagtgggcatgcgctgtatgaaggtatccacagtaatgaagatatccacagtaatgagatgcgcgcaatgacgagttatccacgataacgagttatccacaatggtgacttgtgcacaagtgtgtagaaaagtgcataagactgtggataacttatgtggataagttaggaatgccgcggtattactgggtttgttgcagtggataactcgggtgtataactgttccctcgctgtggcgatgtatgccaagccaaagttatgcacgagatatacaccgagaaacgccgcttatccaccacttatccacatggttttccacattcggtggaaaactacatgggtgtgattcatccacaggctgtggataacgtagtggataagtcgtggataagtcgtggataagtggtggatagctgtggatgaacaggtgaaggcacgaaaaaggccggcctccgcatacgggaggtcggcctttcgcataagaactaagaacaacctaacgatagaaaaaacgatctaccgatagataagcgcaacgagtcggaactcagcgccatcccatcgtcatcaggaatccgatcatgatcagggcgaagccgatgcccaggttccacgcgccgatgttcggaatcggccaggagccggacggggagaggtagtacaccacacaccaaatcaggccgatgatcataaacgcgcagaacagcggcacgaaccaacgcgggttcgacttggtgcccttaatggtttcttcaacacgcttggtgttctccgcctgacggttcatcatgcgctgcatctgcggggtcagcgtggccttatcggcagtggcgttgagcacggcctgcacctgctccatattcacgccgtaagccgcgtcttcctcggcagaagcgttctctgcgttctgctcggtgtctttgttggcggtctcgtcagcagcggtgctggatgaggtctcgctctgccagtccttctggttgttcgagtcggtctcgtgcagctcttcgtcagccatcagcatagtctccattcaataggctaaaagtcataatagtggctacactcgaaagcggcgaccagagtcggcaagaagacaggaaattcatggccagacatgtaggtaagcacggcgcacggcactccctatggggtggtgtcgcggtattcgtcgtcattgccttgaccggttttctgctgagcaccaacgtgagggtcaatcgtacggttgccgccaccaacgatacggccgatctggtggagcaaggcgtgggcgaggccaaccagctgcagcaggacgtcagcgatctgaccaaacaggtcgccaatcttacggacgcgctcaaggccgatggcaccgacggtactgacagcacgcagaaccaaggcaaggactccagcaatgtggattccagcctgatgctgcccgcgctcagcggcagcggcgtaacggtaacgctggatgattctccgttatgggagaacgccgtcaacaacaatggcacgaccgccaatatcaacgattacgtgattcatcagcaggacgtcgaatcggtggtgaatgccttgtgggccggcggtgccgatgcgctgatgattatggatcagcgggtgctgttcaattcggcggtcatctgttccggcaacgtgctgtcgttgcacggtaagaaatactcgccgccattcaccatttccgcgattggtgacccgcaaagacttcgcgcagcgttgaacgactccgaagccattaccattcttaagcaatatgtgaccgcgtttggcattggctacaaggtggagaatgccgagggccttcagttccccgctaccgccgccttgctgcagcagttgaaatatgccacggtcgatacgtcaaagaccacagatgaggagcagactcagcaatgagacacggcaggcacaacagcggcgcaccggcgcccattgatctcgcgtccgtgtcggacgtacagcccttccccgaggacgacgccgcacgaatggcggcagacccggccaatgccagcagggcaaggtcccgtcgtgccgcagtacgcggcgcgtcttcgccccagcggagcctgatctggcaggcactcggcatctgcgccgaactgctgattaccgctgccgtgatttgcgccctgtacatcgtctggcagatgtggtggaccggtgtcgaggcggagcgagcccagaacgaaaccacccagtccgtcgactggagcgaccccagcaacaacgggggaacggtcaccatcgccaaagcccaggagggcgatgctccagtacagccgaaagacgcgaaatatggcgacttgattgcgcagatctacattccgcgcttcggctcccaatggcaccgcaacatcgtggaaggcaccacgctcgagcagctcaatcgccacggtctgggccattacgacaccacccagatgccggggcaggtcggcaacttcgccgtcgccggccaccgcaacggctacgggcagccgttgggcgatgtggacaagttgcaggaaggcgatcccatcatcgttcgtaccaaggattactggtacgtctaccactacacccggtacgagattgtgctgcccacggacgtgtatgtgatcgcgcccaatccggaagactccactgccaatcccaccaaacgcatgatcacactgactacctgtgagccgaaatactccacccccacccatcgatggatcagctatggtgagttggcgtactggaccaaagtgtctgatggcgtgcccaaagagctggctactactgattcgtccggtgcagtgaagttctccaccaccgaaaccccctcgatcgcttcccgcattggctcgctggacaaggtggtattcggcgcgctggtagtgtggctggttctgttcatcgccgctgcggtggcatggcgctggccggtgctgcgcgagattcgcgcgggtgagcgtcgccgcccggatgtcagcatctatggcggactgttgcgcctgcagcccggcgtggcaccgattcgatggctgctgctggctctgctgctgttcgcagccgccgcggcgctgttccagtggggattcccttgggccgccgccaatatcccattcctacagcagatgtcgaacttcgtggcagtgagctgacggcagcctagtactatagcttgcagtacacgtccctcaaggagagccctatgaccgattccgcgcatattttggtggtggataactacgattccttcgtctacacgatcgtaggctatctgcaaacccttggcgccactgttgatgtggtgcgtaacgacgctatcgacccagccgcgccgggtgtactggacggttacgatggcgtgctgatttctcccggccctggcgctccggccgaatccggtgccagtgaggatatgattcgcctgtgcgcggccagcggcgtgccgatgtttggtgtgtgcctgggcttgcaggcgctcgccgaggtgtatggctgcactgtgggccatgcgcccaccatcatgcatggcaagaccagcttggtggaacatatcgatgacgagattttcgagggcgtggccaaccccatgaccgccacccgctaccattcgttggccgtcgagcccgattcggtgccggatacgctggtggttaccgcgtggacgcagggcgaccacattattcagggcatcaaggtcaagggcaagccgatgtacgccgtgcaattccatcccgaatccgtgatgacccaggacggctaccgtctgctggccaactggcttaaggtctgcggccaagacaacgccgtggccaagtccgccggccttcagcccaaggttacgaagtagcttttccgcgcgcggcgacgctttcccgggaatgttgcgctgggatagctctttatacagcaaaggggaggggtgcagaagcccctcccctttgcgttgtgtgattgcgttgtgtgattgcgttgtgtgattgcgttgcgtgtttacgttgcgcatgtgttgcgctatgtgcgttgcgtatgcgcaacacacacgcccggcgctcactcactcacgggttccgccccccgttgccgttgttggcaccgttgccgttgccaccgtctccggtaccggtgtcgcctccggtgctgccggccttcgtggtaatggtgacggtcgatcccgcatctacttggctgccagcgccaggattgatgctgactaccacagcggtgctgtcggttggaccactggcctgagccttgaggcccacggccttgagcatgagttcggcggtggcgtagtcagtgccagcggtgatattcggtacagcgaccttttccttgcccgtggacacccagatggtgatggacccgccctgcgcgatggaagagcccgaatcggggcttacgcgggtaatcagaccggcctccaccgtatcggagctttcctgctccacggtgaagctgaacttgccctcatactgctgtagcacgctgtccttcgactgaccgaccaaattgctcggtacggtggtcatgccggaagaaacatatatggtgatggtggtgcccttgggaaccgactgaccggcggcaggatcggttctcgtcaccatatccttggcgatgtcggcgctgtcttcggttttgacggtggcgttcaccttgaacccggcgctttccagaatgctgcgcgcctcttcctggctgcgctccttgacatccggaacctgagtggactgcgggcctgcggagaaccacaccttcacggcagatcccctggccaccttggagccggcgtccgggctcatcttggtgcaggtgccttccggctcggtggagtcggtgtcttgcttttcggtcatcttcaagcccaatctctcaagcttgagcttgatgttgtccttggacgtggaagcgttgcacacttcagggatggtgacggtgtcttcagaggacttgttgccggagccgttcatggcgaacatgatgcccacaatgacgagcaccgcgacaatcgccgcgatcgccgaaccgatgatgatcttcttgcgcttcttggccttggccgccgccgcacgctgctgcgcacgggactgcaacgccgctgagttggcaccattggccggtggaatctgctcgaactgaccggtcaccgggttgaatgcctgggtgggctgctgctgcggttccaccggcgtggtgggcaaatcacgttcggcttccttgcgggccttcatattcgacaggtccgtcaatgggttgaacgcggccgccaccggcacgccgccgttcatgtaggtcaggatgtcggtcttgaattcggaggccgtggcgtagcggttctggcggtccttggccatggccttggcgcagattgaatcccacatcttcggcagccccggcaccacggcggatggcggcgtggcgacttcggagacatgctggtaggcgatggccacagcggaatcgccggtaaacggcgggcgcccggtaagcatctcgtagagcacgcagccggcggaatacaggtcggaacgcatgtcgacggtctcgccgcgcgcctgctcgggagaaaggtactgtgcggtgcccaccacgccctgcgactgggtcatggtggttgcggaatcgtccagagcgcgggcgatgccgaagtccatgaccttgaccgcgccctgctcggaaatcatgatgttgccgggcttgatatcgcggtggataatgcccatgcgatgcgaatagtcgagcgcgttaagcacgcccaacatcacctgttcgcagtcgcgctggctgagtgcgccgttgaccttgatgatgtcgcgcagggtctggcccttgacgtattccatgacgatgtacggcaaacgctcggtatcgccgctttcggaagaaaccagttcttcgcccgaatcgtagatgttcacgatgttcgggttgttcatctgggccacggcgtgtgcttcgcggcggaaacgggccaggaagatgtcgtcgttggccagatcggcgcgcatgattttcacggccacggtacggcccagacgggtgtcaagagccacgtggacctcggccatgccgccacgaccgatgagctggccaagctggtagcgtccgccggccaatgcggtgggcatactggtgctcattgcttattccctcccaatcttgaggccggggcctccaaaacaatgcgtggcgtgctggtcactcggcgcggcagtcgattgccggacgtggccatggtggtgtcggccatttcggtctgctgatccagcagacggcgttcgatgcgtgccagcgtacgggacaccaccagcgcgtctttcgggcgatccaacgggtccttggccagcatcgacatgacaaattcgcgtaactggacgtccaccgagttcggcagcggaggcacgggattgttcacgtgcgctgcggcgatatcgaccggagtggtgccggtgaacggacgatgcccggcaaggccctcgtacgccactacgcccagtgaatagatgtccgattgcggcgtggcctgctggccctgcgcctgctcgggggagatgtattgtgcggtgcccaccaccatgccgtcctgggtgatctggccttggccggtggagtagctcacgccgaaatcggtgatcttcacttcgccggtgtcggaaaccatgatgttggccggcttgacgtcacgatgaatcacgccgtgcgagtgggccacgaataggcctcgcgcggtctgaatcagaatgggcagcagttcgatgggatccatcgcgcccttgctatggaacagatccgccaacgatttcgaggggacgtattccataatcagaaagccgatgccgtcatgctcgtagtattcgaacaacgcagcgatgttcgggtgcgccagattggcggaattatgggcttcggcacgcaggcggcgcagcttggcctcggcgttggtcacgtccgagcgcagcgccttgatggccacttcacggccgagctgaatatcgtagcctttccagacctcgcccataccgccttgcgcaagacgcgaatcaagacgatatcggcggtgaataagctgtccttcgataagtttcactgctgcaaagcctcctgcatcatcgcgcgcatgatcgggccagcggcgagcgaaccgtatacatctgtgttatgcaccaacaccgcgacggcgatttgcggattgtccgccggcgcgaaaccgatcacccagccgtcgatggcagagttgtcggtaccgatttgtgcggtaccggttttggccgccaccttgatgccgtcgatggccagctgcggattggcctcggtcaccacgctctccatcatcgtggtgagcttgtctgcggaatccttgctgaacgcgttggccatggtttgcggtttggtctgcgaaagtacggtgagatcggcggcgcgcacacgatcgaccagcgtgggctgcatcagtttgccattgttggcgattgcctgcgcgaccatcgccatctgcaacggcgtggccgtggtgtcgccttggccgatggatgccagcgcaagcttgtcgtcggtcggatcagaggggaatgtggacgcggtggccgtcatcggggtgcccgtggattcggtgccgtcaatggtgatggtgctgccgaacccgagcttggtggccatgtccgaaaccttgctcgcgccgagtttcacgccaagctgggcgaaagcggtgttggacgaccatgcgacggcctcttgcagggagatctgtccgttgacgccatcggcctgtgcctcgtcgttcggcagctgtgtggcggttcccggcaaggtatagctggagcctgcaggaatcttcgtgtccgtctgataatcgccggtttccagcgcagccgaggcgacgatggtcttgaacgtggaccctggcgggtacagctgcgaggtggcgcggttgattagcgggctattttggcccgcagagagttcgttgtaggcctgagacgcggctttggcgtcatgggtcgccagtttgttcggatcgtagctgggcgtgctcaccatggcgaggatacggccggtgttgacttcgatggccaccgccgcaccatcgcgcgtaccgagctgatcgtaggcaacctgctgcagcttggggtcgatggaggtttcgatggacgcgccctgattcgtagtgccggtgagcatggccttggcccgctgccagatcaatgaatcggcctcaccgttgagcagcatgctgcgggaggcttccaggccgcgatcggcggtctggttgatggagaagaagccggtgaccggagcatacagcggaccgttggaataggtgcgcaggtatttgaacgcgtcgttgaccggttcggatttggccatgaccgtgccgtccgaggccagaatggcaccgcggtaggcaccgagctggtggtacagcgaacgggcgttgcgcggatcgttgttcagcgcgttggcccgtaccgccatgatgatggtggacgacaggccgagaatcacgaacagcgcgaccacggcggtgaaaagctgacgaagatatttgttcatacgcgagtgcctccgttaacgggaggaagcgggggaatcgtaccggtaggcgtgtacggttcatcggcgccggcatacgccggagtggtggcatccacaatgggctcggcgatgggggccgcagcggagcccgcagaggtcacaattgcgggcacttcgggtgcctcaagtgtgtctggcgcgtgcttggtgatgtccacaatggggtcgtcaaacgattccgcctcggactgcgacgccgtagccgacgcgctgcgaggctgaacgatcggctcagtggcgcgggctcgggcctcaagttccttgttgcgcagcacggccaaagcctcgtactggaacgtatccgaggtcagttccggctcgggcgcattggccgagttcgagatgatgatgagcagggtcgcgagaatatagttggcgatcagactggagccgccggccgccatatagggcagggtcagaccggtcagaggaatcaccagcgtgatgccgccgaccacggtgaacacttggaaggccatggtgaacaccagtccggaagcgagcagcttgccgaagccatccttgattttcatggcggtgataaagccggaggcaatgatgagcaggtagagcatcaaaatggccaggacgcccatcagaccgagttcctcgcccagagaggcgtagatgaaatcggagttcgcaaacgtaacgagcgaaggatggccttggccgagaccggtgccgagcatgccgcctgatgccaggccgaaaatgccggtgaccagctgccaggagccgccgggggtcttgttgtattgctcgttgctgaacgggtgcagccaggcatcgactcgctgacccacgtggctgaacatgcctgcggccagcacggcacccgcggcgaacgcgatcagaccgatgatgatccagcttttacggccggtggccgtgtacagcatggccacgaacatggcgaagaacataagcgaggtgcccagatcatgctgcatgatgagcacgcccatcgaggcgatccacaccacgatgatcgggccgagatccttgatacgcggcagctgcagaccgagcatcttcttaccgcccacggccagctggtcgcgatgatcgaacaggtaggcagcgaagaagaacgcgaggaacagtttggcgaactcgcccggctggaactggcccaatcccggaatcctgatccagatgcgcgcgccgttcacctccatgccgatgaacggcagcatcggggcgagcagcagcaccaggcccaccaccatcgacacataggagaagcgtcgtagcacgcggtagtccttcaggaagatgatgagcagcgcggaaagcacgatggcgatgcacagccagatcagctgacgttgggcaaccgcccaaccttcgctctggtcaatgcgagcgatcatggtcacgccggtggcggtcagcagtagcacgcaaggcagaatcgactggctggcgtacggctggaagcgcacaatcagcccccacagcaccagaaacagcactacggccaatgccagcatgccggcgtattgcatagggaattcgccggcggtgcgctggaacatctggatgaacgccaacgcactgattgccatggcaatcagcaacaaagaaatctgacgtagacgggtaacgatcattgagaatctcccgtggccgcgttgtcggccgctccgataccggatttatccgaggaatcggatgagcttgacgaaccggacttgtctgacgaggagccggactggctggacgaatcctcggtgctgtccttggaatcgctctgggagctgtctttggaactgtccggggaattggacgcctcggccttcttggcggcgtcggcttcctgctgcttggccagtttgcgcatttcggtgcggataatacccacatgcgactgcgcttcgtccaacgaaccgactgtgatgccttggctcagctggtcacgccatgtctgaggcaggtccgcggtggcgatattggtggtctgcacttcgtgcgaaagctcaagtccaaagagattg

SEQ ID NO: 2020 - DNA, 4714 bp, Unknown
  R17_18m  MAG No. k141_33897
gattgctcccaactttttgaataattttcgagccgagccgacataaccggtgtagccttcacgcagcgaagctgttggaataaatgcgacttttttattttcaatttcttcctttatcagacttcctacacttgaaaagtgtgaacataaaaatagtttcatcaatattcttctttataaattccgatttgtttctcaattttcgtattcaaattataccataaaattgtgaataattctaccgtcattttggactgtatgagaaaagtccggacagttttctgcccggacttttctcactcaatcataaatcaattccgctttcacaatctcctctgcctgtgccttgcaagcgttcatctgccgcacccattccatttggttttcggctttcagttgctcggtcacgccgttttgctctgccagtgaccgcacgatcagctccatgcggtttcgtgccgcttcgtcgatcttggcgcaatactgtcttacgtacacccagctatagtcaagcggcgttttttcgtaaggattttcggcgtatcaatcacgcatagatattgcgcggacgcatgtcctcgggcaggccgtcgagcagaatcgccacggaaccttcctcgaacacggagcgaatacccgcggccagcagcggtgcgcaagacagtacggtcatattcggcaggcgcttctcttcgggaatcggcacggtgtccataaacacgatttcatgcgcgccgcagtgagacaggcgctccacggccgggccggagagcaggccatgggtggcgaccagcgtcaccgacttggcgccggattcgttcagggtgcgcacggcttcgcagatagtaccggcggtatcgaccatgtcgtcgatgaccacgcagtcgcggccgtcgacatcgccgataatgccatgtgcctcggcatggttcggacgagtaatatcacgctgtttgtggatgaatgccagcggcagattgcctagcttggcggcccactgttcggacaccttgatacggccggcatccggggacacgatggtggtgttgcccagatcaagggtggaacgcacgtaatcgagcagcaccggcatggcggttagatgatcgaccggaccatcgaagaaaccctgctcctgagcggcgtgcagatcgaccgtcataatgcggtctgcaccggcggcgtggaacagatcgaaaatcagacgggcggtgatgggctcacgaccgcggtgcttcttatcctggcgcgagtagccgaggaagggcgccaccacggtaatcgacttggcggaggcgcgcttcaaagcgtcgatcatgatgagctgttccatgatccacttgttgatatcgcccgaatgacactgcagcacgaacacgtccgcaccacgcaccggttcggtgaaacgcacgtacatctcgccattggcaaagtcataggacgtggtttcgaggatttcggttcccaaacattcggccaccttctcagctagctcggggtaggcgcggcccgtgaccaatacgagtcgtttatccggagtgccttcaagaatcgccgacatgcgttcgcatcctttgtttgagtcgctgtgtgatttacgccttaaccagtgtacaagcaccccgccgcagcgaacgccacggcggggtgcctatttcgtaagagtgttgagattgccgaaattattcggagaactcgacactgaccttattgtctttgatggtgaaggtgccgtataccgagaaagtgctggaatcgtcttccggttcccagccatcgctgtaacggtactcgtaattcgccgtcacatcaccttcgtcggtgctgaacgagctatccgacaggctcacgctggtgaccttcggataaccgtcaatcgtccacttgaagttgcggtatcggctggaattggaggtgtagtagccgaacgggcagccctgcggttctgcatcgatggaagccgcgcattcatccagcttgctcttcaccgccgtgtcgatttccgacgtcaacttgtccgtaggctgagcgtcaagagtgccgctatcggagctgttggtgctcagagacacggtcttggcggtgtaatagtcggacttcaccacgccaactttgtagacgccggggtacaccttgagccggtagttgccggtttcgtccgcgtcgttgttcacggcgttcttgggcgttacggtcacgccattgacggtgatgctgcccagcgagcttggcgcatataccgaaatggtcttgaccaacggttcggcgacggtccagttcttgaagatcaggaacttgctgccgttggccaccatcttgatggaatcgccggtgacctccttgccttcaagcgtgtacgtcagctgggcgctcacggtgccatcggcattgttggaagtctgcgagatgcgcgcgttggtgatgtgcgtgttctcgcccgaggatgccttgctggtcagcagtgcgcgctggttcgtatccacgtgaggatcggcgatggtgttggccttgtcgtagtcgccggaggagatggcggccacatagctgttcgccacgctcttcgcgctgaacacggcggaagacagcacgccatacacgataccgaacagtacgaggaagccggccacggcaccaacgatgatgaagatcttcttctgctgctcattcatggtggtggaggtcgcgccaggtgcggctaccggtgccgctccgggagtggtgggagccgcggttgcgaatgtggtgcccggagcaccgggggttgcaggggcggccggagcacccggggcagcgggcgcgggtacaccgacaccagcaacaggaggctggccggcggacgtcggcgtgacgttgacgtgaggctgcgcagcgtttgcgcccgtacccacgccggcgcttggcgtgccccacgtgggccacttgccgaccattgcgccgctggcatagatgtagtcgaccacaggctgaggcgtggcacgcacagtgccgcctacaagtagggcccgcagtcccggcatggaaaccaccatggtcgggccgaacgtcagtgcaacgacctcaaccaggaatgcccacaggcccatgaccaggaagtaccacatggcaggtccggtggtctgaacttgcgtgacggaggtgcggttgcccatagtacccatcagcagcgtggcaatcgcccagaacaccatgatggcgatcggggctttccagcagtgctgccagcccatgtaggcacggtcgtacaggttgcgtgcggagacgcgcaatgccgtgtagaaggtgaggaccaggaacacggcgaacaggatccaaataggccatacggtaacgctgaggttgatgctgaacaggctgagatcctgcggcagctgaccggactcggtcagtgtaatggcgccgaaggttccccaggtaaagaagaactcgccgatcatcagcagtgtgaccgggaacgtcagtatcaggattccctgacctgaggagaatgccacggcgaacagggccaccaggccgacgatgaagagcaaagccagctggaagctcaagacgctgaccaccgtgcgcgtgtatccgcgaacgcggtgtgcccactgccaagtagctccgaacacattcttggaatcggaagcatattgggccagtgcatagccggccagagcgccgagcgcggagagcaggtaggccataaagaacgtacgcactgtggcgccggtcaccttggccacgatggtggtgccactggcgagtggtgccgccgcgatggccgcaagcagcgtgatgaccacggccggcagcaatccggtgataaagccggagatcaggccggtgaacttgaatcgaatgctcttggaacgggccagcatgaatgcgccgaatgcggtgccgaccagcaatgccaagccggtgagccccagtgggtacgacatcatgttgctggcgtccatgctggaggatgagaggtcgacgatgtcgaaatgaataccgccagacaggcccatgaccaacgataggaacaggtagtggaagaagttcatgccgttgccggtgatgaacatgccgccaacggcttggttcagtgttgaatcggccccgaggctgggtgctgcggtgctcatggaattcattgcgattgcagggaaaatcgaaagcaccaaggcggctgccgtaccgatgccggccgcaatgccgatggtctgcatgttgggggcgccgaacagttccttgaccagtgggctggaagagatgggttgtgccggagcggcgggagccggcgatgggccgggctgccctgggttcggaatggccgtggtcggtgcggtgaatgccggtccgcctgcgggctgggcctgcggctgtgcagcgggctgaggcgtcggctgcacagccgctgcgccgggcaacggaatcgatggtgcgggagccgcgggctgtgcggtcgtgggaacggcgccggtgggttgaccgggcgtgggtgcggcgggcgtcgctgctgctggagctgacgccgcggcaagatggttgccgcaggaaccgcagaattgcgctccttcgcgcacagctgcgccacaattaggacagaacatatagtccccctttcttctgatgcttcttcgagcactatcgtacccgcaaaatcagcgccatgaccatagggcgaggctcgaaatggacaatactgggtgatggcgcgcgggcttggctgcgcgggcttggc

SEQ ID NO: 2021 - DNA, 12055 bp, Unknown
  R17_18m  MAG No. k141_34570
cagccaggtgcggatgatgtcctgaccctgcgggcgaaggtccatcgggaaggtggaagcgaacagggccttggaggcctcgtccggctcggcccagtgggtcacgatctgtggggtcagcgaagaggtggcccaggtgtccatgatgtccttttcggcggtgaaaccaccgggcacatcacgctgggactcgtcgtagccctccggcacgtcgatggtcgggtcgatcggcagacgatcctcggacggagtgattgggtgatcgtaatccggctcgccggaagcgttcaccgggtaccacagcgggaacgggacgccgaagaagcgctgacgggagatcagccagtcgccgttcaggccgtgcacccagttctcataacgcacgcgcatgaagtcggggtggaactcgagttccttgccgcgctcgataagctcggcgttcagcttggcgtcggtaccgccgttcttcaaataccactggcgggaggtgacgatctcgagcggcttgtcgcccttctcgtagaagttcgtcatacgcttggtcggggtcggctcgccgtccagatcgccggactcgcgcagcttgtcgacgatgatcttgcgggcggagaacgtggtcttgccagcggtttcggcaaagacctcgcggccggccgggtcctcgatccagtccggggtatccatcacgatacggccgttgcgctggatgatcgggcgggtgggcagcttcaggtcgcgccaccactcgacgtcggtcacatcaccgaacgtacagcacatggcgataccggcacccttgtccatttcggcggccgggtgcgccagaatcggcaccttgaccttgaacagaggggagtagacgtactggccgaagtactgcttgtagcgctcgtcattcgggttggcgatcagcgaggtgcaagcggccagcagctcggggcgggtggtctcgatgtagattggggtgccgtcctcaaagcggaaagccaccttgtggtagaagcccgggtattcgcgggactcaagctcggcctgagccacggcggtctggaaggtcacgtcccacaggccgggggcgtcctgctggtaggcctcgccgcgggcaaggttgcgcaggaaggccttctgagccacgcgccgcgggtgctggccgatggtgtggtaggtctgcgaccagtcgatggacaggcccagcttgcgccacagggcctcgaacagcttctcatcctgagcagtcagacgctcgcacagctcgatgaagttcttgcgggaaatcggcacctgatccttggcgtcgatcttcttgccatcggtgccctcgaacggcggcttgaagtccgggtcgtaggggagggacacgtccacgcgcacgccgtagtagttctgcacgcggcgctcggtgggcaggccgttgtcgtcccagcccatcgggtagaacacgtcgtagccgcgcatgcgcttgtaacgcgcaatcacatcggtgtgcgtgtaggagaacacgtgacccacgtgcagcgaaccggagacggtgggcggcggggtgtcgatggagtagacggccttgcggtcgcgggtattgcggaatttgtaggtgccgtcttcatcccagacggcgcgccacttgtcctcaagtccgtccacaccgaccttgtcgggcagcggggtgaggttggcgttgatgatggatttgccttcagtcataaagccaaagtttatgcacgttgcatgacaagccgaactgtacagtaaacagcccagtaggctgttcgcaggcgagatacgaacgatcgaacgatagtgagccaaggactatcgggcgtagcccgtccgtgactgaaggttgcctacttcaccgtcaacccggccagcggcatgcgacgattgatcatcgaggtcgggtagccggagaccttggaggacgccacagtgaagcatttgcgggtatacagccaatcactggccgcatcctcgctgatcagccgggcgtacgccttcattcgtgcctcataatcggcgtcattagtggcggcgcgagcatccgcataggcctgttgcgcttcggtatggtcgtaatggaacatggaatcggggtcggcgaatatgccggcatcatccgtgccgtccatgctcatcacggtcagttcccatttgccgtccttgattcgtttggcataatcctcatcggagagcacttcaaggttcaccgtggggcgcggctgccgctcgatctgctgcttgatggtttcggccaacgaccggtattcttcggggaccaccagattcaccgtagtcagatattgcgcaccgaagtaggagaacatctgcccagcttggttttcgtcatgcggatacagtccggtcaaatcttcgtatccgggttccagcgggctgatggggccgcccaatgctccggctgcgtcgggttgggcggaggcgatgccggctgcgtcgatttgatagcggaaggctttacgcgcctgttcgtcggagagcagcgaatcgatgccgttgttgtaggccagcagcaccttatccgtagtggccccctccttgacggtcaggccatccttgccgttcaaaccggtggccgtcgaagccgaaaccggtgccgccatatcgagactgccgtcggtcagggccttgctgagcgcatcggcgtcggagtattgcataaattcaacgatattgctggccgctttggtgccatggtaggtatcgctgcgcgccagcttcagggaatggccaggctggaaatcggccacggtgaatggtccggaacctatggccttgcgttgataatcggcactggacgactcggaatcgtagacaatgccgagtttgccggacagcgctcgcagcagcgtcggattgggcttggcaagcgtaatgaccaccgtggtggcgttcggattggcgaccgacgtcagatcgcccaattcgtcgacgtccgccaccttgttggtcacgttctgttgcaacgaccacacggcgtccgaggcgtccaacgtatgaccgttcgagaaggtgacgcccgattgcagtgtcagggtgacggtcagtccgtcatcggaagtcttccagcttgtcgccagtcccggctgaatcttgttgtcttgatcgacggtcactaatgtctcatacacattgtcgacgagcaggcgctcggctgccgcagaggaatcggaccgaatatccaaggattgcggcatatcgtcgatgccaatggtcacatcggcatcgagggatgatcccggctggaaccggttttgcatgaacgtccatcccgcaaccacgagtgcgccgagtgccacggcgactccgagaaaaatcccccacttggaccatgtattgttccgcttgctgtgctgcatggttttcagtctagcggtggattcagcctagaatccgcaattcaccatgatgaggtatgagttagcgcttggacgtgctcttgccggcgggcggcgcatagctagggcaggtgtcggacagcgggcagttggcgcagtcgggggtacgtgcgtggcaggtggcccggccgaacagaatcagtcggtggctgagattcgtccactcttcgggcggaaaacaggcggtgatttccttctcgattttcacgggatcagggtgtgcggaccgccaatccgaccgccaacgcagtcgtccggttacgcgcatcacatgcgtatcgaccgggaatccggggatatcgaacgcgttgccgagcacgacgttcgcggttttgcggccgacccccggcaagctggtcagttcatccatcgtgcgcggcaccacgccgccgaaccgttcgtccagtgccgtggccagtccgatgagatgctgggttttcgaacggtagaaccccagcggatgaatgatgtcttcgacttgggccgggttcgcggccgccaagtcacgggcggtggggtaggtggcgaacagttccggggtgaccgtgttgacacgcttgtcggtggtctgggcgctgagcacggtggcgatcagcaattcgagcggattcgagaaatgcagtgcgcaagcgggtgccggaatcacctggcgcagaatgtcgtattcgtcatgcatgcgcgtgagacgcgcggatttggtttctctcatcgtatggacctaagcggcgtaatgtcgatgattgatggtttgtagcgctgctggtctgtcaggcggcggtgttgagatcgggggtatcgtcatcggtgccgatggcggcagaggatgctttggcggcctgctgtgcggcggcagtttccttatccgtctccggcgggtcgaatcggtagcccacgttgcgcacggtgccgatgaggtgttcgtattcgccgccaagcttggcgcgcagacgacggatatgcacgtcgaccgtacgagtgccaccgtagtagtcgtagccccatacttcctgcagcaactgggcgcgcgtgaacacgcggccggggtgctggaccaagtacttgaggagttcgaactccttgtatgccagatcgatggggcgtccatgcagggaggcggtatagccgttggtgtccacaatgaggtcgccggagcgaatctggccatcttccaccgtggtggtggattcggcgggagaaccggctgctgcggctgcgggagcgttgccgcgctcggagaccaatcgcaatcggccctcgacttcagccggggaagcggtggcgaccaccacatccgcaatgccccactgggagttgaccacggtgaagccgccttcggtcagcaccagcacgattggcgtggacaggccggaggcgtggatgagacggcacaaggttttggcggtcgccagatcatcgcgtgcatccagaaacagaatggtgttctccggcatcttcaccaagctggctgcatccatcggcagcacgcggacgcgatgagaaagcagggcgagtgatggcaaaacggtggcggggtcgctggcgaaagtcatcaacgtaagatccgtcacgctaatccccctttatcctgcaatgtgttacgcaattgcttggtgtggctgtacgagtcgtcagcggcgttatgccgctttcgcgcggtttttcattattctacgcgcttgtagtggacacatgggttacaagtttgcggaatatggaacggcagacgtccatcaaccgatgacacggccgagcaccagtgcggttgcggcgatggtcacgcccatcagcattaccggcatcaggccggtaccgatccacggatagcggatatccgggtccggatcggcgtcacgcacccacaacgtggaggccacggccaaggccagtcccaaaacgatgaggatgatcagggcaacagttcccgcaacggtgcccttggcgagcatcgcgcccaaatcaggcaggaagcaccagccggccacggcgagagccgccacaccggaagtcacggcgtgagagagtgcgcggataagatgttcgcgcttctcacgagccatctggcgcccgaaggagaagaccaccagcaccaccagcagcaggcccatggctagtgcccatgaataccaaggaagtaccgagccatccgcagcggtctgatccggcggaaccttgccggtcgggaaaggtacgatgacgaaaatcagagaaatcgcgccaaacaccaaagtgacgatacgatccagcatgctgccgcggaacggccagaacacgacaaatgcggccaacgtcagagcggcgataatcaaagggatgatggggacggtgccaggggagggaatgaccgtggctgcgatgagcagtacataggacgtcagttgggccaacaacatgctcagggctttgttcttccaaccctcctgggtgatctcggtcatgatacgcctctcagataatcgaatttccatcccaatcctacgtcgggcattggaacggtgaaatcaaacaaaatagccctttctggtgaaggggcttatgacactaaatcagaacgcgataacgcccaaatgctccaacagcactttgacgccaagtagaatcagcaccacgccgccggcgatctgcgccggctcctgccagcgggagccgaacgcgcggccaatgtacaggcccgcagcggagaacagtccggtgaccacaccgatgctgaggatggcgaatgccatatgggctttggtgaacatgaaggtcaggctcacgcccacggcgaacgcatcgatgctgcaggccacggccaggggaagcatatgcttccaatcgaactgggcggtctccttggagttttcctcatcttcttcgaaggcttcgtgaaccatgttgccgccgatgaacaccaacagggcgaagatgatccaatgatcgaatcgggttacgtatttgctgaatgtagatgccgcgaaatagccgagaatggggaacagcatctggaatccgccgagccagagggcgcttttcgcggcgtcttgcactcgtacgcgggatacggccagacctttgccaatggatacggcgaatgcatccatagctacggaaacagaaataagcaggatttgaatgattatcggaatcatggtgcgacagaaggttcatcgccggattaccgtgcgatgggcctcgaccagcgttcctacacgccgcctacgcctagctgaaaaatacaccagcactatatcacgcgatgcacgtcgaatcaaaaaggcgggaggcctccggagaggtctcccgccgacgattcggaatcgaatcacttgccttcgttggcgaggcgttcgcgtgccgcgatgatttccttctcggcggcgtcagcaccggtccagtagtcgcccggcaggacttccttgcccggctccagagccttgtactgctcgaagaagtgcttgatttcggccttgtggtactcgttgacgtcgtcgatgtccttgatgtcatcgaaacgaacgtcggcgggcacgcacagcaccttgtcgtcgccgccggcctcgtcgaccatgtggtacaggcccacggcgcggcactcgaccacgcagcccgggaacacggagttcggaatcatcacgagagcgtccagcggatcgccgtcctcgcccagggtgccgtcgatgtagccgtagtcatccgggtaacccattgcggtgaacagggtacggtccaggaagacgcgaccggtctcgtgatcgacttcgtacttgttcttggagccgcgcggaatttccacaacgacgttgaaggtttctgccatgtcatttctccttgaaaatcgacagttacgttatcgtctcaccacaataccctgtttgcgcctgcaaaacaggtgcggaactcaagaaaccgtgctgagattatgccgacactatgtctaaacagacgaaatcctcccctcaaggggaggatttctagcggtttacgcacacgataaacccatgcacgtcaacggcatcactgttgcattaccgttgcactaccgcatcactgcacggacaggatgtgagccacatccgcccaaggcgccagagacacgtagttgtcccaaccccactggaattcgcggccggtcagctcgtcgcgcacgttgagcgggcggtcggtgggcagacccagctcgccgagttccaggtgaatcatcgactggtgtgcgttgtgtccatcgaggttcacgaccacaatcagtgtgtccgcttggccggtaccagtcagttcggccggcgtgtggcgtgcgaaagccagaatattctggtcggacgtaggcagcacggtgaggttgtggtagctcaacgcggccgggtgggcgcgacgaatcttgttgagcgcggtgagcatctcggccacgccgtactgcttggccttgctccaatcgcgaaccttgacctcgtacttctcgttgtcgatctgctcttcgaagccggggcgctgcttgttctcgatgagttcgtaaccgttgtagataccccaggacggcgagcccatggctgccagcaccgcacgcacgcagtggccggctacgccgttgtctcgcacgtaagcggtgagaatatccggcgtggtgggccagaaggtgttgtgctggtagtagccgtcgtcgccattggtgatcggcagatactcttccagttcgtccttggtgttgcgccacgggaagtagcagtgggactgggtgaagcccacgtagctcagggcacgcatcatgcccgggcgggtgaatgcctcagccaggaacaggatctccgggtgcttcttggtcacggcggcaatcacgtcctgccagaaacgcaccggcttggtgtgcgggttatcgatgcggaagatggtgacgcccgcctcgatccacagattcatgatgcgttcgacttctttttcgatgccgggcatgtcggcgttgaagtcgatcgggtagatgtcctgatacttcttcggcgggttctcggcgaaggcgatggagccgtctggcttgtgacggaaccagttcgggtgggccttgacccacgggtgatcgggcgagcactgcagtgcgaaatcaagcgcgatttccagacccagttcatgtgcacgctggcacagggccttgaaatcgtccatggtgccgagcagcggatccacggtgtcgtggccgcccagctcggagccgatgccgaacggcgagcccgggtcatcggggccggcgaccagcgtgttgttgcggcccttgcggttggtcacgccaatcgggaagaccggcggcagatagacgatgtcgaagccttcggcagcggcgcgttcgaggccggccatcgaggtcttcagcgtaccctgaatgatcttgccggtgttcggatcgatggtggcgccttcggaacgtgggaagaactggtaccaagccgcgaagctggacttcgggcgttccaccttgaaacgctggggctggctgggggagatgccatcgcgcagcgggtgagtctcgtgcagggcggcgatggtagggttgtcgccggcggcgaggcgatcctcggcgctcagcgtctgatcggccatggtctcagcggccttctccaaggtcttgcgatcgcgtgcggtcaggccggcgtccggggttgcggcccaacgggccagcagctcggcaccggaattgagcgcgttgtccacgtcgtccatcacacgcaccttgatacgggcgtcatgcagccaagaaacgtacgtgtcttcccaaccttcgatggtcacggtccattcgccgagctgacgcttgacggccgcgtagccatcctcccaaggcttcagatcgctgtgctcgccgcacttgaccatcacggtccaacgatcgaggccgggatttacgcaggtcatggcctggcgcatggtttccttgccgcgcgggttgcgcacgatggcggtggcacccaccttggtgcggccttcgatgaacacttgggcggtcatctcaaacggttcgccgagttccacacgggcggggaagatgccacgctcctcggcgggagtgatgtccatgacattgatgcggccgaactggccgggctcgtttgcttcgatggacggtgcgggggcttcgacagccaggcctttcagcgctgctgcggcgcgtgccgtttcggcgctgactctcttgcgcttggttgcggggctctttcgggcagaagtcgtctttgacttcgtcttcgtggtgttgttatcggtattactagtgcgcgtggtcgcgcgatgttgtactgctgccataaggccctattctaggggcttttgaacatatgttgcacattgtggataactttcaggtaaacgttcggtcaaccgcatgaggtggataactcggcggaagagttatccacaactcgccggcaaacggcaagctcggaccacataggtcgaaagaccggctgtagcgaatgaaaatctgccatgatcgtggcctacccgcacacagtgcagtatgcggggaacgtaccaggaaaggacgaatgatgatagcgacatggcggcaacggggcatggccatcgtagcgatgctgaccggtctgataataatggtgggagtggtgttcggctcggcgaatacggcgtatgccgcgacgttgacgcccgccgacgaaagatatcacgtgacgtttccatacaacgatatggaatattacgtcggtgtcgcggggctggacgcttcgggcaacaagtactactgcatcgaagcggggaaactgagcgactatgtgataggccccaccacggtgcttgcctccgatgagaacgcccggcgtatggcatggatccttgaccggtaccgcgacacggatgccgccacccatgcggcgatcggcatcatcgtgcaggatcacttcgggcgcgatcgggacgagtgggcgagacagatggcggtcattcaaggccggtatcccgagatcgtggcgaaggcggcccggatatgggatcaatcggccggcaagacgcctgcgggcacgacggtggaacgcaccgatgccgaggctttgcgcagcggttccatctcggtgaaagtggtgaaccgcgacggtgacgcgatcgcgggagtgccgttcaccgtcaccttgcaggggccggcgcggttcatccaaggcggcaacacgttctcgggggtgtcgacgagcgccggatcctcgatcgcgtgggaggcgaccggcgccggcgaggtgacggcgaacaccacatacgagtatgggcggatgcacgtcatggacagcactcaggacatgctggccttcgattcgatggcttccgccggcggttcgtcgtcgacgttccaggtgcgcaaggatttcgttccgtcggtgtccacgcaggtgtccgataaggtgcttgatgcggcttcgccggtgttcgatgatgtgaccagcggcgtgggggacgagggcagtcattgggtgcccggtctgaagctgcaggcgcgtggatactatttcgacgggctcggcaaggatgatctgggcaaggtcatcgcgccgaacgcacgggagagcgcggacgcttttctcgcccggttggcgtcctcgggttatgagccgagtgcttatggcaaggcgtccttcaccggtgtggggcagcgggttcgtgtgcgggccatggccaagccggacggtgacgccgcctatctgactccgaagaccggcggctttggcacctgggtgtgggtgttccggcggagcgagcaaagcaaacgggcgcaggaataccttaccggcgactgggtgagcccgttcatggaggcttcggaaagcaacgtggggcgcgggaaggtcgaagtcatgtcgacggttaccgaacattcggcggatatcggcgccgaactcagcgacaccatcaccgtatcggggttcccggcggaccacggccagttcatgggtgatgaaacctatggtttcgcggcggatcagccgtatgcgacggtgagcgtatggtggtccggcgatcccgacaacccctccaacgatgaggcgtacaagccatccgggggagaggtccccacggaagacgacaaccaccggttgctggccacctgggagattcccgcgatgaatggcacgttcaaaatcggcgccggggcgttggacgcgcatggcgctcccatgcatctgaccgccgaacggcatgggtggtacgtgttcgtttggcggttcgagggggatgaccgtgtttccccggcgtccagccggtatgacgatgcctgggagcgtgtgcgggtgttgcccccatgcgagtcggagaaaccgtgcgaaccggagaaacccgagacgccaccggcgccggcggaggcaaccacgcccaacactcgcccgtcactgcccgtcacgggtggcgatgtgtcgcttgcctcggttctggccgtgtcagctctggcgataggcgccatactgtccatcgtcgttcggtggcgtcgttgctatgaccgatccaagcactggacgatgcgctggccgatacgttgacccgctgcggcatgatgccgatgatgtcggctggatggtgaaccgcactccgcttctgagcagaaggacgggagctgggcacgaagtcgattgtgacatacgacttgtgcccggcttccgcttcgttgagaaacttcacgcctgtcg

SEQ ID NO: 2022 - DNA, 3276 bp, Unknown
  R17_18m  MAG No. k141_35106
gcccgccgtgacgatcatggctcgcgtacctacgcgattgccgattgcacgccggatgtgctgaccctgaaggatacgctgctggccaaggcaccgacggtcatggtcaagctctcccccatgctcgactggcataagaccgtcgccgatttcgccggcgcggtgcatgaggtgcatatcgtctccaccgggaatgaatgcaaggaattgttgttggtgttggggcgcggccgttgcgcctcaccgctcgtggtatgcgtcaatgacgggcaggtgctgtcgtacaaggccggcgataacagcgacaatcacacccctatcagcgattctgccttggttgcacgcaatacctgtaataccgaggatttcccggctgaggaaagcgcgaacggcttcgattcctcgcattggaagtacctttacgaacccaacgcctcaatcatgaaggccgggtgctttgatgttctcgaacagcgcttcgtcgtgcatcacatcagcccgaatagccacctgttcgtggcggccgaacctattgccgattttccaggcagatcattcgtcatcgaatccatcgtcaccatgaacaagaaagaactgaagcagctattggccggtctcacgcacgccaacatcgccgtacgcaatttccccctaaccgtggcccagctacgcaaaaaactcaaactcaaggacggcggcaacacctacctcttcgccaccaccgacctcaaaggccatcacctagtactgcgcactgaaaagcgaaaaagtggctccctctgacgaggaagccaccaatacgtcagctaatcagtccttggcgatggtcttgccggcggtcggaccggaggcaaggttctggatttcggtgacttcgagaaccggaatcacggccggcttcttggtgcccttttcctcggcgatcttgacctgctcgttgtagatgtcgtcgtcaacgtgcagcaccacgttgccgcggaagcggtagccctgcttcttctcgaggttggcgaaggcgatgaccagcggagagccgttcttgaggttctcgtagtgctggccggcggtgcgctcgtggtaggcgatgtgcgtgtcgtccagcacgaacagggacatcttcgggccgaggtccagttcgccgtccttggagacggtggtgatccaaccgaggttgttcttgatgaattccttgatttccggagtaatgactgccatgtcgaatcctttcatgattgctatggacaacgtatttttactctttccagagtaccggtttcgagcgcgactagcccggatgttcgctgtgagtaacctcaccttcgcacagctttcatccggttcttacctgcttggcgatgccgcgccccggccgcgcaccagccacacacctgtcacacacccgacgcccatcgaccggtcgattttggccggtagttcccgtaatctgtgagccgagagagccacaagttttcctaactgtcctgaggtgcaccatgggtttggtcgaacgtttcagcaagctgcgcagccgctggtcccgcagctttcccccgaatctcgcccgactcatgttgctgggctgcgccgcattatggggtggcagttatctgctcgccaaattcgccatggaggcgattccgccccaatggctgatgggtctgcgcatgataggcgcctgcctgtgcatgctggccttgttccataagcacatcgtgccgtatctgacgccgaagatcattgtgccggcgctcgtggtgggtctgacctactggggcacgatggtcacccagaccatcggcctgcagaccattgaaccgggccgcagcgcgttcctgacggccgcctactgcgtactcaccccgttcgccacgtggatcatttcgaaaacccgcccgaaggccatcaatctggtcgccggcgtgatctgtctgatcggcgtcggcttcgtctcgctgaagccgggcggttcgctgtctctgagcgccggcgactggctgaccatcgcaaccgccgtcatcttctcgttcaatctgacctgccttggtgtctacaccaaacgcttcgaccctatcgccgtcacttttgtgcagttcggcgttgccggcgtattgttcatcatcggcgcgttgttcaccgaacccatgccgaacgccagctggctggcaccctcagtagtggccagcgtgctctatctgttcctcggcgccacgatgagtgcccagatcatgcagaacatcggtctggctcacgtgcctgcctcgcaggcgtcaatcatcatgtgtacggaaagtctgttcgccgtcacgttttccgctttgttctggggcgagaggatcatgtggagctcactggtgggtttcgctttgattttcgccgccgtactgatgtcggtgatcagaccgaccgggcagtcgctgcatcgtaattgacgatgtcccgcggcctgcggcgacgcgaaacgcacgtgtgtgcgctgcagggcgtgtcggacctgtacgaaggccgattttgaaggtctcgtgtaggcctcgccccgcttccatcgagtctcaggcaacctgtcagcccgacaccctacggtcgtgcattgtgaagaagttttttgaaggaatctccctctcatccatcgtggcgggcacccttgccgccgtcacctcgttcctgctcgcatcgaagatcggcatcggcggttcggtgatcggagcggcggccagttacgtcgtctccgccgtggccaccaagatctaccagaacgtgctcaccgcctccggcgaaaaactccaatcggcctcgtcctccggcaacgggatcacgaaggacgccgagaacggcgatgccgatggcggcaccccccgaacggccggcagccggaccgacgttcgggacgagcccgatacggcgacgggcgtgaccgccgatgatgcttcctccacacgcagaccgcgtgaaatcgtgttcagccgggcgaacggcaggacgtactcggtcgatgagctgcgcaagtcccgcttccgcgcttcgaagcacaccgccatgatcgtcaccttggtgtccggcctgctcgccgtggcggtgacggccggcgtcgtgatgctggccacgcagggacgcggcacggacaatctcgtatcccccaccacgaccacgcccgcgcgcaacgacaccggcacgcgaacgggcacccccgatcagaacaacgctctgccccagacgggcaccggcgatgattcgaagggaaccagcaaggattcgaaaaccgacgccccctccaccgac

SEQ ID NO: 2023 - DNA, 18025 bp, Unknown
  R17_18m  MAG No. k141_35944
ctgcagcgccagatcgtgcgtcgccgcatcctgaccgaggactaccgcatcgacggccgtggcctgcgcgacatccgcaccctgtccgccgaggtggacattgtgcctcgcgtgcacggttccgccctgttccagcgtggcgagacccagattctgggcgtcaccaccctgaacatgctcaagatggagcagcagatcgacgcgctgtccggtccgcagtccaagcgctacatgcacaactacgagatgccgccgtactccactggtgagaccggccgcgtcggctccccgaagcgccgcgaaatcggccacggcgccctcgccgagaaggctctcgtgccggtgctgccgagccgtgaagagttcccctacgccatccgccaggtctccgaggccatcggttccaacggttccacttcgatgggttccgtgtgcgcctccacgctgagccttttggctgccggcgtgccgctgaaggccccggttgccggcatcgccatgggcctcgtgtccggcgacgttgatggcaagcacatcttcaagaccctcaccgatatcctgggtgccgaggatgccttcggcgacatggacttcaaggtggccggtacttccgagttcatcactgccctgcagctcgacaccaagctcgacggcatccccgccgacatcctggccgccgctttgcagcaggccaaggaagcccgcgccacgattctcgaggtcatcaacgagtgcatcgacggcccggctgagatgagcgagtttgctccgcgcatcatcaccaccaccgttccggtcgagaagatcggcgaggtcatcggcccgaagggcaagatgatcaaccagattcaggaagataccggcgctgaaatcgccatcgaggatgacggtaccgtcttcatctcctccgagggtggcgaggccgctaagaaggccaagtccatcatcgattccatcgccaacccgcacgtgcccgaggccggcgaaacctacaacggcaaggtcgtcaagaccacgtcgttcggcgctttcgtgaacctcacccccggcaccgacggcctgctgcacatctcccagatccgcaacctggccaacggcgagcgtattgacgccgtcgaagacgtgctcaaggaaggcgacaccgttgaggtgatcgttcagggtgtcgatgatcgcggcaagatctccctggccatccctggtttcgaggatcaggagaacaacgcccgaccgagccgtggcgatcgcgatgaccgccgtggcggccgtggccgtggtgaccgtgacgatcgccgtggcggccgtggccgtcgctccgatcgcgatgaccgtgacttcgacgatcgtgacgaccgtccgcgtcgccgtcgctccgatgacttcgaggatgattacgacgaccgtccgcgtcgccgtcgctccgatgaccgtgacttcgatcgcgatgatcgcgatgatgatcgtccgcgtcgccgtcgttctgccgaccgtgacttcgacgatcgcgatgaccgtgatgctcgcgactcccgagatgatgatcgtccgcgtcgccgtcgctcttccgatcgcgatgaccgtggcgatcgtgatgaccgccgtggcggtttccgtggcggccgtggccgtggctcggaccgcaacccgcgctacgccaccgacgacaactacgacgactaccgcgccgaccgcgaagagcgcactgagcgcccgcgtcgccgcgtccgtcgcgactttgatccgttcgaggactaaagccctctcacggatcggtcgcggcatagccgcccccctcgcctacgggaagcccgcagggcttcccgcttaacggttcggcattcgaggactgatcgttctctagcttctctcgggtgagaagagcttaatcgcaaaccaaaaggcttctataccgtttcattcggtatagaagccttttggtttttcggcttcttcgcgctacatatttcgatgttgaatagggcactcgtgctgctgccatgtacattcagttgtcagttgacaactattctcatgcatcaagaatggcggaaaacagccattaagatgattggagccacgctaaaaagcgttgacaactgacaacagtttgtacacggcaccgcatggcacctatcctgttgctcacgaccggatctattctctcgtctgttgttatgcccaacagcaaaatccgcttgccgtgccgcgccatgtccgagtcatggccagccgttgattgaatggcggatgatcatcgaaggtactcatgggcgttgatcactgtggcaacaacaaaggccgggcccttgtgagagcccggcctttatgccgtatggcggcggattaatccttaaaggctaatccgttgtcaatcagcgttacagaatcgccatgcacacgaagtccagaatgaacagcgcggccacaatccagatgatcgggtgaacctccttggccttgcccttgcaggtcttcacgatgcagtacatgatgaagccgccggcgatgccgtaggagatggagtaggagaaggccatgaacacggctgcgaagaacgccgggatggcttcggcgatgtcgtcccacttgacttccttcagggaagcggccatcatgcagccgacgatcaccagcacgccggcggttgcggcggacggcacggcggagacgaccggggccaggaacgcggacagggcgaagcagatcgccacaaccacggaggtcaggccggtgcggccgcctgcggcgatgccggcggaagactcgacgtaggtggtggtgttcgaggtgccgcagatagcgccaatggaggtggcgatggagtcggcgaacagggccttgtccatcttggaggagaagccgtggccgttctccagagccttctcatcctcggcggagaagatgccggtgcgacggccggtgccgatgaaagtgcccagggtgtcgaacgtatcggacatggagaaggcgaagatggtcacgatgaccagaggcagcttggagacgtcggagaacagcgccgggaagccctcagcggagaagatcgcgccgaaggtctgcggcagctgggagaaggtttcgctgatggactgcgagttggaccaggtggtaacgccgaacgggatgccgatcacggtggtgatggcgatggccagcagcatgccgcccttaaccttcatcacggtgaacacaatggccagtacgaggccgatcaggaagacccatagcaccttgtcgttgaagtcggccagactcggggtcgccgccacggcgcctcccttggctgcggctttcgggtcgccgggggtgaacttgatcagtccgacgttcagcatgcccacataggccacgaacaggccgatgccgccgccgatggcgtgttgcagggactccgggatggccatgatgatcatcttgcggatcttggtgacggtgatgaggatgttgatcaggccgcacaggaacaccatgcacatggtctgctgccagctgaagccgaggccgaagcacacggtgtaggtgaagaacgcgttgaggcccatgccggcggcctgggcgtacggcacattggcgaacaggcccatgaccagggtgccgatgatggccgcgatgatggtggccaggaacacgccgccccacggcatacccgtctgcgacaggatctgcgggttgacgacgatgatgtaggccatcgcgaagaacgtggtcaggccggccagaatctcagtcgagacggtcgtgccgttttccttcaaatggaagaacttctccatttactctctacttccttggttttatgcggggctgcgcaccgcgcgcataatgctgcggctggccccggcgagaattgcgactcgccctgatcggcctgcccaacgcgcgtcaggcgctgcgcatccaatcagaaccgtggccgattatagcttgtggaggtaacgtgaacaggtccgggagtagactgactgccagaataattcggaacaactcagggacacgcagggcacacccgtggaaggaaggcgcgcgatgaaaccggccgtcgaagtcagcatcacctcttggaagaagaatgtcgtcaagcccggtcaggagtacggccgcgtactgctgatgcctggcaccggctacaactgcgaccgtccgctgctctactggtcggcccaggctctggtcgaggccggctggcgaatcgaccgcatgaacgtacgcaacgcttccgacgacctgtccacggtgattccggtcctcaatcaggcgattgacggctggatggccgccgcgcgcgagtccggcgcgggtaaagccggtgattccggggatggcgttgccgccgatgattctgctaccgtgctggccgatggcgcagctggctcgccgaaccgtgattccgacaccccgtccggccctcgcctgttgctgatcggcaagtcgctgacgacgatgacctacccacatgtggcctcacactacggtctgccgttcgtgctgctgaccccggtgctgcatcacgccgacttcgatccatccgcccgggtgattccggtgccggctgtcggcgatgatatcgtcgccgaatccgaggctccgagcgtagccgaagcaagggcgatcatccgcgcagaactggccgaccagtcgcacgccgccagctcccgatactccggcccggcaccgctgatctgcgccggcaccgccgacccgttctacgatcgagcccgcgccaacgcgctcaccccgcacgtgcacgaatacccggatgccaaccattcgatcgaggtgcccggccactggcgtcgctcgctcgactatctgaaggaagtcaccgcgtccgtagcccagtacgccgccacgttgtaatgccttgcgacacgcccgaattctgcaatgtcgctgaccatccgtaatctaatcatccgtaaaccacagaccgttggttgaagtgcgcgcgagtgcatttccgaagtttggttcgccaagccagcgcaggttgagagatataagcccgtcaagggccggcgaaggtcacttcgcgagattatattgctctgcctgtgcgcagggcttttttgttgcccggccgaaagttccgaactccaagtcaacggccgacttaggaaggaacgccatgaagaggcccgaaaaggaagcggtagtcgctcagcttacggaagaattccgtaacgctgacgccgtctacctgaccgagtaccgcgggcttaccgttccgcagatttccgatctgcgtgaaaagctaggccgcgatacttcctacaccgtggcaaagaacacgctggcacgcatcgccgccaaggaagcgggcatcgagggtctcgacgagattctctccggcccgaccgccatcaccttcgtgaagggcgacttcatcgaggctgcgaaggtcatccgtgacttcgccaaggacaacaaggctcttgtcatcaagggtgccgccgctgacggcactgtctacgatgccgagggcgccaagaagctggcagacctcaagtcccgcccgcagctgcttgccgaattcgccggcgacgtcaaggcatcgatggccaaggccgcgtacctgttcaacgccctgcctaccaaggctgtgcgtacgatcgacgccctgcgcgaaaagcaggagaaggctgcctgatttacgccctcacggcatgaatcagtcgcttcgataatttaaacaataaggtttattaggcagcggatctaccacttcgtccgccgccaagattgaaaggaagccataatggctaagtacaccaacgatgagctgctggaagccttcggcgagatgaccctggtcgagctctccgagttcgtgaaggccttcgaggagaagttcgacgtcgaggctgccgctccggttgccgctgttgccgctgttgctggcgctgctgctccggctgaggaagagaaggatgagttcgacgtcatcctctccgccgtcggcgacaagaagatccaggtcatcaaggctgtccgcgccatcacctccctcggcctggccgaggccaaggctctcgtcgacggcgctccgaaggccgtcctcgagaaggccaagaaggaagatgccgagaaggccaaggctcagctggaagaggctggtgcctccgtcgagctcaagtgatttgtgcggcataagccgtaatcacagcttttcgaggaaccccgcacctgtgtttcaggctgcggggtttccgcatactgagtagactagttgacgagggcgaggcggagaacgcgatccggcgtggaatcacaaagctggcaatgagcgaaagttgtcaattctgtgcccagtaatccgccaaaagccggtaaaagatgacacaatggcacgtagtgtggtcaaatagtgtgtccaggaaggcggtcacggtgagcgagtggacggtgaagatcaacggtgtcgaccggatcagcgtcaagccgggggagtgcgtggaaatcggccgtaagccgttacgcccccttgccgatgatggcaacacccgccttgacgtcgccgatcagaccaaatcgatgtccaaacggcacgccatgttcacggtaaaaagcaatggtacggcttcggtccgcgatcttggatcgaccaatggatcgtatgtggtgcgggaaaatggtgatttgttgcgcttgccggccaatgtcgagttcctgttgccgacgtctcccatgcgcatgcagttcggtgatgtgcctgcggacttcattcgtatcgacgatccagtggcaaagccactcgaccttaaggtgcctgatttgtttggctatgcggttcacgaagcaccgcaggagccggatgcggcggatatgtctgtcgacgatattcttgatttgcgggccggcgagccgaccgccatcttcagcgcggataatgttcgacgcaaggtcgacgagcttgaacttggctcgctgaatatcacgcagccagtgacgaaaaacgatgagccggccataccccgtgacctgttcgcggatgcgttggcccagcatgccgagcaggagaccgaacgcaaaaaccagcaggccatggactccgtggtactgccgaagcagcagaccgaacctgagtcgacgactgtaacgcccgcatccaagcacagcaggatctccggtattgtcccggtagatgccatcgcccatgccgttgttaagcacgctcccagcacaagcgagccggcagtggcgtcggcggcggttgttgaatccgatgtggtggctggcgcaagcaagtcagccgaaaacgttcagtccgctccgaataccgacgattctcagccggtggacgctgttgcacagcattctgaaggcactcagtccgaagccgcccagtctgaaaacactcagtctgagaccgcccagccgacaaccacccagcctgaaaccgctcaaccggcaaccgacgcacccgaggatcagcagctggcgaccgaaaccgaaaccgcccagcagtcggtctccgaagcgtatgaagcgtctgatatctactccacgggcgtacacactccggtcttcgagcccggctcggtgttcgagcgtgtggccaagggcgagctgaaagcacaggagccggcagtcgaagtcgatggcctgacctctgacgaggcaaaaaccacgcaagatttcaacgttcagttcgaagtcgcccgtcatcccgaattactggcgttcctcgccatgaatccgtacctgtacgacgacatgtattcttggctcgccgcccgtggcgaggccgatattgacgaagccctgtctcacaacaagggctatcaggaataccgcgaagcggttggaaagtgagtcgagagatgacccagagccagactcagaaccagaatctcacggaaggtctgaatcgcatccgtcgctggcgtgaccaataccgcagcatgcagccgccatcgccgctcgaggatgtgaatcaactggccgcgaagctggagatgacccatgcccatccctccggcatcgcccagctgttcgcttccggccatgttcggttggattcgttgttccgtgacacgggtgtgcttaaggccgccgaacgccatatcgggcgcgtactggatgaccaggccgccaagcgcaggatttccggcgtggcggagttgtcgctcgtggttggtgtggccacgtggaggggcaacgcgctgccggtgctgttgtacccggtgagcgtcacgatcgaggatgatggcttgtcgaccaccattcgattcaccggtcgcgtgaccctgaacgccgcgttcgtcaatgcattgcgtgagcagggggtgttcctggatgaggattccctgtttgacggtgccagctatgacagtggcactcccgaaacttccgcgatgttcgcccgtatttcgtccgaagcatcggagcgtatctccggcttcgccatcgagcgccagattgtgctcggatgcttcatggacccctcgtcgcagatgatcagcgaaagccgacagttcatcgaccagctggagaatggccccaccggcaatgtgctgttggacgcgcttgccggcgacaaatccgcccgcaccgcgctcaaagatgccaatattccgcaatacagtcctttcgacgtagacccgcatgccgagtacgaagtcggcgatgtggacaatacggtgcgatatgccgcgtcacttgctgccaatggccatagcatcgtggtcgacggcaccttcccgaagggcaccgcggagcaggctgtggccatcgcatcgcgctgcctgatgaatggtcgttccgtgctgtacgtgcccggcgtggccgagcagaagcgtctgttcatccagacggcctccgccaatgagatgaaggcgcaggtactggatgtatccgatgaacacgccaacgccgcgcttgataagcagctgattgccgcagtcggattccagcccggagtcgccacccagcgattcgaccagctggccgacgaactcgtgggcgtgcgctcgcgcttgacccgctatctgggcgacctgcacgggggcaacgataagtggaatgtgtccgcatacgagaccattcagaacctggcccgtatctccgtgctcccgacacaccccgccacccacgttcgacttgacgagtcaagtgccctgagcatcgccaacgatattgacacatggatcagcaagatggaacgtgccggcgagctcggcgaatacaccatcggcccggaagacaccgcatggtacaaggcgtccatcaccactgaagaacaagcggtaaccgcttaccagcgcgtggacgatttgctgcgtcgcttcctgcccgccacccgtgagcaggtggcacgcaccgtgcagacctgcggattcccggttcctcccaccactcgcgagtgggagcgtcaggttacggttttgaagaatctgcgacgagtgcttgacgtgttccagccagagattttcgagcgagacatcagctccatgatcgaggccaccaagccgaagagccagcgcaaggccgagggcacgtcgatgggattctgggagcgccgccgccacgtcaaggaagccaaggatctgctgcgcgtcggcgcgcaggtcgaggacttgcacgaagcgttgaaggtagtcgccaagcaaggggagcagtggcatcagttcgtgcctcacggcggttggccggtgctgcccagcaagctcgacgagatcatctccacccaagaggcgctggtcagcaatatgaccgcgctggataccgtgctttccaccacacccgctggtggcaatctggaaaccgccgatttcgagaaggtggaagcacgcctgaaagcactgctggatgatcgcaaggcactggacaccttgccggagcgttgcctgctggagcaggaattcgcttctgccggtctgaacgagttggtcgccgatctcaacgctcgccgggtgggcgtggagcaggtgcgtggcgaagtgcagctggcatggtggaccaccgtgttcgaggacattgtgcgttcttccgccatcatctccaaccaggatggtgccgcgctgcagaccgcatccgaccgcttcgcacaggtcgatgtggagcacgtgcgctccatcggaccgatggtgtcgcaggaatccatgcgccgcctgtgcgacatgctgttctcccgcactcaggaagccaaccagatgcacaccgtgctggcagggcgcgccagtgtgtcgctgagcaggattcgccgtgatcatccggagattctggccgcggccaagccgattctggtggccgcaccgggtacgctcgccgcactcaccgagccgggtgtgctggctgatgtggcgattctcgatgcgtgcgcgcacattcccgctatcgagttgctgtccatcatcggccgcgtgcagcaggtggtggtgatcgcccactgcgcgacggtaaccagcgaaagcgtcaagcagctgatcgacacgttgcctcatatcgaggtggatgctgccccgtctcgccgtgcgccgcgcctgtccgcattccttgaatccgagggatatggtcctgttcgctatgatgtggccaccgagccggctgccggtgaggtgcgattccaccgtgtggaagcgagcggtgtgccggttatgtcttctggtctggtggaatccagccagtcggagattgatgaagtggtgcgtctgattacgcaacgtgccgccggttttgctgtggttccttccagctatcgacttgtggtcgtgatgttgaccgacgcattccgcacacgcttgggtgccgaattgaagtcgttggcaggcaaatccaaggcgatgggccgattcctgcgccatgtgcggctggtttccttgcgtgacgtggccggaggtcgtgccactgacgtgattctgacgatgtgctatgcgaaaaccacgcatggacgtctgcttcagcagttcggcccgctcgaaagcacaggcggtcgcggactgttgctggatgccctggcattggcggaccacagcttggatattgtgtcggcctttggttccgaagatttggatgaagaacgactgcaccagtccggtcctcggttcctgaagaccatgttgacgtgggccgaacagcttgacgaccgtccggtgcttccgttgcgtggtgcggcaggcggcaacgtgctgttcgacgatatcgccgacaggttgcgcgcgcgaggactgaacgctgctgttgattatggattcgacaagggcgtgaagattccgctcgtggtgggattgaaggacaagccgtttgccttggccgtgcagaccgatgacgcgaactttatgtccgtgcaatccacgcgcaggcgtcatcgtttgtcggcacaggatctcatttccttgggctggaatgtgatgaccgtctggagtgtcgccgccttcgtgaaccccgataaggaagtcgaccgtatcgtcagccgtatcggcgagatctaccgcgaggttgaataatcatggcggaatactcggctacacggcgcacaccgcgcaagcacaagcgcgtggtgatgaaaggcactgagcagtttgacgctgacggcgtcaaactcgagcccggagacatgcagaccgaccaacaacggcaatccgacgacgacaaacgcatcctcggcgaactgcctccacactgggctgttttcaacgagcgcgagtaggagttgaggcgcactctgtgcgctctgatgttgtgttttccgcagccgtacggctgcggaaaacacaacatcggccgaaggccgattccgcttcctaccgcacaacggccataatcgctccggcctgttgcagctccataaccttggccgcggcctccggcggcattgcgaacgacaccagtcggtcgttgcttcccaatgcgccagtcgtatccggtttgtcgacattcatcaccgtggcgttctcggccagcgtgcaatcggcaccttcgcaaccgacggcggaaaccagtctcacctgatcgccggccaatacatcgtcgacgctactggccaagcggacttcaatcaccgtagtgccggtcggtgctacgggcgcatctctggccatatgcgtggaaatgggatcggctgcttcgatatcgatttgcgccaccttgcccaccacatcctcaatattgcacgcccaagatgggcctatcgcagataccggcatatcagccaactgaacgtcggcggccagaataatgtcaccccgtcgaatcgagcgagcggccaccaccatcggctcggtctccaccacggccaatacggcttcaagcccaaacaacactgcgagtcccacgcacaacgcagcagtgagtcggcgcaaggcatccgccatgcgccgtcgccgcaatgagccgcgcgcaggcggcttaataaacgaaaaggtcaccatgcaaccatggtgacctgaagtttttcgtaagcgcaagctgaatcgacctatgtggttctagcttgccaagttatccacaacgcttcaaacccgtgcaacagacagtgcccgtagtgccaatatccgcggcataccgccgtcgacaccgtcgtttacagaggaaaaacggggagccgaccttacttgccggatttgtcggtgcggtagaatccgtgacccttgaactcaatcggcacggcggaatacaccttgcgcacctgctcctgcgagcacttggggcacacggtaatcgggtcgtcattgaacgactgctgttcggtgaagtcatagccgcagttcttgcaacggtaatgataggtaggcaacggattcctccaacaaagtcatatttctcgcgcatggcgtgcaacaccatgccgtgcaaccgttcatatcctagtcgccgccctgacacattggcgttacggtcttactagccagcctgcttttgccactctggttccatcggccagtgtgcgtggctggttggtcagtctggcttgcgccgagtatcttggccggccggtcaactcagccggcccgattcgccaagccgccggtatccccccggcgtcagcactccgtcggccggcacatcatgtggttcggccggcaaatcggtgtccaacacctcccacggccagcacaccgcaatcagggggcacgcgggcttgcgtcgagccaaggcccggtcataccagccggctccgcgccccagacgattgccttgcgggtccactgccaaagccggggcgatgaccagatcggccttctccaacgcttcgggcggtagaactgcgccagttggctcatcgggtctgtgatggacggtgctgggagagctgcagctaccggcattgttcgcgccacccactgcatccatcgagcgcaaggattccaatgaatccagcacactccagccaatttccaacccagatcccaatcgtggcaccaacacgtggcagccatgagccaacagccatcgcaacagtggccgggtttcgatttccgaacccatcgacacatatgccgccactgtggaaccatcctgaatcatgtgtgccgggaaccgtcgcaccagcaattcaccggccgctccacgttcttccgctggaatgcgcttgcgccgagacagtatatggtggcgcagcgtcgctttatccatcttttctgttttctccgtgccgctgtggtcgctgccgatattcatgccattgtccgcttcgctcataccgcacaatctagtgtttccaccgtaaaacgaaagtggccgaggcgaaggcgcaagcccttcatatggctacaataaaggccgtgtcagttttccagtcgattaaagaggcgttcaagctggaccaccagatccgtccgccgcgcctcacccatcccggtttcccgataatcctgcgccccctgaccatggacgatgaggacggctggaacgaagtgcgctggcgcaacaacgactggctggcgccttgggaatccggcgacccgatgcatggcggctccatcaccttcaatcaatgggtgcagcgacagcgccgtaatgagcagcatggcgtcggcgtgattttcgccatcgaataccagatgcgtatcgtcggccagatttcgttgggagccatcgcgtatggtgccatgcgcaccggtgtggtcggatattgggttgaccaacggtacgccggccacggatttgcgccgatggcactggccatgcttgccgattgggcactcggagacccattcgggcccgcgttgcatcggctggaaatcgccattcttccggataacgcgcgctctttggctgtagtgcgtaaggtcggagcccatcatgagggactgcgcgagcggtatatgtatgtcaatggccagtggcgcgaccacgtaacatttgcgctgttggctgaagatatggggcaagggttctctgccagactcgccgccaccggttccagataagcgtcgaccggaagaattccgctccgacacgcccggacggaaagccccagttcgtcggtacgtctcctatccttgactctatgggttatgagtcactgagcactgtcgtcgtgctggtgattgtggcgattattatcgttgtatggctgcccgtacgtacggccaacggcatgaaacgtgtggacgagcaccggcaggatcgttattcgccttccctgcatatcgttgatgcagagaacggcagacgattcggagacatcaagccgcataaggcgaaaggggcagcaatgccagcatcaacaccgtcagcgaggctgacacctgagcacatcgcccatgtgcgggaactgcgccgcgcggccatccgccgccggcagattctcgccgtatgcctgcttgccataaccgtgttggtgtttgccgtatcgttccccctgcatttcagcccgctgcttgctcttattccgttcgtgctgttactgctggtgctggtgctgggagccaatgcctcacgccaggcccggcaatgggagcgcaaggtggtccgctacgagcggactcatagcggtacgggctggtccaagaaaccgtctgccgagtccaaggacagcaagcgtgtgaacaaggccgaaccggttgcggccgtaactgcgcctgccaaggagctttccgagcatgttgaggatgctgccaccgaggtcatggaacagcggcagattcgccgcgcgttacgcgatgccgagattgagcaggccaaggccaaggcgttgcgtcagtccgccgccgcatatcaggccgcggcggagcacgccaaacagtctgagaagtctgatactgcacagtccgccgccgacaagcctgccgccgaaccgtctgctatggtcgatgaatccgctgaccgtaagtccgctgccgaaaccagtgaatcttccgccgcgcccgatgcctccgctcgcacggataagtcgactaagtcggataagtccgtcgcccctcgagttgaaccatcgcttacggtgcgtgacgagcgtgatgagcgcgacgatgccgctgccgacgctacgtcggaactggccagcgtacgccctgcccgagcactggatgtcttcgatatggccacctcgcaggatctcatctccttcactttgggtggggaacataacgccgacaacgctccggaaagcttggagatcaagtcgacccgtcaggtgtccaaggcggaacctgtcgaacccgcagtggcggaaaagttgattgacgaggcccgagccgtcaaggccgcggacgatgccaaggccgccgatgcgggcaaggctgtcagtgccggaaacgctgtagacactgagtcggagcagcgcgatgatgccgatacgaacgccgctacggacgccgatgacgaggctgcaaacgccgcccagcgagccgcattccacgaatccgaggagcgtgccgacgtcgaagcgccagcggcgaccaccgattcgttgggcgcaggcctggactccattcttgcccgccgcggcaactgagcgttgcgattcgccgattttctctcacagcgttagcactcgagttggcagagtgctaataatcgcgctacgatgtgtcctagcgcaaagggacaacgcaagtgatcgtcagcctcttgaggcgttctggcgcggcattatcgaactacaagtagatacgaggtgacccacagtgtcgattaagctcacaccgttggaagacaagatcatcgtcaagcaggccgaggcccagacccagaccgcttccggtctgtatattccggacaacgccaaggagaagccgcagcagggtgaagtcctggccgttggcccgggccgtcgtgacgacaagggcgagcgcatcccgatggatgtcaaggtcggtgacaaggtgctgtactccaagtacggcggcaccgaagtccactacgagggtgaggactacctcatcgtcggcgcgcgcgacattctcgccatcctcggctgattagtcgcctagcgaacttcaacaaccccgactgttcccacgaacagtcggggttttctcttgtcaggcggaaaggggctcccctcagagaggggagccgaaaaccgctcccgccaaacgcccagccatgcctgctatgcataaaggtgcatgcgcgcagcgtagttgagttcggcgttgcaccgcatctacactgggtaacggattggggtccctatggaagaggctcagtcggcgacttggctgagcggcttaagacattttgcacaagacggcagtaggtcgacggtatgttgtttttttccgtgtcgcaggttcgtggtgtcgtcgctgtgccaatggttgtctctctaccgatgctgagtgccgtggcatgaggccagcgtcggcagtgggccacgaaatggcgatgtgccgatgctgagccgcgttggcgtcgttatagggccagtttttggaccattgccgacggcaaatcggcgttttgtgtcggcgacggtccaaaaactggcggtctgccgacgataagtgccgtcatcgtcggcagaccgccaggtattgtccctgtgccgacgtaaaaagccctgccatcgtcgtcaccgagccatcttgtgactcactgacggcggcagcagggcggaagaggccgaaatcatgcgcgcggtgcggtctcacacctcgaatccggcctccaccagcgcgtgatcgatgtcgcgaatcaaatcgtccgtatcctccagacccacggccagacggaagaagccgcggtggaactcaggcgggtacaggtactggcgctcgtcatcctcaccgaggaacacgatcagcgattagtcatggccgagcgagacggcagacgtaatcacattgagcttggaaacgaatcggttgtgcccgtcgtggtcggtgtcgaggccgaacgacagcacgccgccgaacccggagtccgggcgggccagctggctggccgccacctcgtggtgcaggtgcgattccagaccggggtacgccacgaaacgcaccacatccagcgattcgagatgcttggcaatcgccaaggccgaggcgtcgtaggacagcgcgtaggtgttcgccagcgtgatggggcgacggatcgcgccggtttcggcgtcgaccccgttgccgaggtgaatggccagcgtgccgaatccgagcggctggtcgtcgaatgattgtccgtgatgtacaagatcagaagccatgcgcccagcatgccggcatgcgctgtgccgccgcaagcaggcgacgccactcgaaaaccgcgccattgcaaggttctggaacaccatataagaaaaatgattggtagaagtgcggggtgcagccttggtcggggctgtttgcagggccgaagcggaccctgaaaccacgctgtgagacacgccgataaaaccgcagaattccgcggtaaaacaaggttcgcgtagaggtcgatttgcgtacttggaaaatatgtggttatatagccaagttgcctgttgaggtcaaacaccgcggcgggaaacagactggcggatttcccaagcggtcaaagggagctgactgtaaatcagccgcttcgtgcttcagtggttcgaatccactatccgccacgccccgatagctcagtggtagagcacttccttggtaaggaagaggtc

SEQ ID NO: 2024 - DNA, 8823 bp, Unknown
  R17_18m  MAG No. k141_35953
cggtccagcgtgcgttccacattgcggtactgggtggcacgaatcgtgtcttcagcggtaatcagaatctggcctacgcgaataccgaaacggccaaaagcagtctcgtagcgagccatgagcaaaccttggccgaccgctgcggtggcctgctgagtagccacgtcggccgggcgttcgtcaaagcccagcgggccgaagccggccgcaatagcaccagaggaaaccagtactacacgcccgcccatcagtcgtatttgggcaagggcggcggccagagcgtcgagcttgtccgggtcgaggtgaccgctcggctgggtcagcgagctggagccgactttcacgacaatggttccggctgctgcgaccatgcgccgcacctcggcctgactcggagtgctcatttattcctcggtttcaccatcttcgctggactcaccgtggccgaacagactggtttcgtcatggcgatcgtcgtcaacggtcgggtcggcccagtggccggccttgcgttcggccatcatcgcgtcgcgcacggcggcacgggcgtccatcatctcgtggtattgggcacgacgttcggcgttggagcggcggtgcgtgcgcgggtcctgctcttcgagacgcagatccttgcctcgggcaccgaggttggagccgtcgagcatttcagcaccggcggagatggtcggatcccaatcgaattcgaccatacgggcaccacgaccgatgcgcacttcgtcgccggggtgagcacccttgcggcgcagctcgtcctccacgcccagcttggccaagcggtcggccagatagcccacggcctcgtcgttgtcgaagttggtctgcatgacccagcgctccggcttgacgccacgcacctcgaagaacacttcgccattgccgagttcgcggcgctcgaccgtgaactcaagcgcactgccgccctcgtcagcgcgacgcggacggcggcccttggtctccaatggcttgatgaccacgcgcgtctcctcttcggcctgctcgcggttggccacttcctcacgcatctcatgcaccagcgcagacaacgcgaagttgagctccttcagcccctcatgagaggcggtggagatctcaaagaccttcagcccgagtttctcgaactccggacgcacgaactcggccaattccttggcctcgggcacatcgatcttgttcagaatcacgatgcgcgggcgttcgggaatcgggatggcgcccaatggcagttcgagcttgtcggcgtagagtgccaactcgttttccagcgcgtggtagtcggacatcgggtcgcggtccggttcaagcgtggcgcaatcaatcacgtgggcgatgatttcggtacgttcgatgtggcgcaggaactccagtcccaggcccttgccttcagaggcgccaggaatcaggcccggcacgtcggcgatggtgtatcgagagtcgccggcgatgacgacgccgagattcggcaccagcgtggtgaatgggtagtcggcgatcttcggcttggcggaactcatcgccgcaatcagggacgactttccggccgaggggaaaccgaccaacgccacgtcggcgatggacttcagttccagaatcacgtcgcgttcctcgccgagttcgccgagcagggcgaagccgggggcgcgtcgggtcttgttggccagggcgatgttgccgaggccgccggcaccgccctgggcgacgacgcagcggtcgccctcgtggcgcaagtcggcgagctgtgcgccgggatgcttggctttgccctgttcgccgcgcgcctcaaagacgacggtgccgcagggcacgggcagaatcaggtcctcgcccttggagccgtccttattgtcgcccaaacccatggtgccgctgccggcgacacgatgcggcatgaaacgatagtcgagcaggctggtggcgttacggtcggccacgaacaccacggaaccaccgtcgccgccattgccgccgttcggaccggccaacggcttgtatttctcacgacggatgccggccgaaccgttgcccccatcgccgcccttgacatggacggttactcgatccacaaaatcactcatattgattaccttacaaaaaagccgcgtccttacgggcgcggcttgaaaaaagcttgacgctatatcgctcaggcgatgacgtcgacaaccttgcggtcgcgacgcacaccgaacttcacggagccatcggtgagggcgaacagcgtgtggtccttgcccatgccgacgttgtggcccgggtggaagttggtgccacgctggcgaacgatgatgttgccggccacgacggcttcgccgccgaacttcttcacgccgaggtattgcgggttagaatcgcgaccgttgcgagagctggacgcacccttcttatgtgccatgattcatggtcctttctataactcaggcaatcgccgtgatcttgacgatagtcagcttctggcgatgacccttacggcgagcaacaccagtcttgttcttgtacttctggatgtcaatcttcgggcccttggcttcatcgttcacaacctcagccttgacggacaccttggccagatcggcggcggcgagggtgaccttgtcaccatcgacaacgagggagaccgggaattccacggtatcgcccttcttggcgtcgagacggttcacgaggatgacgtcgccaacctcgaccttttcctgatggccaccggccttcacaatcgcgtacattatcgttccttttatgttttggaaagctaccttgcctaacacgcaccgagcctgcggtcagacaccgagtttcaaatctacaccaccatgcggactaaatcaaatgatttttgcccgcgtgtcaagcacgacacacctgttactcttccgccgtattgttggcggcgacggcagcggcggcaatctgagccagtttggctttgacgtcggcgctggaaccagccggttcgggagcgggagcggtgccgcgaccgtgcttgttggttttgacgaacgggtcgccaccgcgaagcgcgtagggatcgtcgtagtcggccgaaacggtcggctgatcatgcaggatgaaaccacggcccttgcaggtcgggcattcctcggagaacgcctcgaccagaccctggccgatgcgcttgcgggtcatctgcaccaaaccgagcgaggtgacttcggccacctgatgcttggtgcggtcgcgtgccaggcattcgaccaagcggcgcagcaccagatcgcggttggcgggcatgaccatatccacatagtcgatcatcaccatgccgccgatatcgcgcaggcgcagctggcgggcgatctcttcagacgcctccaagttgcagcgcgtcaccgtttcttccaaggacttgcccttgccgataaagcggccggtgttcacgtcgatggtggtcatggcctcggtgcgatcgatgacaatcgagccgccggacggcaggtagacctgacgttccatgcccttacgcagctgggagtcgatggaccatttgtcgaacacgtccttgccttcgtgctcggccgggtcccacttctccagcttgtccttcaggtcgggggccatggtgtcaaggtattcctcgatacggtcgtagaccttgtcaccttccacgatgagcttgctaaagtcgtcgttgaagatgtcgcgcaccacgcggatggccacgtcgggctcgccctgcaggagtttcgggcgcttgccgtgccagaattcctcgcgcttggcgttgatgcgctcccactggcggaccagtgattcgagatccttgacgatggcgtcttcggatgcgccttcggccgcggtgcggataatcacgcccatgtctttcggggcgatcttggagacgatgttcttcagacggctgcgttcgcgctccgaaagcttgcggctcacgccggtcatgccaccggagggcacgagcaccaggaagcggccggcaagcgtgacctgagaggtcaggcgggcacccttgtggccgatcgggtccttagtgacctgcacgagcaccgggtcgccggacttgaacgccagctcgatgcggcgcggctgaccttcgagacgagcggcatcccagttgacctcgccggcgtagagcacaccgttgcgggactggccgatatccacgaatgcggcctccatgctgggcagcacgttctgcacgcggccaagatagatgttgccgacggtctgtacttcctgaatgtcggagacgtaatgctcgaccagaacattgtcttccaccacggaaatctgggtgtggtgttccttctcgcgcaccaccatcaggcggtccacgttctcgcggcgtgcaaggaagtcctgttccataagctggctctggcggctgcgctcacggcggttgtcacggcggcgctgcttcttggcctcgagacgagtggagccttccacatcggtgatttcgtcgatgtactgctgcttgcgggagcggcggaccagcggctgttcgctgttctgactctggtcgtcggtgccctcgccgttcttgccgccacgacggcggcggcgacggcgagtgacggtctgctcctcatcgtcctcatcgcgatcacggtcatgatcatcgcgatcgtcacgacggcgggaacgcgtatcctcggcatcgttctcggcggtatcgtgctcgccgttggcaccggtttcgccgcgtgagccacgacggcggcgacggcgcgaacgggtgcgggtgacgtcggattcctcgtcgccctcctcctcggcaatcggcgagtaggcgatatcgtccagctcgaggtcttcctcaatctgctcgacttcggcggctgcacggcgctcctgggcgttcagacggcgggagcggcgcgaacggcgggagtccgaggtgtcgtcggcgtcgaaatcgtcgtgatcggcgttggtatcgccggacgcggcgtcacgggaagcgtcacggtcggcggaggcgcggccgcggtcgtcgcgatcgtcgcggcgacggctgcgcggctgggcatcgtcatcgtcgtggctgcgcgagcggcgggagcgacgagacgggcgttcgtcggcgtcaacatcgtcatcacgagtgtcagcggtatcgtgcgcatccacggcggcgggcagcaccggttcctggaacagcagggacgtcatcggcttgccacggcgcacggtctcgtggccagagggcagggattcgaccgcgtcgaacaggcgctcatccggggtgtcctcgtgcgtatccgcaactgcacggcgagaacgacggcgaaccgtacggtcttcgtcatcatcatccatatccataggcgcacggcggaggcgggagcgaaccgggcgatcctcgtagtcatcatcgtcggactggcgggagcgagagcggcggcgaaccgaacggtcctcgtcgtaatcgtcatcgtccacgactgaacggcggcgggaacgcggggcgtcatcgtcatcgaaatcatcggcactgaccgtgcggcgcgaacggcgcggacgatcatcctcgctatccaagtcggccactgcggaagcggcgcggcgcgaacggcgcggagtctcgtcgtcatcatcggtatcgctggaagatgcggcggacgtacgacgggtgcgacgcggcgtttcggcggcatcgtcggccgtggaaacgcggcgcgtacggcggcgggttggacgttcggcggaatccttggaatcgctggattcatcggaatcgccggaatcggatgacttggaatcggccgcggtgccggcattgggaagcgcgggggcttcgaacagcggggtgcgttcctgcacttgcagttccagggaggcgccggcagcaccggtgccgcggaccacgcggcggccgccacgacgacggcgaacaggttcgacgggctgggaggcggcggcaggcgcagcgttcacggctgcagccgaatcggcattggatacggttgaattatcggttccgtcgttgacgaaaccttcacggttgtcagtgggcacaatgctcctcgcggcgcgctgcatcacgacgcctatttccaggcctatacgcttgactcacaccacgctctcaccgtggccgcgcgaaaacgcgccgcgtaaaggcaacttcgtctcaagtctgtcctgcgggtggcggacaccggcgcttgcgttgtctcattctcgagagccgcaaggggatcgacgccatctcgcacgctgatggttatgcagaaccaccatcctttagtatgccacatattttgtgcgggcgtggcccggcgaggctgacgttctctcggctcccctccctgcggtgacagctcccctcagagaggggagctcgagaggtgtcagaccagccagtcggtaagaattgcggtcatggcggccaggtcggattcgggcacctgctcgtcgtgcttgtgcgccagcagcgggtcgccggcaccgaggttgacggccgggatgccgagctgggagaagcgtgccacgtcggtccagccgagcttggccaacgggtcgcggccggtgcgctccttgaccagtcggaccagatcttgggcgagcggggcgttcaggcccgggcgcgcggaggggctttcgtccttcatttcgatgccgtagccctcgaacacgccgccagtggccacatgctcgccattgccgagttcggcaccggcatccgcgcccatcatcagagccttggcctcggccagtgatttgtccggggcgaagcggtagttgacgtgtacgcggcattcatccggaatgacgttcgtgcctttgccgccggaaatcagcgtggcgttgaggccctcgcgatagtcgagcccgtccacgttcacggtggccggctcgtaagcgttgagtcggctcaggatgtcggccgccttgtggatggcgttctcccccatccacgcgcgggcggagtgcgctgccacgccgtgggtcacgacgtcgaagcgaatcgtaccgttgcagccgccctcgatgccgctgttggtgggctcgccgatgatggcgaaatcgccggtgatccaatcgggatgggcctcgacgactttgcgaaggccgttcttttcggcgacgacttcctcatggtcgtagaagacgtaggtgaggtcgactttcggggtggtttccggcgtgcggccgtcgagcgtggcggcgaggtagagcatcaccgcgtcggaggccttcatatcggtggcaccgcggccccacagcacgcggtcttcgggatgagcgtgggcgatttcttcgcgaatcagcgaatcgccgggctccagccacttcggtgggaaattgtcgatgaccggcacagtatcgaggtgcccggccaagatcacacggttcggctcgccgaagtcggtgctggccaccactgtgtcgccgtgacggcggacggtcaggtgctcttgctcgttaaggaaggcctcgacctcgtcggtgagggggccctcgtggtcggacacggagaagttctccatgatctgggtgagcaggctgttcagctgctcggcagtggatgcggtgcggttcaattcaagcgtcatgtgaacagcgtaccgcgtgggcggcgggcccagcacacccactacatgagattttgcggccgaatacatttttatgtgccacactggggtggcgaaagggaggattatgtcaggtctaatcagcgccatgcaaggcttctgcgttatcggcatcgtgattgcggtgggatatgtcgccgcacgaatgcgaatcggcgggccgtccgctcagatggtgctcaaccgtttctccttcttcgtatcgagcccgtgcctgatgttcgccatcctctccaaggaaccgatcttcgacatcttccatccctcgattatcgtggcgttcttctccgccgtgctggtaggcgtggtgttcctggtgctcaaccgcatgttcttccacctgaacgccccggacgccaccatcggcgccctgaattcgctgtacctcaattccaataacatcggcctgccaatcgccacctacattctgggcaatccggctctggtggcaccgattctggtcatgcagcaggccatcttcacaccggtgggcctgacagtgctggacgtgaccaccaagggcaaggtctccatcaaggaaatcgccaagcagccactgcatcaaccgctgcttatcggttcgctgctgggcattgtggtctctgcgatttccgctaaaagcggctggttcccagtgccgaaattcattttcgacccgatcgacatgatcggcgattcagcggtgccaatgatcctgatggcgttcggcatgtccctacacggcaccaagccgctgcagcagaagggcgatcgcccggccatcttcacggtcgcggtcctcaagaacatcatcatgccaatcatcgcgttcctgctcgcctatttcgtgatgggcttccgcggctccgagctgtacgcctgcgtggtactcgccgctctgcccaccggccagaacgtgtacaactacgcggcccgctacaacgtgggcctcaccttcgcgcgcgacggcattctgatgagcaccatgaccagcccggtgtttatcgcgatcatcgcggcgctgctgagctgagccggcaactgtaatcaccgtaaaaaaacttccgcgaaatccaccgtaggattccgcggaagcctgagatatacactacttgagaatcgccttaatcgcctcatactgctgagcagtgagttgcaccgctggctcacggatcagggtggaaatgttcagtcccttggccttgaccgcacccttgatggcggagatgaacaggtcggtctgatcgta

SEQ ID NO: 2025 - DNA, 7198 bp, Unknown
  R17_18m  MAG No. k141_37369
acgcgcggcacgccggccacgacgttcgcgggcaggcccggcatgcgcttgagcgcgccggctaatatggtgggcacaggcgttcctctgttcctcggttctatttcttggcggaaacaaatctaacaggagaacgcccctcccatacccgcacacgaaaaagccccggcaatggacgccggggctttcccaccacacaaactggcgaagacacaaaaaacttgtcgttgtggctggaatccacacaatcccaaccacaacgacaagctcatatcaattggcgtatcgagtttactgggctgtccacaacgttcaatattgacaactcagcaaactcaattcagcgatctcacgccttggcgacctccacacccagctcggcgccttccttcacttcgaaggaggtagccagcgtctcgtgggcgatcagatccttgaactgctcgaccttggccacatcaacagccggcacggtcagcaccagcgagatacggtccgcgatgtccagatcggcagccttacgtgcgtcctgcacagaacgaatcacgtcgcgggcgtagccttcggccagcagatcggcatccagcgcggtgtcgaggatcacgaagccaccggtcggcagagcggcggagaccgaagcggcggcctcggtggcgttctcctcctccacgcggttgatcagctcgtactcgccttcgaccagcgcaaggtcgccggacggcgtggagaccaccggcgcaccggacgcagcatcgacatgccagtcgccggacttggaggccttgatggcgaactgcacctgcttgccgaggcgcggacccgccgcacgggcattcacacgcagctcgtgaacaatcttcagaccgtgggcggaggcgtcctccagagtcgagaactcaatattcttgatattaagttcggacttcagcagatcgtcgtacgccttgacggcgtccacgttctcgaccaccacggtgagcttggaaagcggctggcgcacgcggatcttggcggccttgcgcagggacagggtgccggagacgacctcacgcaccttctccatcgcgtccaccaaggccggatcgtcgaccagcacgcggccgagttcggtgtcttcaccggtcttctcgtccaccacgaacggccaatcggccaggtgcacggactcgccaccggtcagaccacgccacacggactcggcttccatcggggccagcggcgcaagcacgcgcatgaacgcctcaagcacggtgtacagcgtgttgaacgcggaagcgtcctcattccagaaacggtcacgggtgttgcggatataccagttggtgagcacgtcgatgaagtcggagaccgcatcgcaggcgtcggagattgcgaactcgttcagcgacttctcggcggccagcaccagacgacgggtacgggccagcaggtagcggtccatctccggcaggccggcgacctcgtccgcgcgcagctggcgagcgtcgaatccggccccaccgttggccgcgttggcgtacagggtgaagaagtagtaggagctccacaccggcagcatgacctggcgcacggtgtcgcgaatgccttcggcggtgacgatcaggttgccgccacgcaggatcggcgaagacatgaggaaccagcgcatggcgtcggaaccgtacttgtcgaacacgccgttcacgtccgggtagttgcgcaggtgcttggacatcttctggccgtcggagccgagcacgatgccgtggcagatcacgttcttgaacgccgggcggtcgaacagggcggtcgccatcacgtgcagcaggtagaaccagccgcgggtctggccgatgtattccacgatgtagtcggccgggaagtgctgttcgaacttctccttgttctcgaacgggtagtggaactgcgcgaacgacatggaaccggactcgaaccagcagtcgagcacatcggaaatacggtgcatgtgcgacttgccggtcgggtcgtccgggttgacgcggaccaggttgtcgatccacggacggtgcatgttgatgttgccgtccttgtcgcgcggatagtcgccgaagtcggccttgagctcttcgagcgaaccgtagacgtccacacgcgggtacttcggatcgtcgctcacccacaccgggatcggggaaccccagaagcggttgcgggagatggaccagtcgcgcgcgttggcgagccacttgccgaactgaccgtccttgacattgcccgggatccagttgatctgctggttcaattccagtagacgcggcttgatcttggtcacggacacgaaccaggaggagaccggcttgtagatcagcggggtggcgcagcgccagcagtgcgggtaggagtgcacgtagctcttctcctggaagaggatcgcgcggcgctcttccggaatctcggcgagcgggccgtcgccggcgcgcaggttgcgcaggatcggcaggttggcgtcgaacacgaaatcgccctcgtagtcagggcactgcgcggtgaagcggcagccatcgtcgagcacgtcggtgctcttgatgccgtgcgcgttcagcgtattcatatcgtcctcaccgtagggagcctggtgaaccaggccggtaccttcgacggtgtcgacgtagtcggcggtgaagatcgtgtagccgttcgggccgggcacgtggccttcggattcggcctcgtcacccgcgaagtacgggaagaccgggtagtagcgtcggcctgccagctcgttgcccttgagttcgcgcacgacctcgtaattctcgccgagttccttctcgtaatgcggcagcaaatccttgccgaggtagaacttcttgccagcgaacttgccttcggtcgggcggacctcgacgtagtcgatgtcggcaccgaccacgatggcgaagttggtgggcacggtccacggggtggtggtccagaagacggcgtaggcgtcgtcctcatcgcgcatcttgacggccacggatacggtggtgtcctggcggtcctggtacacgtcggcgtccatgcgcagctcgtgcgcactcaacggcgtgcggtccttcgggcagtacggcagcacgcggtagccctggtaggccaggcccttgtcgtagagctgcttgaaggcccacatcacggattccatgtacgggatgttcagggtcttgtagccgtgctcgaagtccacccaacgggcctgacgatgcacgtagttctgccattcgttggtgtacttcagcacagaagcgcggcaggcgtcgttgaacttgtcgatgcccatcttctcgatctggtcgaccgagtcgatgccgagctccttctgcgcctcaagctcggcgggcaggccgtgggtgtcccagccgaacacgcggttgaccttgcggcccttcatggtctggtagcgcgggatcacgtccttggcgtagccggtcagcaggtggccgtagtgcggcaggccattggcgaacggcgggccatcgaagaacacgaattcgttctggctgtggtcgccggaagggttgcgttcaacggactgctggaaggtgtcgtccttgtcccagtagtcgagaacggtctcctccatgtcggggaagctggggttcggcgcgacgtgcgcggtctcgccgccctcgctcgccttgggatatacgttttcgctcaccgtaaatctcctgttagtactgtgcactggtcctacaggagcgtcattgatggcgattgccgggcgccgacgtgtgccggctggtttcacgaatgtcacgtaccgaaccgtgggccgattagtcaatcgcctcgcagccggaaccgactgtgttccgcccggaacagccatgtctgccgttcctgcctacgaggacgatgacgagcgctggtatgcgctccgcaccgcggtaccacctcgcttatcgcaccggttgcgccgctccgaactgttgcactcggagccgcgagcctgcgcgaccgcttgtgttcggctgtctcgggccgatcccgtcggttctactgggcgattgccgccgttcttccgaagactccccgctgataacggatcactgcctcacaacggtgcatatcctaacacgccacgcggtcaaatcgccgcccacggccacggcaccgtcaggagcccgatttagattgggaccggccaccacggaccgagaaaggattgtcggacaatgacgtatgatttcacgtccatcatgaacaggcatggcatggattcgatcgcggtcgacggactgggcaccgacccgggattcgcgccggacccgccacgcgagggtttcgacgtcatccccatgtgggtggcggacatgaacttcccgaccgtgcccacgatcccgcaggccatcatcgaacgggcgaagcatcccgcctacgggtacttctcccccaccgacgactattacagctccatcatcgactggcagtccacgcgcaacggggtcaccggattgacccgggaggcgatcggctacgagaacggggtcctgggcggtgtgatcagtgcgctgaccgcgttcgccgcccccggcgacggcgtgctgctgcacagcccgacctacatcgggttcacccggagcatcgaaaacaacggctaccgcatcgtccacagtccgctcacgctggacgagcgcggcgtatggcgcatggattacgaggatatggacaggaagctcaaggagcatcacatccacgtggccgtgttctgcagccctcacaatccttgcgggcgcgtgtgggaacgttgggaaatcgagaaggccatggaagtgtacaaggccaacgattgcgtggtcatttccgacgagatttggtccgatttgactctggggaaccaccagcacatccccacccaatcggtcagcgaggacgcacgcaacaggaccgtggcgttctacgcgcccagcaagaccttcaatctcgccggactggtgggaagctaccacatcatctacaatcccacactccgggaccgcatcgtggccaaaagctcgaaatgccactacaacgacatgaacgtgctttccatgcacgcgctgatcggcgcctaccggcccgaaggccatgagtggctcgacgaactgaaggcggtgctcaccggcaacgtcgattacgcctacgactacatcaccaagcatttccaaggagtgagtttggccaaaccggaaggcacctacatgctgctgctcgactgcgagcagtggtgcgaacgccacggcctgagcctgcccgagttggagaaacgcggctgggatgtgggcgtcgcatggcaggacggcagcatgttccaggccccctacagcatccgcgtcaatctcgcattgcccttgagccgcgtcaaggaggccatgcgccgccttgaccaatacgtattcaacgcgtaaacggcatgcatccgcgattgcggtgtcctggaaagacgaatgccgtcaacgaggttggtgcccgttggcggcattcgtcatacgttggccgaaccgggcgaaacccaagttgccgtgcgctatgaggtggatgccgccagcggacgtgtacatctgaccgcccgatatgccggtgccaccgatgcgccgacgctgccggcattcggattggaatggacacttcccaagcagtacgagaacctgcgcttctacggccttggccccgaggaaacctatcacgaccgtctgcacggtggcaagctcggcattttcgagcgcaccgcggccgaagacaatgcaccgtatctggtgccgcaggagaccggcaaccatgaagacttgcgttgggccgaagtgcttgacgcccaaggacacggcatgcgtatcagccaggccggcagcgaacatttcgcggcgagcctgttgccgtacagctcgctcatgctggaagaggcgacccaccagaacgagttgccgccggtccgtcacacgttcctgcgcctgttggccgcgcaaatgggcgtgggcggagacgattcatggggcgcgcccgtccatgagcagtaccagctgcccgccgatcgcgcctacacgctcgacgtgaatctggaactgttctaacagcgataaagaagctccctctgacgagggagcttctttatcgcacagagggagcttctttatcgtgctggtacgaaactgtcacgcaccactagggtggtggagatgaaggtatggtggtgcagcgtgcgccgactggagatggcctcggcaagcatcgtaatcgcagtatcggccagctcattctggtcgatatcgtaactggtcaatgtcggcgaagtgtactgggcgatggcctggttattgatactgatcacactggtatcgcgaggcaccagcactcccgcagcggtaaacgcctgcagtacgccgactgcaatcgagtccgcagccacgatgaacgcatccggcatgtcatctcgatgatcgttaaccgcttcctcccctagagtgcgcccggtgtccacagtgaacgcgccttgcgcgtaaatcaggccttccgcatccagccccaaacgctcggtccaattgcggaatgcggttaatcggccgtcttccggatattcgtgcaaacccatcgtgaagccagtaccgccgatatagccgatgcgtcgtttgcccgaggacaccaacatatccaatgcgtccaaaatggtttggcttaaatccggttgtaccgaatcgaacaggctgggcgcaggattgatgtcgatgaatacgccatagggcaataccagatggagcttcaacagtctatccgaagagagtacggacggtccgatggagatgaagccgtcgaaatcaccggcgtcggcaatcagatcgtcgatatgggaaaacgacgtgagttccatgtgctgggctctggcattgtcgccgagcacggaccgtagttcatcgaaataggcgtccgccagttcttcctcgcgggtggcgttgtcgagtacggccacacggcgtggcaatgcgatacggcgtgatccggtagcgtagccaagctgctcgctgacctcgatgatgcgacgtcgcgtctcctctttgacagacaatgtcgggtccccattgagcagccgggataccgtggcctgcgagaagcctgatttctgtgcgatttccttcatcgtgaccatagttgagccttccacgcctcagtacgtaacaatacgcagtatttcagtaaataactttactacatagtgtaactcacg

SEQ ID NO: 2026 - DNA, 2758 bp, Unknown
  R17_18m  MAG No. k141_37850
agcacattggctcccctcagagcggggagccattttttacatcagaattgcgtttacatcagtatcgcggcgactggcagtcctatggcgattgccaacagcacgatagtgccgatgatcacgctggggcgtgcgaggttgacggtccagccgacgccgaaacgtttggggatcatgatggcaggatcgtcacggttgatgtagatgatgccgccaatccagtgcaggtcatcgtcatacggcatggcattatcgtccgaaatgtcaccgccgtcactgtgccgaacaccggcatagacgcgcgccccgttctgcccgtaatacacgccgatcatcagcgcgccgaccagagccgccacggcgatgaacatgccgatgatgccgattagattgatatccagcacgccaatggtgacaagctgaacgcctaggcccaatccaccggctgccagcagtccgatgaccagcacgtagatgctccagacccgcgagaacacaccataggcatacccggtggcggcggggtggtcgggatcaatcgggtgcttggcgtagatgatcgcggcatggctggccaccatcaccgctgccagcaccacctgcgcgagcacggcgtaccaaatcaccatcggactcttctcggcccaaccgttcacattgccggcgatatccgcatgaatcggcacccgctccggcatccggtcatagcccagcaacccgacagcaatggtgacagcgagacaaacgacttgcagcaattcccacttcaagctcatcgggtcgggattgtcccgctcacctatcaatgctgcacggcgggcactggacgcctcccatccctgatcgactttgatggatagtactttgcggcgaaacatctgctgcagcacgaaaccacatatcgcaatcgccaccgctgcgatggacacagtccagaacgccgcgtcgactccgcagagttgccaaacggccagcgagaccagtatggcgcatacgccaagcgccaccgtaattcccgaaaacgcgactttaaatccgcgaatgcgcgtattgacatgggcggcggccggcactgtgacaccgaacacctcatgccggtcggtaacccatggaacccctgccaggccggcggtcactatcaccggcaacagtaaaaacgcacacaacgcgatgttcatcgacacgactgtattattcatcgttatctcccctgattttcttttgttgcaccgtcagtaacgctctgcgaggagcgcacgccgtatgcccgttcgcattgccgtttggtggcatcgaggaatgcggccgaatcaccgccgcgcgccctgtaggccaaggcaaggcgatagagttcctcgcccatccgctcatcctgtgcttcggcagttcggttcggtgcttctcccccgccgtcatgctcggcgacggttgcaccggcaccacgacgcataacgatgtatccctcgtcacgcaacagcgcataggccttgttcaccgtgtgcaggttgatgccaaggtccacggccagcgagcgcacggacggtaacgagtcacctggcgacagctcatcgcccgcgatggctgcgatgagctgcctgtgcagctgctcgtaaatcggcacgtcactgcgctgatcgatttccacaatcacggtcaattccacccctctcaagaactgttctatttgttctacatcaaatataacagttttgccgtatgagtcaagatatgcgaatctcggttgaacatccggcaatgggccaacggcgtgttgcttgaattttctaggaaggcgggaatcgccatgctgccggcgaatgggaaaatccatgtggcttgtcagattctgttcctgcaactgaatagtcccatgagggagtagacagcattgcggcgaagggctcggcccaaaccgcaataaagcgtgccgagcgccaaagccgccaacaccggtatgacgccgctgcaggagaagctcgcgaagctggacgaacttcatgggcggcaccgccgaacagcagtcgaccattctgttcacgctgttcgtggtattccagctgttcagcagtcgaccattctgttcacgctgttcgtagtattccagccgttcaacgccttcaacagccgcgagctgggcaacgccagcctgttcgccaatccgctacgcaataaagtgatgatcggcgtgttcgcgctgatgttcgcacttcaggtgctggtggtgcagttcggcggagcgatgttccgcaccgtgccgctgccgatcgacatgtggctgaagatcatcgcggtcggacagatgcgcggttagagttctttggctcggtagatgcggatggctataagcatggagccaaaatatgcgagcagacacaacacggcgagaacaagcgccgtatgccaccagatcgtcaggaaatcggcaatattcagcaatagccattgccagtcaacaggcaatcgggccagcagcgcaatgactgcatacaagccgacaatgaccgcgccagaggccatcatcatcttgcgggaggtgaaccggtatgcacaggccagcagcaccgacccaagaatgatagccaaagcgaagatggaagcacctgctgccaaggtaccaatccaccccatatctgctatatcgccaaagacaatgaagacgccgccgcatatcaccacgtccaaagcccagagcaggccaaccaccaacagaaaaaggtaccgacctacaacttgtgcagtgcgtgaaacaggaatcagc

SEQ ID NO: 2027 - DNA, 10171 bp, Unknown
  R17_18m  MAG No. k141_38256
gcacacgccagtccgtgaaccatctatcgcgatcatttgagtcgagttcttgcaaccgaagagtttcttgatcgccggacgggatatgcaggaactttgctcggtgccagtcagagcgtcggcggccaggagtgtttgctgcacatacggagagtccccggacgcccatgcgcacaaatctgaactgagatccgaaaaatactctggtatctgacttccattaccaaacaggtatctggttatcatggccgaagtcgcgagtctctcggtctgctcgttggtaagcgggttgaagggaaccagcatggttgtcggggtgaagtcggaatccagaacagctaccggttccgcgagtgaaagatactccgccagaccgtcgcttgcaacattcttcgggaaagattgctcaacctgtttcacaattccatcgctggattcccatcgcgtatccttgaagttcttcaaggccacataggcttttagtctcatggcaagcggattccgttcatccttggcataagcgtatagggaatccagagtgcgttgagtagataccttgtcatgattctcgcccaccatctgagacaccatgtaggtggcgttgattcgtgattcctcagtgtttcgagtgtctaactcgggcatatcgaaaagcccatccgcagtactgagggcacgaaaagaatcaagggtcttgcgcgttgccccacgttgctccaaagctttgtaatccgcttggtaaaattgcaccattgcgactgccgcacagctcgatataaggagcacggcagcagtcgcaatggtgacgatcagtctacgcttggtccgagtgaaattcatcgtcagatttttgtagacgcaacgcgcgttgttccgttgtagaaggctgtgccactcacatccataccgacatagatggcaccccatcctccacaaaccgagccgctgagatatgatccgcgagctccgttattgttggtccagaccaaactattcgggcccgaacggctactctcgatgcttaaattcttgatggatatggagccaataccgatttgatagaaagaggtattgttccgaatccagtttggcgatgcgttcatgactgcggatgtttggaactgcccgcaaccactccaatcactcagcggctgaatccaagcattggcggttagcgtgactccattaccgaaacttgcagttccagaattactcgtcaacggcataataccactgtaatcagagccatctccttcagaaattagcatttctgaaggaggaacatctgctgcaaacgctggcgacgagagaggaaaaacacacaaggcaatggcagcgatgaacgccgctaaagatctggaacgcttcatgatatgctcctttgctgtaccttaataaaatgcgttcagccaatacgaacgattacgattgtcggaacccactggatggtgttcacatcatccgatattactaaaacacaacaacgcagcggcctcacaccgtcaaattcaggggatggatactgcaattcgtcagggtgcatcccgtgctggaagttcatcgaacctgccttataggacacaccgtatttgtgtttgcagatgtctcgtcggagcgctgattccgcgccttgatgacaaatatggtaccgggaaacacggaagccataatagccgataatgtacgttatgtcagattagttatccttgacgaggattcagtcgcctgtatcaactagtccacgcataccaggccgacagccaaaggagcactggagcgaccaccgcaattgcaagaatcgccatgcctttcagccaatccttgtcatctcgtttccagtggaatgctcgccaaatgaaccatatcagcatgggaatctcatacagcgacagcaatggcaaaccgatgaaaaccaggtcgaagcccgcggcgcaggctccatcgcatcccatcatgaagaagtcctcgccgttgtgtttcagtgcgtttggaaataacggtttacggcgtcttcgagctgctcaggttgctcaataatttcgtaggcaccgtgttcctccatctcaccggccggagcgtagccccagcggcagccgatggcgtccaaattgcaggcgtgggcgccgtcaatgtcggtgtagcggtcgccgatcatcacggccctgtcccccgctgcagcatcaaaaccgattttgtcgaagcagtaccgaatcacctgatctttgtccagacgggaattgtctttggaagcaccatagatgccgtccaacagttcggtcaggtggaaatggtcgcagataggcatgcactggtattcgggcttgcagctggccagtgccaggtagtaaccgtcggcatgcagtttgagcagctgttcacggatgcctgggaatacgacgttcaccagtcgtccgggcaccttgttgccgggctcgttcggatcgtcgaacacggcacggtctccgtagtagctgcggtagatgtccacggcccgatccagatcttccgcaggcacatgattgcggcgcagagattcaataatcgccggtccgatgaagcgtcgcagttcggcggcgtccggaaccggtcgaccgatctcttcgaaggtcttgatgacggagccgataatgccgccgtcggacttggtaagcgtgccgtcaagatccaacaggaccactttcatcggatgctgtgccattgagattccactcccccttgttcatgtcgactgctttgaatggtcgtcaaacaatgcgacttgttccaacaatgattatgcccagtcgggatgactgggcatcaagttcacgtgttgttcagtaggagatcactcgtagtcgggaatccaaccgtcacggtgcatttgcaggcgcttttcgagcagggtggccagttcctcttcgctacggcgttccagcagcatgtcccagtgggtgcgggtgggtttgctgatttcgtcgccctcacggtcggcgtcgccctcacggtgggccacggaaccacaacggcactcccactcgtccgggatttcggcaccctcggcaaacggcaggatggtgcggtggcccttcgggcatacatacgccacatcgtttcgcgcggcgaaatcgacgttgtcgtcggactccagcgatttcgctccgatgctcatgcccctgaggctacgttctgccatatcggcatcctccttgaaagatctttaaccctactaatttacgcaacagttcggacttggccgctattccaagcttccgacgtcggctgacaaactcccgtcaaacagccccgtcagtccacgccggagtaggccaccacgccacgattgacccggtcggccgcttcgtgggcgaggcctgccagccgctctcccccgtcgaacggcagcggctgggcgacagcaatctgctgcagcacgtcagccagtcgtttggcagtgcgcacgaagtcgccgccggtcatgtcggtgccgtacaggcacgatcccagcgaaccgccatccgcccattcatacatgatgtcgagaatgccgaaatccggccgctgcatctcgtccagaccgtgatcctcgcacaggatatcgatgtcttcacaaatgcccttgagcttggacgaagcgatggcgatgggcccggagatgccgcccgggtagtgcctcggttcgccgtctcccccgcgtctggcctcgtataccagtgaagagagcacagcggccagtccgttggcgtcgagcttgtcgaacgtgccggcgagcagcgcctcgcacagttccaggtcatgttcactgtagatgcggcgcagcagcagacctttttcagtcaacgtcatgtcaatgtggccggccgcattgacatgacgttcgaggtaaccaagcccggtgagaatatcgcagatgcaatcgaactggcgtgccacggacccggtgcgggagtcgtagcgatcggtgacgcgctgcagttctcgagtctcgcgggcccagcggtggccccatttgaggtgttgctggaggtccgggcagttgcggcatggatgctcgtgttccgccttgcgcaaatcgcgaatgcgctggtcgaggttctggaaagcgcgtgaacgctcctgatcggtcaggaacacttcgtgcttcagtttgcggcggccttccttttcgatgtcgctcagctccatacgcagggtcatgaactgtttgaagtcgccgtgttcgcatgcgaacgcctgttcgtatccggccagcgcgttcttcagtgtgttaatctgcgattccagctgccaggccgattcgttggcctcccactgggcaaacgactggtccagggtgacgcgcgcggtctcgtagtcgctggagttgagcaggttcacggccatgttgaacgtgggtcggaagctcgagtgcagcgggtagacacgcttggatgacagcgaggcggccgtggcgggcacaaaaccgtgatggtcgaccacgatggcgtggccgatggtgtcgatgccgcgccgaccggcacgaccggtgagctgcgtgaattcgccgggcgtcaggcccacatgaccggtaccgtcgaacttttcgagtttctctaccaccacgcagcgggccggcatattgatgcccaatgccagtgtttccgtggcgaacaccattttgaccagaccttcttcgaacaatcgttcgactatctgacggaacagggcaatcatgccggcatgatgcgaagcgaagccttcttccaatgcaaagcggaacttggagaactgcagggctttcaggtcttcctgagtgagttgcccctccaccatctcatccacgatgcggcgaatcctggtcacttcctcatcggtggtgagctccagtccagcgttgatacactgttccacggcctggtcacagccgttgcgcgagaagatgaagtagatgccgggcaacattcccaggaagttaagctcgtccaccacggcccagcggcgcggggtgtggcgttccgctttcggggcacggtctttggcgcctttgccgccgcggcctctgccgaagcccttgcgcttatcggggcgttcctcgccgcgccggcgtgcggccttgcggtccaactggtcgagccggttgatgagttcggcgttgagtttggtggtctgctcgccgttgccgtcgcggcgatagaggtccagcacctcgggctcggtgtgttcgtccgcctgcacgatgacgtgctgttccaaaggcacggggcggtgttcgctgatcaccagttttgtgtcgcctcgcaccgaggcaatccagttggagaaatcctccacgttggacacggtggcggacaggccgacgatcttgaccgtcttgggcaggtggatgatgacttcctcccacacgggcccgcggaatcggtcggccagatagtgcacttcgtcgagaatcacgtagcgcagtgcgttcagcgtggtggaacgctcgtagagcatgttgcgcagcacttcggtggtcatgaccacgatgtccgcctcggaattgatcgaggtgtcgccggtgagcaggcctaccttgtccgggccgtacacgtcgaccagatcatggtatttctgattgctcaacgccttgatcggtgtggtgtagaaggctttgacgttgcgttcctgggcgaggtaaatggcaaaatccgccactacggttttgccggcaccggttggggccgcgaccagtacgttgctgccggcttcgagcgcgtcattggcttcggtctggaagtcgtccagttcgaaaggcagggattcggcgaatcgcgctgctgcggacgcccgatggcgttggaccttttggaatgatgcgtaccgctgcgaagggctcagcgtctgggaatcggcattgcccttatggtgttggtgacgtgccattgctgctttccgttagttgttgaatcgcttccagcgggcccatgcctgggtgtgtcgttcgcgcttggcggccttgccgcgaatcacgttcgcatgggcctcggcataacgattctgtgccacgctgagcggctgagtgaacagaggcggctcgctggtgtcggcagaggtgccgggctcccccatcgcggccacgcgttcaccgagttggccgccgatgtcggacatgtctttcaaggcacggagtccatgaagggctgcatagatgagtccggcaacaatcatggccagcatgaacagggccagaatcagccatatccaccaaggcatgaaaggctccttacttgttctcgctgatgctcagttcgcgttcggcgcgtgccacgatcatggtgcgcaacgtttccggggcgaccgccgtgatatgacgcgcgtgggcgatgcagaaggccacgaaccaggaatcggaggaaacggtcagatgcaccttttcaccggcaccgcattgttcgacggtagcgcccggcaatgtcttgatgaatgccagatcgcgctgatcggtgatgaacaccgcgtcggtaccgttgtcgaaactccacttgcgcagttcgctcaccggcatgttcgggatgttgatctgcttggtgggcttgaccagttccgccttttcgatacgggccaatcgcagtacctgccagatgcgcggcttgccgttggccttgtcgagggtcttgtctttggagacgtaggcctttttgtccttgggtgcggcggaaccaacgtccgtgtagacggcggcataatacacgccttcgtcaatgaagatcttggcgggggccaccagcttgcggcgggtacgacctgtaccgtcggtgtactccatgtccaacagcgaatcggtgttgatcgcacgcttgacgatggagaagcttcggggctccagctcatagccggtcaggctcagccacggggtctgaccgggactgacatgacggcgcaaacgctcatacagggattcggcctgcccacgctgcttgtccggcagcaacggcgaatgcgccaggtagctgaccgaggcggtgagcatgctgaggtattgcggcgaaatgccggcaagacgttcaaggcccagcgaattggtggcggaaacaataccctcggcatccagcagcggccagtcaatatcgaagaactggctgccggccatctcaccatcgtcggaaacggtggtcagggtgttgatgtccttatggatgatgttgacgaatttcttgagttcatcatcgttctttggcttgccgataaagcgttcgcccagctcgctcatcgagaattcctcacccagatgagcggagaggaacagcatcagacgcaggcgacgatcaacctcactgcccgtttggaaagcggagccgttcttcttgttctgagccttgatagactcgggatcacccggctctcgcacatcgcgactaatcgacggggaaaccaccgaagcgctcacaggactggcggattcgtcggccagagtgaaccggctggcggcgtgcaaacggcgatgataagcgtccacagcctcttgcgggctgacaatcgtggcccccggatgctcaagcacaaacatggccaaatcgtcggaatcggtgtatgccacgttcaggtgttcgccatccacgtcaacggtggcggcgaaacgacgcgaatcaataaccttgaccagtgaatccggaatgggctgcgtccccaagccaggcgcaatcgaatccaagccaagcccgggaatcggggtctgcggcacacgcggcgtagtgcgcgacacatgctgggtgagctgggactgatccggctcggaagaaatcgacatcgaacgagccagatagttggcggcggcaagcaccggcatatcttccggctcgaacatcaggcggatgcgcggttcgtcgcccaactgcagacgataggacgcgaagtcctggccttccgacttggacgagtactcaggctgccgtgattcgatggcaatgcccatcgcagcgagcttggcgcgatcacgctggaactgcttggcgaacgcggccttggcggcctgatctgccagctctccatacgagtcggcgtaagccttgacgcgctgcgcaatttggcgggatgtgagccattgcgggaacgcggatgacaacacagccagtacgtccagctcgtgcttgccccatttgtcggaaaaacgccgacgtccgcttgtgccctctgccattagtcctcacgtatagttattgtttcgttataagtgcgtatgagtttccccacactcactctatcttagaggctttttccacagttgagcgccatttcacaaaaataatatcttttttatcgttcgaccgtgttgtaaatcacacccaatcgtccggttcgatgccttgcgggccaacgtattcgccgttcggcacgtagctcggctcacccttatcttcaagtttggcgtcggcgaacatcatgacgtcacgtccgaatgtccagtcgccctgaatggaaaccgagttggctgcggccaaagatggcacggcgtaggggaaccgttcgtcgaaatcgcggatgttcttgtagtatcgcggatcaagttcgacgttcgggaagatgtaattgccgtcttccatctcatacgtgtccgtcaggtggaagcgatcggaacgcataatgaacaaatcattggtggttttcaccggaaggaagcgcatacgatccacttggacgcagatagaaccgttgaacagaccgattgcggcacccatggcggtttccagctgaatcacctgttcggagttcgggtccgtgggattcacggtctttttgttacgaatcaccggcaacggcaacacaccatcgcattcggcgagcttgtctttcaaagcgtcgatgcgaatccagatcgagttggtgttgaagtaaggatgcttggcgatgtcttgggccgcttccttatcatccggatggacctggctcatttcacgcagtatcaggcgaccagtggccttgtctcgcacgatatggcctcccttgcgatcggccttggtgcggatagccacttcggccatgaacggggcacctgtgttttcgaagtgctgggccaacgtacgcgaggggcgtgcaccgagattgtcggaattggagatgaacaggtacttgaagccgcgctcctccaatacgtcaagcaggccggactcccagatggtggagaacaggtcgccgtggccgggcgggcaccattccagctccgggttcatggggtagctcaccggttcgccggtggcggccacgagtttgggttcctgatgctggatgatttccatcggcacgtcatgctggctgaacttgcgatgatgcttgagcgccttcatcgtgtccgccgaagtgcggaaagaattcatgaacgtcagcggcagttcgacgttcaggcgggtgcgagcggtaagcacctgaccgatgatgatgtcgatgaagcgcatctgcttggccttgtgcctacgcaccggcaacagcgacttggccttgtccaatcccatggaggtgcccagaccgccattgagcttgaggaatgcggtcttggcgaaggcgtccacggccttgtcgtggttgatggtctcatagacgtcgtggaagctgggcacgtggccaagcggctcgatgtcgtcctcacgaatccagctggaggcttcttcatggcgccatacgtcatacaaatggcggaactggttgatggcggtttcgctcatgccgtgctcgcgcatcttggcggccgaaagctcgaaagtctcatccacttcgggggtgtttacggtttcttcggggatatccgaggtgacggcgtcggtgtcgtcagcggcggcgatatccagttgggccttatcgtttatttcggtcaattcgggtccctttcatcaaatcaataggaaccagtctagcccctgtttggggcaaacacatacgacggggggcggaagcggtgaattgtcggtgataattccaataacacgccaagatgaagtccgtgtttaatccattacgaatggcttacaaaggtaagtccgtcgtcatgttgtctcatgttgtctgaaaacggaaaagccccggaaagcaaccactcagaagcggcggaattccggggctaatcggtcgggccggcgggatttgaacccgcgaccccttgacccccagtcaagtgcgctaccaaactgcgctacggcccgatggtgcaaaagcaccgagtagataatctaccagatatatgaaa

SEQ ID NO: 2028 - DNA, 33745 bp, Unknown
  R17_18m  MAG No. k141_38353
gaccatcctgtcccgcatctccgacgaagagctccacgagttcttccacggcatgggttacgagccctacgagttcgtcgctggcttcgatgatgaggaccacatgtccatccaccgccgcttcgccgagctgtgggagaccatctgggacgagatctgcgacatcaaggacgccgctcagaccgacaacgtgcaccgtccgttctacccgatgctgatcttccgcaccccgaagggctggacctgcccgaagtacatcgacggcaagaagaccgagggttcctggcgcgctcaccaggtgccgctggcttccgcccgcgacaccgaggcccacttcgaggtcctcaagaactggctcgagtcctacaagccggaagagctgttcgacgccaacggcgctgtcaaggacgacgtccttgccttcatgccgaagggcgagctgcgtatcggtgccaacccgaacgccaacggtggtgtgatccgcgacgacctgaagctgccgaaccttgaagactacgaggtcaaggaagtggctgagtacggccacggctggggccagctcgaggccacccgtcgtctgggtgtctacactcgcgacatcatcaagaacaacccgcgcgacttccgcatcttcggaccggatgagaccgcttccaaccgtctgcaggcttcctacgaagtcaccaacaagcagtgggatgccggctacatctccgacgaggtcgacgagcacatgcacgtctccggccaggtcgttgagcagctgtccgagcaccagatggaaggcttcctcgaggcctacctgctgaccggtcgtcacggcatctggagctcctacgagtccttcgtccacgtgatcgactccatgctgaaccagcacgccaagtggcttgaggctaccgtccgcgagattccgtggcgcaagccgatcgcctccatgaacctgctggtctcctcccacgtttggcgtcaggaccacaacggcttctcccaccaggacccgggtgtcacctccgtcctgctgaacaagtgcttccacaatgaccacgtcatcggcatctacttcgccaccgatgcgaacatgctgctggccatcgccgagaagtgctacaagtccaccaacaagatcaacgccatcatcgccggcaagcagcctgctgccacctggctgaccctggacgaggctcgtgccgagctcgagaagggtgccgccgcttgggattgggcttccaccgccaagaacaacgatgaggccgaggtcgtgcttgccgccgccggcgatgttccgactcaggagatcatggctgcttccgacaagctgaaggaactgggcgtcaagttcaaggttgtgaacgttgccgacctgctctccctgcagtccgccaaggagaacgacgaggctctgaccgacgaggagttcgccgacatcttcaccgccgacaagccggtgctgttcgcgtaccactcctacgctcacgacgtgcgcggcctgatctacgaccgtccgaaccacgacaacttcaacgtccacggctacgaggaggagggctccaccaccaccccgtacgacatggttcgtgtcaaccgcatcgaccgctacgagctgaccgctgaggccctgcgcatgatcgacgccgacaagtacgccgacaagatcgacgagctcgagaagttccgtgatgaggccttccagttcgccgtcgacaagggctacgaccacccggactacaccgactgggtgtactccggcgtgaacaccgacaagaagggtgccgtcaccgctaccgccgctaccgctggcgataacgagtgataacacctccacggtgttgttagttcgctaacgccaaagggctcgggattcgtcccgagccctttgcttattcataagccccctctgacgaggaggctgtcatgcgaagcatgactgggggagagaaaagcggaagcgaaggcgagagccaagactgaaaacagcccataaattccccaccccaactaatccttaaggatgacaactccccatcaattcaatcctgcgcatgatggaaaccacgccattcctccataggcttggaaccagtatccgggcgcgaggctcggagccagccatgggggagagcacatgcagaaggatcagcagcagaccgcaatcatacaaccgttggacgctaccgacacagtggaatcaagtgtcgacgcccttgcccaaggcgaggcggagaacgcggaagtcgccgaattcaaccgattaatgcgcgaacgtgagacgcgcaagaaaaagcgcgtggtgcatcgcatcatcgccgtcgccgtcgtggcggtactgattatcggctttatggtggtgcacgcgattattaccccgtcagatgggggcgtgtctccggtatccacggcaacggtggaacgtggccatttcgtcgaccaagtcagctccaccggttccatagaacccatcaactccaccgtcgtcgccccgcagatcgacggcaccatcggcgaagtcaaggtgcaggaaggcgcaaccgtcaacgccggcgacgtactgtttaccatcaacaacgacaagctcgatagcgacgtgaatcaggccgatctggctctgcgagcagcgaactcaaaccttaatgccgcccagcagcaggtgaaccaaatcaatgcgaccataggtcaggcacgtaatcaggatggtgaggaaggccaagccgctgccgatgatgcggccggacagctgcccgctgcacaaagcggcgtggagagcgcgcaggtcgccgttcagcaagcacaagccacctatgacgaggcggtcgcccaagccaacaagcgtacggtcactgctccggtctcgggcacggtgctgaccatgagcgcggtgcccggtgccgccatcggagcttcctccgatggctcatccacttccgccggcgcagacggtaaaccattgtgtcagatcgccgacctgagtcagatgaaggtcaatgtcaacatcaatgagctggatatcactaaagtggccaaggaccagagcgccaaagtcacgttctccgcggtgccgggactgacgctcgatgccaaggtggataccatcgccagcaccacgtcgcagttggctgattcctcggcaggcgggcagagtggcaacggcggcgtgggatacgccgtgcgtctcatcattcccgcccctgatccgaaactgaagccgggcatgacggccagtgtgaaaatcaccatgcagagcattgacaacgctttgatggtgccgctcgccgccatcgtggatgagggtaaggagagcagcgcggtcatgctcgagaccaacgccgaaacccatgagttcaagcgggtgcgagtcacggtcaaagccaagaacaacatcaaagccgttgtggaaggcaatgtgagcaagggcgatgtcatcatgcttgatggcgcttcggctgccgacaatactggcgatgctgcttcttccacctcgcaaaccgcggcttcggacgaaagggcacgctgatatgttcccgtttcgttccgacgcgagccgggcaaatcgcggcaaacggcgtaatgagaccattgccgtgcccaccgccacagccaacgtcatcgaggttgaaaacatcaaccgcatcttcgagacaggcgacacctacacccatgtgctcaaaggcatcaccatgaacgtgcgccaaggcgagttcctcgccatcatgggaccatccggttccggcaaatccacgctgatgaacacgctgggcctgctcgaccgcccatcatccggcacctaccgcctgtgcggcatggacgtgcagaatctgagtgatgacgaacgctccgaactgcgcgggtggctcatcggcttcgtgttccaatccttcaatctgctgccgcgcaccagcgtgctgcgcaacgtgatgctgcccctggcctattccgactgcccggtgcgtgaacgggaagggcgtgccatcaaagcactccaatcagtggcgttgagtccggaactgttcgaccgcaaaaccaatgaactctccggtggtcagatgcagcgcgtggccatcgccagagcgttggtacaggacccgccgctgattctcggcgacgagccgaccggcaacctggactccaaaaccggcgatgcggtgatgcacacgttcgaacagctcaagcagcaaggcaaaaccatcgtgctcatcacccacagccccgaagtggccgaacgcgccgaccgatgcctgcacatgcgtgacggcgtactgcgtgaagggatgtaccgatgagaacacgggatctgctggcggaaaccggctccgcactgagggcgaacaaaggcaaaagcgcactgaccattctcggcatcgtcatcggcattgccgcggtgattaccatgacctcactgatcggtggcattcgagactctctggtcggcgaactgggtatgaacgcggcgcgcacgatttcgatttacacggacgtcggcacccttgacgacgaacagatcactgcgatgcgcgaggaactgaccgactacgagtacttctcgccgacgaactatggtgccgcctcgtcaatcgccgcgcccggtaccaccgacaaggtgtcggcgagcatcaccggtgtcgacgagcatttcttcgatgtatccggagtgacgattggtcgtggacgggccttcacatcgagtgaagcaacgagtggtgcaatggtggtgattctcgacgggcagggcgtgcagaagctgttcggcagcgcggacattgacgccatcggcagaaccgtcacgcttgacggcaatgaagcaaccgttgtgggtgtggtcgagtcgtctggattgatgggcggcatgggcggcgacagcgtgaatatctatatgcctgccaccactgtggcgctgcggtttgcgtcctcgaacatgggatacatgcagatctacggactggccaaggacggggttgatatcgaccagctcacggaacagacgaagaccgttgtcgctcgcatcatgcgtatcccaaccgaacagatcgaccagaatctgtcggtcgtaagcgcccaatcctccatcgaccagctttccagcttcatgagcgcattccaggtgctggcgggttcggtggccggggtctcgttgctggtgggcggcatcggcattatgaacatgatgctcaccaacgttaccgaacgcatccgcgaaattggcctgcgccgggcattgggtgccactcggcgtgacgtgaccgcgcagttcctcgccgaatccattgcaatcacagtgcttggaggtcttatcggcacgttgatcggctacttgctgtcgttgggcgccgctggattggtgtccggcatcgccggtggcatgagtatcgcgccagcagtttccgtgcagtccatcggactggcagtgggcatctgcatcgctgtcggcgtgattttcggctactatccagctagacgcgcggcaaagctcgacccggtcgaggcgctacggcatcaataatcgcgtagcaccccgaaatgcagtagggcattgcgcacaccgtcgtggtccacgtcgtcggtgatgtaatcggcggcggcctttggctcggcggtcgcattgcccatcgcgaccccgatgccggcgtaggcgagcatatccgtgtcattgccgccatcgccgaaggccatggtctgcccgcgcgtgatgccgtaatgcgccatgaaccgctggatgccgcgcggcttgccgccatcggccggaatcagatccgtgaaatccggatgccaacgcaccccgcgcacattgctgcacagtcccaccagttcggcctccaactcgggtccgacaaagggactgatctggaaagtctcatgatccagcgcgcgggtgcgcgggtcctcaaaataccgggtcggtgcggttttgcccagtttgctccacgtggcgcgaagcagatcattggactggttgaagtacacgtaatccttctcgccgaaattgcacaccacatcggggtgacggtccagccagtcgagaatcacctcaatatcagcagtatccaaggcctgcgaggcaaagaagccggtgtcatcaaagcaatactgcccattgaacgccaccacgccatcgaacgtcaccggcatggtatccagcaccacgtgcatctgtgaaggcgcgcggcccgtgcaaatcagcaccttgacgcctgcggcctgcagccggtgaatcgcctcgattgtggaatccggcaccgtatgggtcgtgaaactggtgagcgtgccatcgatatcgaagaatacggctcggatatcggcattggcagtatcggtagtcatagcttccattgtcaaagcccctctcgacgtgctttccggcgtgttcgacacgcctatagcgggttatcaaacgcacgaatcccggccattgcatgcgcgccataaaagacacctatacggcaatcggccattttccgtcactttcgcggttcaagcgcgttatggtgttactcgacatcaattttggagagaggaaatccaatgacagcagcaacccagtcggcaactccggccgctcctaacaataacgagccggtgcgtgtgaaccacaccgtccgcaacgtcatcatcaccatcgtggtcgtggcgattatcgccgtggccgcgttcttcggctaccgcgcgtttgccggtgccaacgagtcgtccgccaagggcagcaagggcaacccggtcaagatcggcgtggtcggcgctaccaaccccgaatgggtcaagttcaagcaggacgccgagaaggccggcatctacgtcgacatcgtcgacttccaagactacacctccgaaaacccggcccttgactccggcgagctggacctcaacgaattccagcacctgctctacttggccaactacaacgtgagcaacaagaaggacctgcagcccatcggcggcaccgccatctacccgctcggcgtgtactccaccaaggtcaaggacatcaaggacctgaagcagggcgacaccgtcaccattccgaacgacgaaaccaaccaggcccgcgctatcggcgtgctcaaggccgccggtctcgtgacgctcaagggcgactggaccgccttctccactccggccgacatcgacgaagccaagagcaaggtcaaggtcaccccgctcaaggccgaacaggtggccaccaccctgaaggacccgaccatcgccgctggtgtgatcaacaacgactacgtggccgacgccggtctcaacccgaaggacgccatctaccaggatgacgccgaatccgaagaagctcgcccctacatcaacgtgtgggtggcccgcaaggcggacgtgaacaacgagacctacaagaagctcgtttccatctaccagcagaaggatgtgctcgacgccctgcaggagaactccggcggtaccgcggtgttcgccgacaagttcagcgccagcgagctgcaaggcttcctgtccgacattgagaaggacgccaaagcccagcagtgagccgtggctgatacgagtgcacgactaacctgtccatagccattaccaccaagcggagcgagtacccgagccaacaatcgggattcgctccgcttccgtgaccggacatcaacaaccagcatcagggagcactatgagcgaccccatcatcaccttcgaccatgtcgtgaaggaattcaaaacacgcggacgcggcgcgaacatcgcacgagccgtggatgacgtcagcctgaccatcgatcgcggcgacatcttcggcatcatcggctattccggtgcaggcaaatccacactggtccggcttatcaacgcgctcgaacgacccacctccggcaccgtgaccgtgctcggcaccgatatcacctctttgagtgagaccaagctgcggcccatccgccagaaaatcggcatgattttccagcagttcaacctgttctccaccaaaaccgtggcgcagaacattgcctacccgctgcaactcgatcactggcgcaaggactatcaggatcgtcgcgtcaacgaacttctcgaattcgtgggccttagtgagcacgcaaacaaatacccctcgcagctgtccggcggccagaagcagcgcgtcggcatcgcccgcgcactggccactaatccggagattctgctcgccgacgaagccaccagcgcgctcgacccggaaaccaccaccgaagtgctggccttgctcaagcgtgtgaacgaggaattcggcatcaccattgtgcttatcacccatcagatgaacgtggtccagcagattgccggccgcgtggccgtaatgagcgccggacgcgtggtcgaatccggcgacgtatacgacgtgttcgccgcgccccagcagccggtgaccaagcgattcatcgccaccgccctgtccggcctgcccgaggaagaccgggtcgagcgattgcaccacgaatggtcgggccgcatcgtcaccgtgctcatccgccaaaaggacgtttccggcagccatggccacgaactcaaggcatccggacagaacatctccgaactcatcgccaaatacggcgtcgaatccagcctgctctacggcggcatcgacacggtcaaggggaccgccatcggtgccatcacctacgaattcaacgggcccggctggcacgtggacgaattcctgcgcgagctcgccgccaatagcgacgtcattgacttcggcaccgccgcaaagcccgtggcttacgccgacgcagttgccggacatgcctcctacgccgaagaccgcgcccatgacccactggcggccgatactgccaccgcgcccgctgtatccgccgccgcacatgaaggagacaacgcatgatcatcctcgccaactcgcgtagcgactggaacgtgctgcgcccactattgttcgaatccatcggccagaccctgaccatggtgctcgtcacccttgtcatcggcggattcctcggcctgatcctcggcgtggtgctctatggcacccgccccggcaacctgttcgagaacgcggtcgtctaccgcatccttgacatcatcgtcaacatcgtgcgcccgattccgttcatcattttcctggcagccatgcagccgctcaccatcgtcgtggtcggcacgtccatcggcaccgtggccgccatcttcccgatggtggtcatgtgcaccttcgccacttctcgtctggtcgaacagaatctcgtgccggtcgacccgggagtaatcgaggccgcgcgttcgatgggtgccggcaagctcaccatcatccgcaccgtgctcatccccgaagccctggcaccgctgatcctggcctacgccttcctgttcatcggcgtgcttgacatgtctgccatggccggctacatcggcggtggcggtctcggtaacttcgccatcgcctacggataccagaagttcgaccagaccgtcacctggacggccgtgatcatcatgatcgtactggtccaggtggtgcagggcatcgccaacgccatcgccaaacgactgctcaaacgccagcaataacaaggcatactgaccccatagatcgcggccctcgccaatatgaagcgagggccgcaatatattcttcgcgctactagaatcgggaaccatgagtgaacatatcgacatcgaccacgaactcatcaccatccgccactacctgcacgcccatccggagcgtagtttccgtgaattcgacaccagcatctatctgaccgaccagctcaaggcgcacggcatcgagatcctgcacaacccgctggagactggtgttgtggggctcattcagggcgaggccggtcccgggccgcgtatcgggctgcgcgccgacatcgacggcctgcccatcgtggaagactccggactggagttcagctccgtcaatgaaggcgtgatgcacggctgcggccacgacctgcacatgaccggtctgctcggtgccgccttctggctcgccgagcaccgtgacaagttcgccggctcaatcaagattctgttccagccgagtgaggagaccggccaaggcgctcgcgccatgatcgacgccggactcgtggatgacgtcgaagccattatcggcacgcacaacaaccccaactatgcgtccggccagctggccatcggcgtcgagccgatgatggccggctgcgtgaaattccgcgtgaccctccacgcccaaggcacccacgccggctacccgtacaagggcaccgggcccatcgaagcgctcgccagtattattctgagcctgcagaccatcgtgagccgcaacgtcacgcccttccacccgctggtgctgtccgttaccgaagtgcacggcggccatgtgtggaacgtggtgcccgccgaagccggattccaagggactgtgcgctatttccacaagtcggatggcaatctggtcggccgccgattcaaggaagtggtggaacacaccgccgaggcatacggtatcagcgccgatgtggtctgggatgatttccaagacccgctggtctccgatccaggtcttgccaaggccgtggcggcggatgtcaacgactacgcgcagctcgaaccgatacgtcagtcgatggcgggggaggacttctgcgaattcgccaaggtgacgttgccggtgttcgcgttcgtcgggtcaaacggccaggaaggttgcgccgactggcatagcccgcatttcgtgggtctcgacgaatccattcccaccttcgtcaacttctacgtcaacgccgccctgcgcgtgctcaacgagctgaggtaaatccttttttggctcccctctggaggctgaggcgttaggcagacagcccaatgggctgtctgcagccgaaggtgaggcgacagccgaaccagatatgcgcgggcctcgcccgtccataagtgcaggacgagctatcagcgaagctgactgaggggagtggcattcgttcattaggtcgattcatcgtccattaggtcggtgaacggcgatactggttgttggaatcgcgccattgcaacgactgatatcgcattgcagtgacctaatgaacgcaaaaacgacctaatgaatgacgccaagccggaagagcaggcaatccgacgccatacgcggctacactaagaagctatgacacagcttcgcttcgcactcgcccagatcgacacctgcgtcggcgcgctcgatgccaacgccgccaaagtgctcgactactcccgtaaagccgccgcagggaatgcccaagtggttgttttcccggaaatgaccctcaccggataccccatcgaagatctggccctgcgccgcaccttccgccaagccgcatgggacaaggccaacgaactcgccgcccagctcaacgacgacggcctcggcaatctgttcgtggtggttggcaccgtgggcactgatcgtaagacctccaagccgcgcaaccgactggtggtattgcatcagggcgtggtctgggccggctacgacaagcacttcctgcccaactacggcgtgttcgacgaattccgtatcttctccgccggcgaccgttccgtgaccctcgacgtggatggtgccaccatcggcgtggccatctgcgaggacatctggcaggatggtggcccggtggccgacctggccaccaagaacatcgacctgctgctcaccatcaacggctcgccgtatgaggaaggcaagaccaacacccgtttcgagctcgcccagcgtcgtgccgccgaagtcaacgccccggtcatctacctgaatcaggtcggcggtcaggacgacctggtcttcgacggtggcagcttcgtggtcgatgccgacggcacgcttatcgaacgcggcccgatgttcatggaaaacctgacgttctgggacttcgattccaccgccgaacatcaggtcaaggccgagatcgttccggaactcgacccggacgaagaggtatacactgcctgcgtgctcggcctcaaggactacatggccaagaaccacttcaccggcgtgacgctgggcctctcaggaggcatcgactccgcactggtagccgccatggcggccgacgcatgcggcggcgagaacgtctggggcatctccatgccctccatgtactcctccgatggttccaaagacgacgccgctgacctggcctccaacatcggtgcccattacgaggtccagcctattgagccattgttcaacgcctaccaacagcaacttgaccttgatggcgtctccgccgagaacctgcaggcccgcatccgcggtgtgatcgtgatggccagttccaattctcgcggcctgctcgccgtggccaccggcaacaagtcagagctcgcctgcggctactcaaccatctacggcgatgcggtcggcggctacgcacccatcaaggacctgctcaagacccgtgtctgggagatcagccgttggcgtaacaaggccgcggccgcaggcgtcggtatcggcgggctcaagatcgtgggcaacgaggacggcaacgccggcatcccgttgaaggacggcgtgatgattccggtctcatccatcgagaaggctccctcggccgagttgcgccccgggcagaaggactccgactccctgcccgaatacgcgctgctcgacaaggtgctcgctgcatacatcgagcacgcgcacggccgcgccgacctgttggccgacggcttcgatcaggccaccgtggacactgtgatgcgattggtggaccgcgccgaatggaagcgccgccaatacccgttgggaccgaaggtcacggccctcgcgttcggccgcgaccgccgactgcccgtcaccaacgcgttcagggaataaacatatattgctcccgccagcgggagcaagtaataccgttgaggaggtaccaatgacagacgataacaagaagcagtggtatttcaacaccgtcaagaagcaggccgagctgggcatggtctcaccgattgaacagcgcatgggcccgtacaagaccaaggaagatgccgaacacgcctgggacatcgtggtggaccgcaacgccagatgggaggaggagaactggcgctggaagaactacggtgtgaaatccgcgcaagcgaacgatgaagactgacggccaaaacagacggatacggttctgctgtcaatctcaagaccgaaccgctcaccaagccgctcatacgaacatcacagtatgagcggtttcccatatctggagacgtgcaatagccccatcaatacctagaaaccattggaatggtagcgttcacaaaaaacaatgtgagatagctcactcccaatttcggcttttcccaagcaagtgccaactacactgttgaaccaagggttccgtgaagatgcgaaacctacaaccccatttaaggagtgacatgaccgcagtagaaaatgcagctgtctcccaagaggagctcgacgccaaggcatgggccggcttcaccgagggcaactggcagaaggatattgacgtccgcgacttcatccagaagaactacaccccgtacgagggcgacgagacattcctggctcctgccaccgagaagaccaagcacctgtggaagtacctcgacgacaactacctggccgtggagcgcaagcagcgcgtctacgacgtggacacccacaccccggctggcatcgatgccttcccggccggctacatcgactccccggaagtcgacaacgtgatcgtcggcttgcagaccgacgtgccctgcaagcgcgccatgatgccgaacggcggctggcgtatggtcgagcaggccatcaaggaagccggcaaggagccggatccggagatcaagaagatcttcaccaagtaccgcaagacccacaatgacggcgtgttcggcgtctacaccaagaacatcaaggtcgcccgccacaacaagatcctcaccggtctgccggatgcctacggccgtggccgcatcatcggcgactaccgtcgtgttgccctgtacggtgtcaacaagctgatcgccttcaagaagcgcgacaaggactccatcccgtaccgcaacgacttcaccgagccggagatcgagcactggatccgcttccgcgaggagcacgacgagcagatcaaggctctgaagcagctcatcaacctcggcaacgagtacggcctggacctgtcccgccctgctcagaccgcccaggaagccgtgcagtggacctacatgggctacctggcctccatcaagtcccaggacggcgccgccatgtccttcggccgtaactccgccttcctcgactgcttcatcgagcgcgacctcgaggccggcaagatcaccgagaccgacgcccaggagctcatcgacaacatcgtcatgaagctgcgtatcgtccgcttcctgcgcaccaaggactacgacaacatcttctccggcgacccgtactgggcgacctggtccgacgccggcttcggcgacgatggccgtccgatggtcaccaagacctccttccgtctgctcaacaccctgacccttgagcacctcggacctggccctgagccgaacatcaccatcttctgggatccgaagctgccggaaggctacaagcgcttctgcgccaagatctccatcgacacctcggccatccagtacgagtccgacaaggaaatccgttcccactggggcgacgacgccgccatcgcatgctgcgtctccccgatgcgcgtgggcaagcagatgcagttcttcgccgctcgcgtgaactccgccaaggccctgctgtacgccatcaacggcggccgcgatgagatgaccggcatgcaggtcatcgataagggcgtcatcgacccgatcgccccggaggccgacggcaccttggactacgagaaggtcaagaacaactacgagaaggcgctcgagtggctgtccgaaacctacgtcgaagcgctgaacatcatccactacatgcacgataagtacgcctacgagtccatcgagatggccctacacgacaaggaggtgtaccgcaccctcggttgcggcatgtccggtctgtccatcgccgccgactccctgtccgccatcaagtacgccaaggtgtacccgatcaccaacaaggaagccaagaacctcgaaggccacgagtacgagtacgtcgaaggcgccgacgacgatctggtcgtcggctaccgcaccgagggcgagttcccggtctacggcaacgacgacgaccgcgccgacgacatcgccaagtgggtcgtctccaccgtgatgggccaggtcaagcgcctgcccgtctaccgtggcgccgtcccgacccagtccatcctgaccatcacctccaacgtggagtacggcaagaacaccggttccttcccgtcccgccataagaagggcaccccgtacgccccgggtgccaacccggagaacggcatggactcgcacggcatgctgccgtccatgttctccgtcggcaagatcgactacaacgacgccctcgacggcatctcgctgaccaacaccatcacccccgatggcctgggccgcgatgaagccgagcgcatcggcaacctggtcggcatcctggacgcgggcaacggccacggcctctaccacgcgaacatcaacgttctgcgccgcgagaccatggaggacgccgtcgagcaccccgaaaagtacccgcacctgaccgtgcgcgtctccggctacgcggtgaacttcgtcaagctcaccaaggagcagcagctcgacgtcatctcccgtaccttccaccaaggtgccgtcgtcgactgatgaccaaccccgcgaaccgcggcaatgactaactgaaggggtggggcacggctccaccccttccttattttccacagactttcgcatcatttggaacaggaggacaactatgcccgcaacacccacgttccgcaccacgaccaggcatatgctcaaggaatcgaagacctatgcctcgcagactttgatgggcggcctttccggctttgaatccccaatcggactcgaccgacgtgaccgcctttccgccctgaaatccggcgatatcggcttcgtccactcttgggacatcaacacctccgtggatggaccgggcacccgcatgaccgtgttcatgtccggctgcccgctgcgctgccagtactgccagaacccggacacttggaagatgcgcgacggcaagcccgtctaccttgacgccatgatcaagaaggtcgatcgttacaaggacctgttcaaggccacgcatggcggtatcaccttctccggcggcgaatccatgatgcagcccgccttcgtctcgcgtgtgttccatgccgccaaggagatgggcgtgcacacctgcctcgatacgtccggcttcctcaacacgagctacaccgacgagatgctcgaggacatcgacctgtgtctgctcgacgtcaaatccggcgacgaggagacctatcacaaggtcaccggcggcaccttgcagcccaccatcgattttggccagcgactggccaaggccggcaagaagatctgggtacgatttgtgctcgtgccgggcctgaccgactccgaagagaacgtcgaaaacgtggcgaagatctgcgagtccttcggtgatgccgtcgaacacatcgacgtgctgggattccaccagcttggccgcccgaagtggcacgaactgcgcatcccatacccgctggagaaccagaagggacccaacgccgccacccgttcgcgggtggccaaccagttcaaggaccacggcttcaccgtgttttaaattgcagggccgaaccgcgcgtaaataccacgattcggcccgttcgcccataccctagagatatggccgacatctacgcatttcctatgggagcgtccaacgacggacgccccgtacgccctcagggtgtgccggatgaagtatgggcagctgtcgaatccgtcagcaccatgaagcgcatccatgacgtgcgctatcgggagattcccgtgccttccaccttggccgattatggtatcggcgtggaattcgaagcgggagagcgtgccctcggcgatgccttttccgccggtcttggcaacgatgccgaatcacgaatcgccacaggctggatcatgatgctttatgctcatgagctgcgcattgaccgggattccaactggcgttgcgtggcgttcgcgcggctgccgctggaaaccgccgaaaacgattctctgacccccggcatgtactgggatgacatgtgcgactatttcgacggcatcgagccggattcggtatccggcacagtcaccgtgacccaaaacacggcttttggttcgatggccggctccaccagcgccgggtgtgagattcgcgtctcatggaccccgcttgacgggaccggaccggacggtactatggacgccggcgcacaaatccgctcgtgggccgcattcatcagatccaccatccgttttgaggaggatgacgccagttgagtgacgtccgtgacaccgaaccccgactgctgaaagagcctcgcgggggagtgcccgatgtcacttcgtcgctggatggctatcatcgagcctgcgatgcgctggccgaggcgacgggctcgctggccgccgacgccgaacgggcgtccggattccgctatggacatgaggattggctgattcagttcaaacgtgaaggtgcgggcatcgccttgcttgatcccgtcgccctgacacgggccggagctgactggaatgaattcaatgacgccgtgggcgatgctacatggattctgcatgattctctgatggacttgcccggattcgccgaaatcggactcaaacccaaggccttgttcgacacggaaatagcggcgcgattgctcggcctgcaccgcttcggtctggccgccgtcaccgaacactacctcggcatcacgctggccaaagagcattccgccgccgattggtcctaccgtccgctgccgcgcgactggcgcaactatgcggcgctcgacgtggaggtgcttatcgaactcgaaaccttgatgcgtcgtgacctgaaagccgcaggcaaggacgagtgggccgctgaagagttttctcacgctttggttgcgggccttgccccgcgcaaacctcatccgattccttggctgcgtatctcgcgcatcacccagctgagtcgtgatccgaggggcttggccatcgccaaatccctatgggaggagcgcgaccggctcgcccggcgatacgacatcgctcccagcctgttattgaccgattcgtcaatcatcgaggccgcgaccaacaagccgcacaatgccgcccaattccgcgcactccgatccctgaacgagcgtgtgcgcattcataccggcaccgagcaggacaaaatgttcgagcggtacgcgccgattcagcgtacggtcaagccgaaggtctggaagcaggccatcgaccgcgccatggccctgaagcccacccaatggcctaccatgcccgcccccgaacaggacgaaaacggtgtggtgaacgcgccccgatccatgcgactgtggcaacagcgccatccggagcgttatgaccgtctgcagcgggtacggcgtgtgatcaaccgcatcgccgaagacacccgcacgccggccgagatgatcatcaagccacagatcctacgcaacctgtgctgggtggaagacccggtggaagtggacgtcgagacgttcctgatcgagcagggcgcaagaaactggcaggtgaaactcattgcaccgtccgtaagtggcgttatcatgtagaggttgccttacggcagaactgtaagaaataacgacttttgaggagtcattagcgtgaagatcagcgttcgtaacctcgagcccaccaaggtgaagctcaccgtcactgttgaaccggaagagctcaacccgtatctggatgcggcccgtaaggaaatcgccaagcaggtgaacgttcccggcttccgtaagggccacgttcccggcaagatcatcgaccagcgcatcggtttcgccgccgtcgccggtgaggccgtgaacgatgcggtcccggagctgtactccaaggccctggatgagaagaagattcgtccgatggctcagccggagttcgacgtgcaggatgttccgcagtccgccaacgacgagaccaagctgaagttcaccgccaccgtcgagcgtcgtcctgacatcgaactgccggaaatcgacggtcttgagatcgccatctccaagccggaagtcaaggatgaggacgtcgacaagcgcctcgagaccctgcgtcagcgcttcggcaccttggtcggcgtggaccgcccggccgccaagggcgacttcgccaacatcgacctgactgctgagattgacggcgagaccgtcgactcccaggaaggcgtgagctacgagctcggctccaacaccatgctcgacggtctggacgaggctcttgacggcctgtccgccggcgaggagaccaccttcgaaggcacgctggaagccggcgagcacgagggccagaaggccaccgtgaaggtcaaggtcaactccgtcaaggctgaggaactgccggagctgaacgatgagttcgcttccgaagcttccgagttcgacactctggacgagctcaaggctgacatccgcaaggctgccgctcaggacgccgaaggtcgtcaggccaccgaggctcgcgatgccttcatcgccaagctgcaggaaggcctcgagatcccggtgccgaagggtgtcaaggccaacatggtcgaagagcagctcaagggcatgaccccggacccggagaaggccaccaaggagcagaaggctcaggccgaggagaccgtggagaaggatctgcgcgatcagatggtgctcgacgctctggccgagaagctggacgttcaggtgtcccagtccgacgtgttcaacttcctcgcttccatcgcccagcagtacggcatggacccgaacaacttcatccaggccatcatcaagaatggccagcttggctccgctgtgcaggaagtcggccgttccaagggtctgctcgccggcatgcgcgccgtcaagttcaccgctgatggcgaggttgtggacctctccggcttcctgggcgaggccgctgaggacgaagagtccgagtccgtcgaggccgcttccgctgctgccgccgtggccgacgaactgtccgccaaggatgacgccaaggacgctgagtgagcatagcctcatcgcgttagcgtgattgtttgagcccggaatcgtgtttcacggttccgggctcttcctattctggtaaaaggactatttctttggctcccctttggggggagctgtcgggcgtagcgagactgaggggagttcccaaggcatactcgttgcatagcgtgcggaggttgacatgcagccaacggttactatcaaacgccttggttggctcgctgcggcgaccattgtgctcggcgtgctcatcggtgtgggagcaggtctgctgaccctgttgctctacggcgttgaacatgtgctgctcggctacatcgaaggcccagaattgtctggtccattcggcgtgcccgctgcacgccgtgtgatatcggtgaccgtgggactcggcatcgcgggcattatctggtatctgctacgacacaaaacgactgtggtgccctcagtcaagaaggccgtggcgggaaagcgaatgcctttctggcaaaccattgtgcatgtggtgttgcagattttcatcgtcggctccggtgcctcgatcggccgagaagtcgccccacgcgaactcggcgccatgatcgcgcaacgtttttgcgacctgttccatatcgagggcgttgatggtatcgaccggcgcatggtggtggcagtggctgccggtgccggtctaggaggcgtctatgacgcgccgctggccggcatgttcttcgccgtcgaaatcctgttggtggatgtgacgatcgaaaaggttgcgtttggactgggcgtgtctaccattgccgcattcgtggcggttgcgatcaaagggcattgcctgttctacgacatcaccgccatgcaaccggaatccacgccaacgttaatgctgttcgctctgatctgcggtgcggcatgtggagtgggcggcgcattgttccgaaaaggttcgcaatgggcggaagcgcacaagccgaccggcaaggccattctgtggcagatgccgctggctggtctcatcaccggtttggtggcgattgttgtgccgcaggtgatgggcaacggccgtgccgcagcgcaacttggattcagcacgttcattcctgaaaccgccggcactgctggtgccatgcagtcggcatcttcagcggccgcctctccatggaacttgctgacgggcggcggtaatgtatccgattcggcctctggcgggggagcgggctctggaatggcctcgttttgggccatgcttcagggtgggagcggctcttctggatccgtgatgaacgccggtttcccgctgtcccagtccaatatctggatgttgctgggtgtgttggcactcacctttgtcgccaaggcgctggtgacgctgatgaccattcgctccggtgcatcgggcggtgtgctgcagcccggcatcgcattaggttccacgctgggtgcgatgctcggcctcgtatggatactgatgtttccgactgattcggtaaccgcgtgtgccttgatcggtgcggcttcgttgctttcggcctcacagcaggcaccgcttatggccatgtgcttggtgatggagctgaccgaagcgccgattaccttcttcgtgccagtcggcatggccgtggccacgtcgtcgttgatatcaaagtggttgctgagtcgtaagtaagtagatgcatatattctggctcccctctctgaggggagctgtcgaacacagtgagatcgaggggagccgaggtaaagaaagctatgtcagaaaacaccgaagtccgtgcggcacttgaatcgcttgccgctgagccgctcactgagcagattgactactatcgaaagccattcatggtgttgtgggccgccattcaggaggccgccagcgatgtggccgaagactacgacttgcctgcggatatggcccaattatgggtggccgaacagatgcgccaagtcgccgattcactggtcgatcggctcgcggaaaaagccgtggcccatggtgccagcaagtccaacgtggcgcgagccgccggtgccagccccgccaatgccgcccgtcgcttcccgcgtctgggcgacgatgccgcctcccagacccgtctcctcattgacgacgtcctcgacaccttggaataacccgaaatccctacgctacccgccaaaaagcacgcgaaaagccgccttcagtcgcttcaaggcggtagtctgaacaatgttcgagtaattagaaggagaatcaaggtgagcaatacctttgcgaccttgccggtcatggcgggcgatgacgtcccggccggccccgtcgacccgattttcaaccgtctgctcaaagaccgcatcatctggatgggtgaagaggtcaaggacgatatggccaaccgcatctgcgctcagctgctgatgctggccgccgaggacccgaagaaggacatctggctgtacatcaactcgccgggcggctccatcaccgcaggcatggccatctacgacaccatgcagctcatcgagcctgacgtggcgaccgtgggcctgggcatgtgcgcttccatgggccagttcctgctgagctccggcaccaagggcaagcgttacctgacctcgcacgcccgtgtgctcatgcaccagccttccggcggcatcggcggcaccgccactgacgtgcgcatcaacgccgagctcatcatggacatgaagaaaaccatgagcgagctgaccgctgagcagaccggccacaccctcgaggagatctaccgcgacaacgaatacgaccactggttcaccgcccaggaagccctcgactatggcttcgtggacaagctcgtgaccacgccggacaccatcggcaacaaccagcagggggagtgagactcatggcaagtgaagaagcaaagttcgccgcccgtgccgaccgcttggccggccgtcatggcgtagccggtttcatgccggccgccgcccgcgcagcccagcccgcgccgaccaaccgttacatcatgccgcagttcgtggagaagaccccgtatggcatgaagacccaggacgcctactcccgcctgttcgaggatcgcatcatcttcctcggcgtgcaggtggacgacgcctccgccgacgacgtgatggcccagctgctggtccttgaatcccaggatccgaaccgtgacgtgatgatgtacatcaactcacccggcggttcgatgacggccatgaccgccatctacgacaccatgcagtacatcaagcccgacgtgcagaccgtgtgtctcggccaggccgcctccgccgccgccattctgctggcctccggcaccaagggcaagcgcctgatgctgccgaacgcccgtgtgctcatccaccagccggccatcgaccaaggattcggcaaggccacggagatcgagattcaggccaaggaaatgctgcgtatgcgcgaatggctggaggagaccctcgccaagcacaccggccaggatgtcgagaagattcgccgcgacatcgaagtggacactttcctgaccgctcctgaagccaaggaatacggcatcgtggacgaggtgctggaacaccgccagtaaaacttccgaacattgcaataccctcggtcggcaacgaccgggggtattgtatttcaaggatgacaatgataatgcgcagcgtggcggttcgacggtgcggcgcggtcggcaaaggagaatcatgggacgtgtggtgagctacaacgaggacgtaccccgttgcacgttctgcggcaaaaccgaacgtcaggtcagaaaactggtggccggtcccaacgcctccatctgcgatgaatgcatcgccctgtgcgtggacatcatctccgaggagcgtgtcaaagatgccgaggtcaattcgctgagcctgcccaagcccgctcagatcttcgattatctcaaccgctacgtcatcggtcaggagaacgccaagcgcgcattgtccgtggctgtatacaatcattacaaacgcgtcaatatggagcttcaggagtccgctgagcagcttgacgggaataacgggcacggtggccagaccggcaaacaagccaagcaatccgctcccgcccagacgcgtgctacccgccgcaacagtgaccctttggctgacgttgaggtcgccaaatcaaacattctgttgctcggccccaccggtgtgggcaaaacctatcttgcacaggcgttggcccgcgtaatgaacgtgccattcgtcatcaccgacgccaccaccctgaccgaggccggctatgtaggcgacgatgtggaaaccgtgctccaacgtcttctccaagccgcggatggcgacgtaagccgagcccagcacggcatcatctacattgacgaaatcgataagatcgcgcgcaaatcaggtgagaacacctccatcacccgtgacgtgtccggtgagggcgttcagcaggcgttgctgaagattttggaaggcaccatcgcctccgtgccgttggagggcacgcgcaagcataaggagcaggacactgcgcagatggacacacgcggcatcctattcatctgcggcggtgcgttcgtgggactgacggatattgttcgcaagcgattgggccgtcgagagactggcttcggcgcgaattggcacgacgccgacatgaaagacgaggaattgctcgaacaggtcaatgccgatgatctggccgagttcgggctgttgcctgagttcatcggacgtttgccggtcaccagtgtgctgaaggaacttaccgtagacgatctgacggcgattctcacccagccagccaacgcgctgatcaagcagtaccgtaagctgttcgccgtcgacggcgtcgacctgcagttcaccgaacaggccattcgggtgattgctgatatcgccatcaagcaggggaccggcgcacgcgggttgcgttcgattatcgaacgtacgttgcaggacacgatgttccagttgccgagtttggatgatgtgaagcaggtgattgtggacaaggcgtccgtagagggttccagtacgcccaaactcttgcgcgaagccgtggatgtgccgcagggacgcctcaaagttgcgtagtcggttttgcttgaccgagtccgtacacatgcggcgtgaggccagtaaatacgccgttgcggtggcgattaggatggtgcgactcgccgcaacacgccgagttgcattcatctgaacggcgtgtattatatatcgagttgtctgaaaagacaacatgcgccagtagcccagcggattagagcagctgactacggatcagcaggtcgcaggttcgaatcctgtctggcgcacaataagcctcgaaagcgaaatgcttccgaggcttttccaattgtattggcccgtttgagtcggccacacaggggtggggtaaggttgcccttcgcgactcagcccggagcggaacgtcctgagatattccgtactattacatacggttcatccaagagagtacagcaaggagacgcgatggccacgaccgccggcgcgaagaagggactttggtccaccatcaggcgaatcgccgcctcagaccgtatttccggactcatcatgctcggcttcgcgctcaccggcctggtgctcgcgaacctgcccgccaccgcgcatgcgttcgagaccgtagcggaaacgcatctgttcatcccctacaccaatctcgacctgccgattggccattgggcccaggatggtctgcttaccatcttcttcctgaccgtgggcctcgaactgaagcaggaactcaccaccggctcgctcgccaatccgaaagcggccgccgtgccgatgctgtgcgcggtgggcggcatgatcgccccgcccatcctgtttctggccgtcacggcattgttctctcagatcgggcctggtgaacccggcacgctgattctgaccaccaccggcagcagcattccgttctcggagatgtcgcacggctgggcagtgcccaccgccacggatatcgcgttctcactggccgtgctcgcactgtttgccaaggccctgcccggttcgatccgcgcgttcctgatgacgcttgccaccgtcgatgacttgctggccattattctgatcgccgtattcttctcctcgatcaacgcctggtattggttcatcggcatcgtcgtgtgcgccgtcatctgggcatacctcgtacgactgaaaaaagtgccgtggattgcggtcggcatcgtcggcgtcctcgcttggatcatgatgttcgaggcaggcgtgcatcccacactggccggcgtgctggttggcctgctgactccctcccgtgaaatgcacggcgaactttcaccgcgtgccgaacgctatgccaacaagcttcagccattctccgcactgctggccctgcccatcttcgccctgttcgccaccggcgtgcacttcgagtcggtgagcccgctgttgctggcttcgccgttggttatcgcactgattgtggctttggtggtcggcaaacctttgggcatcatcaccaccgcatggctggccacgcatgtgggcgggctcaagatggccaaggggctgcgcgtgcgcgacatgattcccgctgccgtcgcctgcggcattggcttcactgtgtccttcctcatcgcctcgctggcgtacaagaatgcggaactttccgctgaggcgcgcttcggcgtgctggtggcctccctgatcgccgccgcgatttccggtgtgctgctgagccgtcagtccaagagattcgagaaggccgcagccgcagcagcggccgatgcggaggatgacgaatcgattgatggcgatggcgctggtcagaccggtcgcaccacaaagtccaccacgcccacggaacaccccggcaccctcgccgacggcaccgccagtgtggagattgacttccgccactgatggcttagacgatccctactccattgttggccttgtttcgtgaagaacgtacgctgaggcgcgctcaccgtacgttcttcacgagatgaggccttatttcgtgaaaaccgtacgctgagtgtcactcaccgtacgttcttcacgaagtcaaggatgatttcgcggaaaacgtatgcagagcttcaggcgctagaatgcgaagagtcgatagcaccgtacaggaggatattggatggcaaagaagcagaagaaatccaagaagaacgacggcaaaaaggccgctgaagcaaagaatctagccgaggccgcatccaagtccacagtcgtggacgatatggaaccattggaagccacagccgcgaatgatgcggcaacgttggaggccgagatggcaaccgaggctgccgcaacgccggtgaacccggtcgacttggaggacgtctcgccgctgggcgacacctatcatcgcggcccggtgattctacgcggccagatgattccctcggacaataccaccgccaatctgctgaaacccgaccaggacaccgactggctgcacatggacccatggcgtgtgctgcgcatccaatcggaattcgtggacggtttcggggcgctcgccgagctcggacctgcggtctctattttcggctccgcacgcacccagcgcaccgaatcgatctacaaggcggcccggcgcatgggtagccagatagccaagcgcaacatcgccgtcatcaccggcggtggtcccggcatcatggaagccgcgaataggggagcggcactggctggcggcaaatccgtgggactcggcatcgaattgccgcacgagcaggggttgaaccagtgggtgaacctcggcatgagcttccggtacttctttgtgcggaaaaccatgttcgtcaagtattcctccggcgtgatcgtgtgcccgggcggcttcggcacactggatgagatgttcgagctgctgaccttggtccagacccacaaggtggcgaatattccggtggtgctctacggcaaggaatactggcaggggctctttgactggctcaacggtccggtggccgagcacggcatgatttcggcaatcgacccgaaactggtcaccgtgaccgatgacgccgacgaagccgtggaggtggccgtcagtgcaattgtgaggtaagcgagatagagtggctcccctctccgaggggagccaagggcagagttactttttgtaggcgatgagcaggcctgtgccgtcaggggtaagcgtggactcgaaaccttcgtcatcttcgacggtggtgagcagctcacgcatggcgatggccttgtcgctgcggtcggccggattaatcatgccgccctgaccgtcctccaacgccagcacatcggtgaacacgatcacgccgtgcgcgcgcagcagacgggaggcctgggcgaacgtggcggcatagttctcggcgtcgcccgccaccacgatcagatcgtaatcattggcgttgaggcgcggcagaaacacgctggccggggcgttcaccgcacgcaacgtggtgtcggtctcatcctgcagttcggcgaacgccttgcgaatcagcgcgatgccctgagcggtggaatcgaccgcagtcagcaggcccttgttatccagcgcatgggcgagctgcaaggtctccaccagcgagccggtgcctacggcgatgaccgaagcggcgccggtgatgcgcaccagcatgcccagcagacgggcctgcgcggccgaaccctgcaactggccggacttgtcggcggccgtacgggcgtcggtcaacgcattggattcacgttcgcgcgcgtgttcctcggtgaattcccatgccttggcgaggttggtgtactgtgttctgtccataattcgttcctttatgtcttctctcgtgcgggcacccggtggatgtatcgactacgtgttgcagcgattgccgtagctggtcgtggcgcggcttagcgctcgcggaccttggccacgatctgccacatctcctcgcccacatcgatgccgcgcgggcagtggcgggagcaggcgcgcacggactggcaggcggccacgccgtcggcggtgtcgatggcgtccatacgctccatggccttggtgtcgcgcgaatcgttgacgaaacgggaggcccaaatcagcgaggccgggccgatgaaagcgtcgccgccggcgtacaccgggcaggcgccttcgcacacgccgcaggcgatgcagttgctcagcagctcgtatttggcgagttgttcggggttctgcaggtattcgaacacgtccaccttgccttcggcggtggtggcgagcacgccgtccgcctgaagatatggggtgagcttccttatttggttgagcatcgggtcgatgtcggcgatgaggtcgcgctgcggcgggaagccgggcagggatgccagttcgatgactcccagcgagccgtttgcggccgagtcctggtcggctgccgcgtttgcgtcgttttccgcggaatcgtcggattcttcggactcggtgccggtgtgccggaacccttcgtcatcgacttcggggatggcgccgggctgcttggcccaatcgcggatggtggccgtgcacagcagggtgggggtgccgttgatggccacggcgtccgaaccgcacatgccgtgaccgcacgaatagcggaaggccagcgtcgggtcgacggtgcgtttgatggtcagcaggcagtcgagcacggtgtccgaggggcgcgcgggaatcgtgtattcctgcacccactgcttgccgcgcggacgacggcgtgccgccgaatccgagccgccgccgaatggggagcttttcttggcgaacgggctgccgccgcgtgcacgttcggcgcgctcgggtcgcggcgtgaaacgatgcacttgcagggtaaccgtcgtgttgctcgcctcagccatgttctgcctccatgaaacagtgggatgtcaagtccaatatcagccaacctattgtgccacaagccctaggcggcttggtattaccaccagcggatcagtactcgcgcttcttgggtggatagtcggtgatgtgcaccggcttgaaacttgccggaccatcatcggcgaccatcgagtgagcaaggaaatgctcatcgtcgcgttcggggaaatcaagtcgttgcatggatccgcgggattcctgacgggattcggaagcgtgcagcatggcctcggccagttcgattagatgacggacttcccagatggcggtgacctcctgattgaaagcggcggtcttgtcatgggcccgcaaggtatcggcaaccggtgtgatgtcgttgttgatctgagtcaacgccgtatcgatggtctgagcggtgcaacgtacggccagagcctgctccatcactgatccgagttgggccatgagctgataaggattggcggtgggcccgccatcgtctgaatcgtccatcggtccggcgagcagttcgtcaagctctgccttgcgggaatcggcagcctgatcggcggcatcggtcagcatgtcatcggtcgaatcatcggccatgggggagtcaaccgggttctcgacgatgcgtgcggccatcgtctgaccagcacgtgtaccgaacaggcaggcgtcgagcagagaattgccgcccagacgattcgcaccatgtacggagacacaagagcattcgccagcggagaacagtccatcgactacctgcacggcaccgtcggcccaacggtacacctcgccattggtggtgatggggatgccgcccatcgtgtaatgcgcagtgggcttgataggcaccaggtccttggccggatcgaggttcgcgtactgctcgatggtttcgaccacctgcggtagcacttccttcatacgttcggggtcgatgccggtcatgtccagccagacgcagtccttcggaccatccgggtccttcgggtcggcgacgccgcggccggcgtcgatctccgccatgatggagcgggagaccacgtctcgcgcggccagatccctatgctccggggcgtagcgttccataaacggctcaccgtcggcgttcctcaggatgccgccctcggcgcgggccgcctcggacagcaggatgccggtgtgcgcgagcccggtggggtggaactgcacaaattcgatgtcctccagctgcaggccggcggccaaggccaatgccatgccgtcgccggtcaggtcccaggaattcgatgtggtatggaacagtcggcccgcgccaccggtggcaagaagcacgttgcgcgcgtggatggcctgaatcttgcccgaatgcgtgtcaaatgccacgatgccggccgcctgcttgccgtcgtcggcgagcaccaggtcggtcacataccattcctcggcgaactcgacgccggcggccacgcactgctgccacaaggtgtgcagaatctggtggccgatgcggtcggccgcataggcggcgcgcttgaccggggcaccgccgaactcgcgcgtgtggccgccgaaccggcgctgggcgatatgcccgtcatcggtacgggagaaggccacgccctgacgctccagattgatcacggtctgcggcgcgtattcggcgagcagtttggccgcgtcctggtcgacgagccagtcgccgcccttgatggtgtcgtagtaatgccagtgccagtcatcggactccacattgcccaggctcgcggcgatgccgccctcggccgaaccggtgtgcgaacgcagcggctgcagtttggagaccacgaggatcttcgggtccacgccttgttccttgagctcggtgattttgggggagcgcagcagtcccaacgccgccgacaggccggccgctccggcgccgacgatcaccgcatcatacatatcttccaaacgtttcggactcatgggttcgattctcgcacacccgccgaacagtcttcgagccgtgtcatgaaagccgattagccgacacggctgctcagcttgagtatgccggcatcccgctcgatcactcccttcagctccaatgcgccgagtagctcaagtatggtgccgatattgggaatctcgtcgggtaccgtctctcgcgccacacgcaatagtgcgtccggggtgacgatgagatgtcgtttacggcattcacgaatcaatgccactaatgtgcgttccatttccggcagcttggcgataatgatacgttgttgggcttccttctcgggatcgagcttcggcttgacacgaagatccggcatctgatgcgacgagggcggctcttcacccttgctcttgttggcaccggcctcggtagttgcgctcgccggcccatccttggattgaacgagtgtaggctgagtatgcttggtcctaagacgtttcgaatgacctgaatcttgtgacgactcctgtgacgccgatgattccgaggatgctggcgataacggagtcgttgccggcacttccatggcctcctcgttttcggacgagtcctgacctgtggatttcggtatgcctgggcatgccgccataacgggcttatgccgttcatggcatatatcctcagtggatgtggcggcacacagaatcatcgcccggtggtcgccgatcatcttattgcacccggcgttgcaaggctgattgatgtcaccgggaaccgcatacacttcgcgcagcaattcgcatgcccatcccgcggtgttgagcgctccggaacgcaaccgggcttgcgtcacaatcaatgtggaagacatggccgcgataatgcggttgcggagtagaaaacgacgggcttcgggaatcgtccctgggcacagttcactgatcagtgcaccaccctgcgcctcgatacgttcgaacagcgtgcggttacgcatcggtccgatatggttgagcccgccggcgaatacggcaacggttctgcccacattggcgggcattctgccgtgcagcgcattcaacgctccccaatgtgccgccgcatccgtgcccattgcgcctccggacacgaccagatgcccggcaacgactgcctgttcggctacggtgtgtgccacataccggccgtattcggtcacgtcccgtgaaccgacgatgccgaccggtttggcgcaactggtcaatgcgcgtggatcgcctttgatccacaaacacagcggtggcgcccaatcggagcgaatggacaggtcggccaactgcgagggccaacatggatggccggggccgataatccattgcgtgccatccatagtgaaccagtcgcccagttggatgatgtcttgcgagggcaggtccatcatgcggttatgccagccggccagtgcattgcggaaggagcacatcgcattcgccgacgccttgcggccccatcgggtgaggccatccacgaacatgcggtcaatgcgtgacagcgccgggccgcagattccagatggctggcttggatgggattgcgccaacgcgtgccagagggattcggcgctttccgcgcctttgagcgcggcgtacatcatcacatccgccccatcaagacagaacgtgagcgcggcgcggtacaacgtatccgtgggaggcatgggaatggtgcgcgaaacagcgaggcccgtatcggtgtgatccacactgcctgcggtgccgccagattgtcggatatcagtagcgttactcatgtcatcctcgttctcatttcgatgccctgatggacgtcctgctcggtggggga

SEQ ID NO: 2029 - DNA, 12607 bp, Unknown
  R17_18m  MAG No. k141_38630
ataccacctcgatggtgcgttgtttacgggagggggagacgcggcgaatgtagccgttgtctttcagggctttgtcaatggcctgccgggctgcctccgaaatatccgccttgccgttcagggctttggacacggtggccagtgagtagccagtctgtttggcgatgtctgcaagtttgaccttgttctcgccgttgcttttgcgctgttctgccgacgccatcattgaccgccttcatcagagaatgttggtatcagtatattcgaaactttcgtaaagtcaatttgacgataaagaatggtatgtatagataaaaaaggttggaatttcaacgattttgatagtaaaaaagccgatataaatttcgtttgaccgtcaaactaaggctctttatgataaaggtatcgaaaacataaagcgagttttcggtaaagttgaagaaggctgatggggtaggtgaaacggcgaagtttcactgaaaacatcattaattaccagctgttagatatgtaactggctgatatacctttcgaaactttcgtaaatcgcggatcggtttcatgctggtcaagaacaataaggagacgacaatgaagttcaagtccgtggccgccgcacttctggcggcggtaacctgtgtcagcatggccgcttgcgggagcggcagcgacacgaacgccgatggcaaggtggaaatcaccatgtggcacaactccaccactggcgacggcaaggcatactgggaatccgccgccaaggcgttcgagaaggaaaacccgaacgttaccatcaagatcgaagccattcagaacgaggatatggacggcaagctgcagaccgctctgcaggacccgaattccgcccccgatatctttatggcgcgtggtggccagaagctacgtgatgtggtcgaagctgggcaagccatggacctgaccgacaagatctccgacaccgtcaagaaccagatggccactgctgaagccaccggcaccatcgatggcaagatctacagcgtgcagcagtcagtgcttcccggcggcatctggtattccaaggatctgttcgagaaggccggtattactgaaactccgaagacctgggatgagttcaagaccgtggtgcagaagctgaaggacgccggcatcacgccgattgccgtaggcggtaaggacgcctggccggccgcccactggtggtactggttcgcactgcgcgaatgctctgctgacaccttcgacaaggcccagtccgataaggacttcagcgataagtgctggacccgtaccggtgatgatgtgcaggcgctgctcgacctcgatgccttcaacgatggcttcctgaccactccggcccagcagggcgcaagctcctccgccggcctgctcgccaaccacatggcagctatggaactcatgggcggctgggagcccggcgtgatcaaggacctgactccggacaagaaggacatggccgacctcggctacttcgcattcccgaccatggacggtggcgaaggcgatccaactgccatcatgggtggttccgatggcatggccgtgggcgagtgggcgcctgaagaggctgtggacttcctcaacttcgtctccgagaaggaatggcaggagaagtacgctgaggcgttctccaccatcccggccaacaaggaagcccaggatgtggtgaccaacgaggctctgaagcaggtgctgaccgtctacaacgacgcatcctccgtgtccatgtggctcgacaccgtgttcggtcagaacatcggcaacgcactcaacgaaggcgtggtcaacatgatggccggtcaaggttccgcccaagacatcgtcaagggtgttgaaaccgctgcggccaagggctgattcgctctgacccgaccgtaattcccgggctgcgcgaatgcttgcacagcaacaaccgcggcccaatttgttttcttaggaaggcctcaacaatgtcagtttcagcaggcgcgagggtacagcgccgcacgtcgggcttaagcgacaaggctcgcaaacgtatcgaaatcaccatcctttcgcttcctgccctgatcatgttcctcggattcgtcatcctgccggtgttcatggccggctactacggattcttcaagtggaagggctatggcaagcccaccgtcaacggccagttcatcggttttgaaaactacaagatcattctgaccgacccgaacttccagcaggcattggggcacacgctattcgtggtcgtcgcttcgctcgtcatccaggggccgctggccatcctcttcgccctgctgctcaaccagagattcaagggccgcgcactgattcgtaccctgattttcgtgccgtacgtcgtttccgaagtcatcgttggcaccggctggggcctcatcctccagaccacaggcgcattgaatgcgctactcaagaaaataggacttggcggggcggactggatctccgatccgaaaatcgccatctggacattgatgttcatcatttcgtggaagtacatcggcttcgccgtcatcctgatgattgccggcatgcagtcgattcccgaagacctctatgaagccgcgaaagtggatggtgctggattctggcgtcagcagtggagcatcaccctgccactgctcggccccaccattcgtatctgggcattcatgtcgattatcggttctctccagctgttcgacttggtctacatcatctggggtcagtacgtgtcgtctaccgcaggaacgtccaccatggcaacctacatggtgcgcgaaggtcgactcgccaacaactatggttacggttccgccgtggccgtggtgattttcatcatctcgctggtcattgccttgacctaccagcggttcgtgcttaaccgagatctcgaaggtgcgctcactgacgagagggatgccaagcgtcgtgccaagcgtgcggcgaaggaagcggccaagcttgccaaggtcaatggcaatgccgcagcagttgcaaatgaggtggtttcacaatgacgaccgcagtctccccgtccgtaggcaagggcaagaacaagacctatgatccgtatacactgagaaaatccgcaaagaccccgtggggcaacccggtcgtctacttcttctcactgctgcttgtggcgctgtgcgttggcccggtgctgtacatcattatcggcggcttccgcaccaattcgcagattacgagggacccggccggctggcccgatccatggaactttgagaattacaagacggtgttcacttcgaacatcttctggtcggaactcgtcaactccctgatcgtctccattggcacaatggtgggcgttgtggtgctggccttgatggtgagcttcgtcattgcccgatacgagttcaaattcaacaaactgctgtactcgctgtttgccgccggcatgatgttccccatcaccgtggccatcaccccgttgtatctgctgctgcgcaatctgcacctgatcaactcgcatctgggcattatcctgccccagatagcattcggcctgccacaggccatcatcatcctggtgccattcctcaagtccattcctaaggaactggaagaagcggcagagctggacggctgttctcgcatcggcttcttcggccgtatggtgctgccgttgagctggcccggcgtggccaccgtcggcatcctgagcttcgtgagcagctggaacgcctacatgctgccgctgttcctgctcaacgattccagcaagtacaccttgccgctcggcgtgcagatgttcagctcccagcattcagtcgataccgctcaggtactggccttcacctcgctgtcgatgatccccgcgctgatctgcttcaccattttccagaagaagatcgttggcggcctgaccggtgctgtcaagggctagtcgcagcaaccataaccgtgccgtggaaaggtacatggctctttgggccgattcctttcaacctcttcctttcctcctttccacggcccctttcttttcaatgaggagaagaccatgaagatctccaatcccgtactccccgggttcgatgcggacccctcgatgattcgcgtcggcgacacctactacatcgcaaattccacatttgactggtggccgggagtccgtttgcatgaatcccgcgacatggttcactggaatctgctgcccgggcccttaaaccgcgtttcccagctggatatgaagggcaatccctccggtggcggcatctgggcaccggacctgtcttatgcggacggcaaattctggcttatctataccgacgtgaaaatcgtcaacggcgcgttcaaggattgcgcgaactatctggttaccgccgacgacattcgtggtccgtggagcgatccgattcgggtcaatggcgtcggattcgacgccagcctattccatgataccgatggacgcaagtatctggtgcagcaaacctgggacttccgtgaatatcatcatccgttcgacggcatcaccttgactgaattcgatgtcaaaaccatgcaattgaagccggaaacagcgcgcaccatctggcgcggcaccgatgtgaaattggtcgaaggaccgcacctctacgccatcaatggctggtactacctgttttgtgcggaaggcggcacccaatacgagcaccaggagtccgtggcccgttcgcgtaccttgggtgagctttcattcgaaagcatgccgagcaatccgttcctctccaacttcgatacccccggcacctacctgcaaaaacaggggcatggggcgctcgtggatacgcctagcggcgaatggtattacgcttcgctgtgcggcaggccctggcggcacgagaacgagccggctcatggtgtgcgcggctggtgcacgctcggccgagagacttcgatccagaaggtcgagtgggatggcgacggttggccgtacgtggtcggcggccatgggggagagcgttacgtcgaagccccagccgacgccatcgcaaccgaggcccctacgaatcatagtcagcatgacgagttcgaatcaaacaaactcgacctcaactggaacaccctgcgcgtaccattcaccgagaccatgggccgcgtgggcggcggctcgctgaccttgcgtggtcaagggtcgctggcaaacctgtttgaactgtcgctggtaggacgccgttggcaggcgttcgatttcaacgccgaaaccaaggtgacattcgatccaagcaactacatgcagatggccggcctgaccaacttctacaaccacctgtgctggtcatgggcattcatcacctgggacgagaagcgaggacagcgcgtaatcgaagtcgcccagaacgatttcgatacgtacacgtcgttcctcaaagacacagccatcgccattcctgatgacatcgaatccgtatggttgcgaaccaaagtgcgtacgcgtacctacacctacgagtattcgttcgatggcaagacatggcatgagattccggtgacgctggacgccgccgtgctctccgatgatcgtgtggcccaacgttatggcggattctttaccggcgcgttcgtcgggttggtggccgtggacctttccggatacggcaaagaagccattttcagccatttcgattacatggaaatatgatgacgccaggcggctttcctgataatcagggaaagtcgcctgactattcggtactggggaatgaaaggcgacacttgtggcaagcgacaatgaacattgcggcgaccgtggccgcgaatgtaccataaccgtctccaacccggtgttgcgtggcatgtacccggacccgtcctggatatgggatacgacgcgcgaggaaatcgtgctggtcaactcctcgtttgaattggtgccggggttgcccattcatacgacccgtgatcttgtgacgtggacgcgcacggcgaatgcggtggatgaggcgatgtctcatcggctgctcattgatggcgtcgaggattccggcggcctgtacgcgccgaccattcgccgtatcggcgggcgatatgtgatcgtatgcaccgtggcccgcgtggatgaggtgaaggcgctcgctgcgggatgctcgcagaaggatattgataactgccgtgacgcccaaggcaatttcgtcatcgaggccgatgagttgaccggaccatggcgcggcccgtactgggtggccggggccgaaggcattgatccggacatctttgaagacggcgatggcacagtgtggtggacgcaaacgcgcccggcattacacccgcagtgggatggtcaaaccgagatctggacgcagcccatcgccccaggcgcgtggacgttgcaagaccataaaaccgtgatttggcgcggctatggcatggatgcggtatgggctgaagggccgcatttgtaccgggtgggcgattacctctacctgatgaccgccgagggcggcaccagcttcgagcacagtgagatgataatgcgcacgcacgcaccgcgcggattcgcggcggcgctcgccggttttgagaagaaccttgctgcgcaagatatctggattgagctggcgcgtgacggtgaacgaagcgtggtgggccgcgatgaccggctgtttgaggcttgcaaacgcaatccgatcctcacacaccgtcatttgggagcgggggagccggtccaatgcgttgggcacgccgatctgctgctgcatccgaccgtcggctggctgctcgtgtgtcttggcgtacgcgagactccgggcgaggaacccggagaaacgttcagctactgtggccgggaaacgttcgtggcaccggtcgtatggcagcacaatccggtctcgtggaagctggacggtggggagccgaataagcgtatcgatatcgacgatcccggttggccggtcgtggctccggggcttggccggcttcccgagaagttggtcgtggacgttgacgaggatggattgccatgtgcagtgaggggtgtggattctgcggggtgtgattgcgctgctggtaataatgccgcatgccctgctgagctcatccagctcgacgatacccgcctagtcggcgttcgaggccgtgacgattaccggttcctgcgtgtcgacgggcaggaatatgccgcgttcacccggcccgaatacacgatgatgatacatcaggattccacccatgctgtcatggtcatggcggaagcggaatccggccaattgacggccgaaatcaccgataggggagataagcggtgccgtgcgcttggagcgcttggagccaacgaatggttcggattgcgcttgcatggcaatcgtttggaattccttgccgggcagcctgcatctgacagcattgatgagggaacaatgcctgatattgcactaattgcgcacgcggacgttacttatgctcgtatcatggcagattgtgatgcgcgattcctcagtaccgaatgggccggcggattcgtgggttgcctgatcggcgtaaaacggcggtaatggtctcagcccgctctacaatattgtgcaatcatattgtttaatcgttaaacaaatgcaagggggcaatcgatggcgcacgatctcgaacaactcaagcaagatcacccggatgtggcgaaactgttcgccgatgactggttgcagtaccgtaagtcggagattttgccggaacttacgcgcgaggcgcagtccacgtgcgatcgcatcaatcgcatctactttgaagacaccgccgaagctgagcgactgttccgcgaactcgtgcccgaggccggcgagggcgtggacttccgcccgccaatccggcttgattacgggctgggcctgaaaatcggagaccgtacgttcatcaacatggacctgctgattgtgggcggcggcccgatctccatcggctccgattgcctgatcggcccgcgcgtgagcatctatacgccaaaccacgccatcgcccgcaagcctcgactggaaggctggcagcacaacgccgacgtgaccatcggcaacaatgtgtggctgggcggcaatgtggtgatctgccccggcgtcaccatcggagacaactcgattatcggtgcgggcgcagtcgtcacccacgatattcccgccgattccatcgccgtgggcaatccctgccatgtgattgccgaagtcccggatgactggactcctgaagagcgggccgctgccgagggtcggtaggtttgctgctctgaccaactgttacggcgaaaccgggatacaggagagaaaggaacaatgcaatgacgcaatatcatgtttccgcgcaggcggcgaagacgaacggcgccggcagcgcggccgacccgtttctgaccatcggccaagcggcggccatcgcccgagccggcgatgaggtggttgtgcatgccggcacctatcgggaatctgtcgacccccgattcggcggcgagagcgccacgaaccgcatcgtctatcgtgcggccgcgggcgaaccgcgcccggtaatcaccggctccgaacgtatcgacacatggcagcccgaaggtgatggcgtgtggaaagccgtaatcctgaacgcattcttcaacggatacaacccgtacgtggaaaccgtattcggcgattggaccgtatacccggacccaaaggtcgaggtacgccacctgggcgatgtgtatctgaatggcaaatccttctacgaagtcgcctcgctggacaaggtgcgcaacccacagcgttgggataccggccgtgacgccgccaccgattccatcgtgccgctgattgatccggataccaccgtgaacgtgtggtgctgtgcggtcgatgatgaggccacaaccatttgggccaatttccatgaagccgacccgaatgcggaacttaccgaaatcaacgtgcgcgagacctgtttctacccgagccgcccgttcgtcaattacattacggtctccggctttgaaatggcgcaggcggcctgcccctacacgccgccgactgccgatcaggtcgggctggtgggcccgcattggtcccgcgggtggattatcgagaacaatcgcattcatgacgcaaaatgttcggcgatctcgctgggcaaggagatctccaccggcgacaacgaatcgacgcgcactcatcgcaagtccgggtaccaataccaaaaagaggccgtctacaaggcgctgcatgccggttgggagaaaggcgtagtcggcgggcacgtggtgcgcggcaacgtaatctacgactgcggccagaatggtgtggttggtcatatgggctgcgccttctctctgattgaaggcaaccacatataccacatcggcaccaaacgcgagttcttcggctgggaagtggccgccattaaaatgcacgcagccgtcgacgcggtggtgcgcggcaaccgggtgcatgattcggtgctgggcatgtggcttgattggcaggcgcagggcaccgtggtggattcgaacgtgttctaccgcaacacgcgagatgtgatgaccgaggtgacccacgggccgattacgtttatgaacaacgtgtttgcctctgagttcagtttcgacgactatgcgcaaggcgcggcgttcgtcaacaatctgttcgccggtcgcattcgtcacaccgccgtcttggaccgatccacgccataccatttcccgcacgtcaccgatgtggccggcgaggcattcgtctacggtggcgatgatcggtacatcaacaacctgttcttggctgtgggcgattccgccaaaccgttgcgtaccgcggatgccgccggtgcggccggtatggcggaagccggaaccgcgttctttgacggctatccgtgctcgcttgcggagtatgaacagctgattgaagaggccggccttggcgatgaggagttgtatcgcagcgtgaagcagccggtattgctggcttcgaacgcctatgtttcgggcgcgaaggccgcttccagcgaagccgaggctgtggtgagtgatgacggctcttcgttggcattgcgcgaaaccgatgatgagctatggatgaccatctcgttgcccgaatcgattcggtcggcgactggaccggtgatctccactgctgatcttggccagccgcgcatcgttgaggagtatttcgaaaatcctgatggttcgccgattatcgtggaccgggatgtcaccggtgccgtgcgcggcgagcgttcggcccgaggcccgttggcggaatatgacgatagggaagtacttatctggtcgaaatgacggaatctgcggtttacggtttgcagcgcgacatcatgatctggttgctggcctgttgaatggccttggcggggtcaatctgccagtgtttggcaggttggcttcgctgaggggtgttgtgtggggtcgttttgccagtgtttggcaggtcggccccgctgagaggtgctgttggagccgggccgccaatgtttggcaaatcagcccttttcggtttgcattggtaacaaattcgatatatggttaaatcaacgaactaaatattgtaagtccatgcgtacctacgcaacgtcaatggagatactgctatgcgcgcacatcgtattttgctgctctcgctctgcctgttggccgtggcctatgccgtcctgctgtttgttgcgccggccgccgcgccaatcggcatcgcactgaccgccgccggtctggtgctggtttcgacacgctatgcgtggcgtgccaagttcctcgcgttattcaacgaagcgtgattgatgcatcacggtgattgactggttcggttcgtcctaggactcccatgcaattcccggccaattcgcctgtcgcattatgtatcgtgcggttatatggagtcatggccgcaaggcctgacaattgaatcttcatcctctcttctcctttgaagcccggcccgccgctgggctttttctttggtcggcatgtcggggcagtgactggtatttttgtgaccgatctcatggcttcagtttcggcgtgtcgttatttccgacgaatcgtatcgataaaattcatgtttcgtagggtctataaaaatgccggaaaatcagcgttgttaccgctcacatttagttaatcgaatgaatcaagtatgccataatccgctcagttgtggggaaaataggcgatatcaaattgttaaatcaaaaaactaatggtatatttttatgcaggttcggcaatggttgcctgaccaaaaggaagaggaaacaagttcctatcaatgtcgaaaggaatccccatgaataagtggaccaaggtgcttggtgtgggtgccgcgaccgccatgttcatcccgctggccgcctgtggcggtagccgtggcacgaccactgccggtggcaacggcggtagctccgacaccgtcaaggtcggtatttcgatgcctgagcagatgctcgagcgttggaagatcgatggcgagaacctgaagaagcagcttgaaggctacggctacgacgtcaccctgcagtatgcagatggcaagaccgatctgcagacctcccagattcagaacatggccaacaacggcatgaactacgtagtcatcgcatccatcgacggcactgcgaccggagctgctgccgagcaggtcgcctccaacggcggcaaggtcattgcctacgaccgtctgatcatgaacaccgacgccgttgactactacgccaccttctccttggaggatgtcggcaagatgcagggcgagtacatcgagcagaagctcggtctgaaggatggcaagaagggcccgttcaacgtcgaactcatggccggttccccgaccgataacaatgcaggctactacttcaagggcgcttgggacgtgctcggaccgtacttcaagtccggcgtgctgcagtccaagtccggcaaggttccttcctctgctgatgattggcagtccatcggtatcgataactgggatcgtcagaaggcccagaacgagatggagaaccgcatcaactccttctacaacgatggcaccaagcttgacgccgtgctcgcccagaacgacgccgaggcaaccggtacctacaacaccgtagaggccgctggctgggactactacccgatcatcaccggtcaggacgccgagaaggccaacgtgcaggccatcgtgcagggcaagcagtccatgaccgtctacaaggacacccgcgagctggccaaggccaccgccgaaatgatcaaggacatggtcgatggcaaggatccgaaggctcctgacaccttcaacaacggcactaaggatgttccgtcccagctgctgaccccggtcaccgtggacaaggacaacctcaaggaaatcctcgtcgacggcggctacatctccgccaaggatgctggcctgtgatccgcaggatcgctgattcgattcatccaacggcctaacggctaacagataagggggcgccgcgctgcgtggttgcggtacggtgccttcatcatgcacaggggcattactatcggaggaggtaactgtggctacgaacggtgacgtgattttggagatgcgtcatatcgtgaagcgtttcggcccggtcaccgcgttgaacgatgtgaatatcatggtcaagaggggccagatgttctcgatctgcggtg

SEQ ID NO: 2030 - DNA, 7214 bp, Unknown
  R17_18m  MAG No. k141_40331
aatcaggcgaggaatgaactggcaatcattgactataaagaagtagtacaaacacgctcttgagttctcaaaccaccaccactcacccacctcgcagctccccggaggagaaccactcgctgagcggcagcaaggaaataacttacacgcattcacggactcgcgcaaatcgggtatgaaaaggcacgccagaatcgttgcaacgacggcgttctatcggcgtgtcgaaatcagcttgaatcacgccgttatcatcaggatacgccggctttttatgggctcacgtaacgaaatcagatgttcaccggcgtgtcgcaacaattcattccacgttcaactcccctcagtccgatcacgcggacagctcacccgcaattacggacgagcaaagctcgcgcccttatggctcgactatcgtctcgccttcgtctaaaaaaacagtccaccggactgttttttaaacgacccagcatcaaagagggaagccaaaaggggattagaaggtcaggcgcatttggtgccagaccacgtcaccgtgagtggaatcggaaatgccctcgtcctcatatccgaatcgcgcatagaatccgaccaaccgatctttgcaggtgagcaccaggcctttacggccggctgcacgagtgtcttcaatgactttcctcatgagtgtactggcgcaaccgcgatgctgatacttcggcgcagtatccacgccgaaaatcatttgccagtcaccttgagggttgtgctgcgcggcatcctcgtacatgtcatcggtcaagtcgcgccgatcggtcacaaaaccgttgatgaacgccatgacgatctcgccatcaatcaatagccagaaacattccggataggtctcgattcgggcgcgcagggacgagcggtcggcggcctcggcggccgggaagcattcgaattccatggcggccagcgcgtccagatcgtcgatggtggcgtggcggattaactggggatcagaatcagtcatgtttttgtctttctcttaacactccgttgtgagcaactcccccagtcacgcttcgcgtgctggctcccctcaccttgaggggagccggatggatgtcagattacgtggtattcgcgtagcagggtggcaatatcggtgccgtcgagtttcttgagcaccttcttgaccacggccttttcaatgaagttgagcttcatatcggtgaccggtgcaccgtcacgcaatttgacggtggcgttgagcaggttgcgcacgtcatagacactgccccacacttcaggcacgccgcggtccacgccgagcaacgtgtagacagcttccataccggtgcgcatcgagtactcggtggtgaagatcgtgtcacgcggggtctcggcgaactggccaaggaatgcgaagttcacggcaccatcgggcaccacgtccgggcggtcgccggccgcgcgcggcatgaagaacgcggtgatgtacggcatcatgaccggcacggtgttggcgtgatgcttggcgagcgcctcgatcttgtcggtcggcacgcccatgtggtaaagccactcctcgcaaatctcttcaccggtgcattcggtcatcggcttcttcacatagttgccgggcttgtccgggaacaggccgtagacccatacgcacagctggtccttgggctggtcgcggaactgctgctggcggttcagggtccaactcatgagccagttggagtcctgcacagtgacgatgccgccggtgacgaccttgccggagaacgggtcgcgcttgcaaatcttctggatgtacggcggaatctcgccgtccagggtggtgatggtggcgctcatccacttggtggcattcggatcggagcagaacttctccggatggccaaagctcgggtcctggtcggcgatacgcttccacatatcccagccgccgccgggcttcaggtctgggttccatgcggcgggcgagttctgggaacccatggtggagttctccacgcaaccgccgttggtgatgaacaccagatcgttctcggtcaggtcaatggaggatttatcaccctcgtgatccacgtcgatgcgcacggcaagcttcttggtgggcgtgctggcagggttgcgcttgaagaaaccggaggtggcctgaatcttttggatggtgtcctggcctacgccggtgtgctcgcgcttggggccggctcccccgccaatcgcgaattccacgttctcaaccttggtgttgtagcggaattcgacgccatgcgattccagatacttgaccatcggcagaatcatcgactcgtactggttgtagcgggtgaaacgcagcgcggaaaagtccggcagtccgccgatgtgatgaatgtagcgtttgatgtacagcttcatttccagcgcggagtgccagttctcgaaggcgaacatggtgcgccagtacagccagaagttggagttcagcacctcatcatcgaagaaatcggtgatcggcttgtcatacaggtcttcgtccggggtgaagaacagcttcatgatttccatcgaagccttgtcggacaggccgaacttgcccttgagccccgcgtccttgccgaggtccttggtggcgcggcacagcgagtagttcgggtcctccttgttgagccagtagtactcgtcgagtacgctgacgccctcggtttcgatggaggggatcgagcggaacagatcccacatgacctcgaaatgattgtccatctcgcggccgccacgcatcacatagccgaggccgggaatatcaagaccgtcacaggcgccgccgggtaccgggtccttctcaaggatgtggatgttctcgccaggcatctgaccatcacgcaccagataacaggctgcagacaatgccgccagtccggtaccgatgatgtatgcatgcttgttgtccacgtcggccggcttcttcgggcgtgcgaaagcctcataattgccgctgctgtagtacatattccgcctccttggggtagagttgacgcttcgtcaactcttcttgaatagacatcatgtcacattattgccgaacacgccataggcaacgttcggcgttctgccgtattcgccaataccttgcgtctacggttttcgaggcctgtgttggctgttggctcataactattgaaggcatacaggcatactgaggatgctgggtgcttcaccgaaccggatgattgataaggtcccgctcaatccatgccatgaccaaatcggcaagtcggtttacctccgcttcggtgagttcacggcctttgggcagatgatgccatttttcgatgcatccgcggcagcatgtggcggtagcatgctgagcggtgaataccggatggccgcgccatggcgtctgcctgccgtcgttcttcggttcggctgcgcctatgcggtctcgcaacatttctcgcgcatgacgatcgatggtcgccttgcctttggtgcgggcataggctcgttctttgtcggtcaaagcgaatttggcgcggaactgcgaatgagacagccgttccagcatcgcggcaatccattgtcgctcgtcatcgttgttaccagtatccgccatctccatgcccatacgttccacaatagtcgcgcacatcgtatggtggcacatgccttagctccctctgatgaaggagtccccagcaaagccaggtgagggagaggccaggggcgaaacccgccaatcaggcggcaggcaagcagctggggccaaacagaatcttgatctcagcaaacaacgaagtatcccgcttgacgcggaaacgatcgccaaacgtgagcacctgagcgttacccttctcatccagcaccgcaagatgtacttcgcagtaaccaggatgattagcgagcacccgaccgagttgcatcatgcgttggcgctccaacgccaccggcggcagcgtgatgaccaacggacgttcatcctcggcttccaaggtcggaatctgcatttccgtggctctcagagaaacggtttcgtcgcgcaactccacttggccacgaatctgtacgatggcgtccacggcgagttcggcggcggccgcttcatagaccttgccgaagaacatgcattggatggagctttccatgtcttcgatggtcacgatggcccaggggttgcccttcttggatacgcgccggtccacattggtgaccaaaccagccaacgtgacctgctgtccttcacccatcgttttggctcgatcaaccagatgcgcgatggacatttcacgcaaggacgcgagaatcgactgcataccggagagcggatggtcagacacatacaggcccaacatttcgcgttcgaagttaagcttggtcttcttgtcccattcctcaagatcgggtacggtcacggaagcgtcgcccatggcctccgctcccccatcctcggcatcggagaacaaatcgaactggccctccgcctgtttgcgcttcagactcaccaccgagtcgatggcggcctcgtgcacggtgaacagcgcgcgacggttcgggtcaatcgagtcgaaggcaccagccttgatcaacgattcgaccaatcgccggttcagcgcggtcaggggcacgcggcggatgaagtccatgaagttcacgaacttgccgcgcgggccttcgcgttcggcgatgatatcggccacggccttgtcacccacgttacggatggcaccaagaccgaatcggacgacgtcgccgactgccgagtactcgtacaccgattcgttgacgtccggcgagagcacctggatgcccatgcggcgggcctcgcccaagtacagtgcggtcttgtctttgttggtggcggcaccttgcaacagggcggccatgaattcgaccgggtagtgcgtcttcagatatgcggtccagtaggagatcagaccgtatgcggcggagtgcgctttgttgaaagcgtagccggagaacggcaccagaatatcccacacggcctgggaggcctcttcggagtatccatgctccttcataccggcgaagaacggcaccttctccttggccagcacttcgggcttcttcttacccatggctcgacgcagcacgtctgccttgcccagcgaatagccggcgaggattcgggcggcggactgcacctgctcctggtagatgatcagaccataggtctcgtcaagcacctgcttcagaggttcctcaagctcagggtggattggcgtgatcttctgcaggccattcttgcgcttggcgtagttggtgtgcgaatccatactcatcgggcccggtcggtacagagcgataagtgcggaaatatcgttgaagttatcgggcttcagggttttcagcagtgaacgcatgccgtcggaatcgagctggaacacgccgagcgtgtctcctcgggacatgagtttgtaggtttcggcgtcatcgagcggaatcttggtgtagtcgatggcgggtttgccgttggcctcgatgttcttcagggtgtcgtggatgatcgtcaagttggacaggccaaggaagtccatcttgaccaaccccaacgtttcgcacgtgtggtattcgaaggtggtggtgatggtgccatcggtgcgttccagcaacggcgaggtgtcggtgatgggcgcgctacccatgatggtggcgcaggcatgtacaccggtctgtcggatcaggccttcgatacccttggcttcttcggtgatgcgcttggcgtccgggtcggaatcgtagagttctcggaattccctggcctcggcgtagcgtttggctgtcgggtcgaagatgtcatgcaggctgatatccttgccgccggtggccgcgggaggcagcgccttggtgactttttcaccgaccgagaactcgtagcccatgatgcgggcggagtccttcaaggcctgcttggttttgatggtgccatagatcacgcactgggcgaccttatcggtgccgtatttttcgccgcagtattcgatgactcgcgcacgaccttcagggtcgaagtcgacatcgatatcaggaaggctcactcgctcagggttcaggaacctctcgaaaatcaggccatgcttgagcggatcgagctcggtaatgcccatggaataggcgaccatggcgcctgcggccgagccacggcccggacccaccataatgccgtggtccttggcccactgaatgtagtcggcgaccacgaggaagtatccgcagaactgcatctggcagatcacaccacattcgtagtcggcctgcttcaatacgtcgagcggcgggttgccgtcgtaacgcttctccagaccttcctcgacttttttaaggaacagggaggtctcatcccagccttcggggcaggggaatttcggcatgaacgcgccgtcttcgtggtcgtcgaacatcacgttgcagcgttcggcgatggcgagggtgttgtcgcaggcgtccggatggtccttgaacagttcgcgcatctcttcggcggttttgatgtagtagccggtgccgtcgaatttgaatcggtccggatcgtcaagacgggaaccggagttgatgcagagcatggcgtcctgtgcctgggcatcttcggcgtgtacgtagtgggaatcgttagtggccagcagtggtgcgttgagtttcttggctatggtcagcaggtcaccggtcacctgagtttcgatgggcagaccgtgatccatgagttcgatgaagaagttgtctttgccgaagatgtcctggaattcgccagcggcgcgcagggcctcatcgaactgaccgagacgcagacgggtctggatgatgcccgaggggcagccggaggatgcgatcacgcctttggaataggtggcgagcacctccttatccatacgcggataacgcatgacgcgaccttcgaggttggccacggacgaagctttgatgaggttgaccaggccttcgtcgttttcagcccacatggtcaagtgggtgataagaccaccaccggagacgtcgtcacggcgctgggcttcagtgccccaatgcacgcgggatttgtcttgacgtgcggtttccggggtcacataagcttcgatgccgatgatgggcttgacgccattggccacgcagttggtgtacatctcgtaggcgccatgcatgttgccatggtcggtgatgccgaccgcaggcatgccaagttcggccgcacgcttggccaaatcagggatcttcgacgcaccatcgagcagcgaatagtgcgt

SEQ ID NO: 2031 - DNA, 13269 bp, Unknown
  R17_18m  MAG No. k141_40425
atccaccccatatctgctatatcgccaaagacaatgaagacgccgccgcatatcaccacgtccaaagcccagagcaggccaaccaccaacagaaaaaggtaccgacctacaacttgtgcagtgcgtgaaacaggaatcagccctcgcatggcactgtgccctgcagattcctcggatgacgcaggccccaatgcactcatacatgccatcaccgatgccagacctccgagtccgcccatcagaccactggcaacgtgttcatcgacgtgggtcgatatcatcaccagcgataccacgatagacagcaccgggaaaaccagcagaaataccatattcgctacgctaaacagacctgtcccaacacaatcgaatcgacattgctttactacggatttccagctcatcgtcaccattcccttgaagcaaatatgcgagaggcaattacatacgagattccatatgccacaaccgtcgttgccaataccgcaataaccagccacaatcgttgcgcgatgatggcattcgcggcatgggccaatcctttggtcaccgaaacaggcaaaatagatagcagtatggatccagccaatacaacgacataaatcaccatcatcgtgacttgaagaccgcctagtttggtccacagataacccgtgggcacgataagcgcgaccatcagcgcggtgcagaaacctcccaacggagccgcccacagattgcccgcgaatgaccaatccggattgaccagcacttgcaacccgtcaatcagaacaatcatcgctatcgacaatacggaaatcaccaatccaaccacatatcgcgcggccacctgactcttcctcgaagccggaataatgccacgaagtcgatatccgttctgtaagtcagcaaccgccatggtcagcacccacatggcgcaggtgaataccgtcatgatgacacccatgcgatagccgaagccatcaccataaacttcaccttgaaagatgacggagaacaacggtgccaacaacaacgagaacacagtccgttcgccgacgcacaggtaggccatatcgacgcgcaatgcagtggtcaatgcatgttgccgagaccgcgacaccctcagtattgcctccatggccgctcacctcccgctcaagtcacgattggaatcatgggcattggtcagtcgaatgatgtcatcaatggaagccgattcaacgacaagccccgaaaccaccgacgcaacagcatcaagcctgtctgaccggaccagcgcatcgaatccggtggcatacgtatgtgagcccagcaccacgtccgcaggcagttgtgccagttcgtctggaccgcccttaatcaggcggaacgattcctcaaactcgtctttcggaccggtgtagtagagacggccatcggtgatgtaggtaatgaagtcagcagcacgttcgaggtcggcagtgatatgggtgctgaacagtaccgaatgttcgccatcctcaatgtaggcatgcaggatatccatgagttcgtcgcgggcaagcacatcgagtccgctggtcggctcgtcgagaatcagcagtttggcgtcatggctcaatgcgatggcgagcatcagcttcatctgcatgccgcgggaaagatccttgatatgtttcttgccgttctgtgcaccaccaagaccgaaagtatccagatacttgcgatagcatccaccgtcccatgatggatacagtggcgcgacaatacgttcaatgttcttgacttgccactgttcatgcatgtagctgaagtcgaacaccacgccgagttgttctttgacgggctcctcgttggcgatgttgtcgaggccgagcacgtgaatcgaaccggcgtcgcggtggatcatgttgaggatgagtttgatgagggtggatttgccggcgccgttcgggccgatcagtcccatgatgtagcccttgggcaggtcgaaggtcacgtcgtccagcgtgaagccggaatcatagtgtttggtgacgtcggtgacctgcaacgccatcgcgtcggattcggatatggcggtcatggccatggtcctttcttgaggttatttcttgcggtattcctcttcgagcatgcggtccaatgcgtccagcggaatgccggcggctttggcgccccggcttgcctcggccaggctttcgcgaatccgggttttgagctgacgttgcatcagttcgttgcccttgtccatcacgaaagtgcctttgccttggatgttctgcaccacgccctcatcggccagttcgttgtacgccctggtgacggtgagtacggagatgcgcagctccttggcgagtttcctcaaggaaggcagggcctcgcccgccttcaactcgccactgagcaccgccgaatggatttgggttttgatttgctcgtagatgggttcaccggacacggatgagatgatcagtttcacctatgcccctttcgattgtggttgactagcaccccagctgtttagctgttatacaacacagtataactgttctgcttaactgtcaaggtgtgttacataacagctaaacagtgaacaaacaccttgccaacatacagtgtcgaaacatgggccgcgcctacaatggcctcgggaaggggcacctatgccaaacaacgccgttacgccgacagccccgccagcgggggtgtaacttttttatcacagcacgcgcggggcgtcatggaagtcgaagagaacaccgtcggccaggtggcagatttcgggccagtcggaggcggaggaatcgtcgtgcatggcccagaccttcatgccgaccgatttggccgacttcatgccgaccagcaggtcttcgaacaccgtgcagtcgaccggcgcggcgcctaggcgcttggcggcgagcaggtagacgtcgggctggtccttgccgacgtcgttcgcgtcatcgacggagacgatatcgttgaacagatcgaacatgccgacgtggcgtagcgccggctcacgcagatgcgggggcagcgaggtggcgacacccagtttgacaccggaggctttcagatcgcgcagatagtcaagcgcgccgggtttggcttcgaccgtggtggaataggcgacgctggccatgtcgtcccattcctgcatgagctcttcgggcgtgtctgtaaggccgaagcgtgcgatggtgtattcggcgatctggcggaattgcatggcggagactttggtcatgtagtcgggcggcacttcgattccgcgcttgttcaggaagtcgatgtcgacttggtcccagacccccatggagtcaaggagggtgccgtcgaggtcgaatatggcggctttggtcataggacactttccttcaacagttctcgggcgtggtctagggaggcttcggattcgctgccggagagcatgcgggcgatttcgtggacgcgggtttcgccgttgacttcggcgatggtggtgaccacgcccaaatcgtcgtcatcggcatccggcggctccttggtgaccacgaactgcgcgtccgcccacgaggcgacctgcgccaagtgggtgacaacgatgacctgcgcgctgcgggccagccgtgccagacgtttgcccagttcgaccgcggccttgccacccacgccggcgtcaacctcgtcgaagatgaaggtctggtcggcaccgccgcgcgtgtcggcggccaccagctccaaggccaacatcagtcggctcagttcaccgcccgaagcgcttttgcccatcggcaactgcggcgacccctcgaacggcgtaaacaggaacgcgatatcgtcgcgaccatacgggccgagcggatcatcggccttgtctcgcggcgtgacgcgcacttccaaggaggcgcccagcatggcgagcgagccgagttcttcagtgacgcgcgcgcccaagtcggcagcggcagccacgcgcgcggcgctcagcacgtcggcggcggcgagggccgcatcgtacagcgtctgccgttcggattcgagttcggcgaccttttccggcgaggcgtccagatcctccagatcgaacgccgccttgtcccgccaagcgagcacgtcggccaaggtggggccccaccgacgggtgaggtcgccaagctcgtggatacggccgttgatctggtccagatcctccacgctgccttcgtcgcccagctcctggctcagggcgaacaccacgtcacccaaatcggcattgatggattcaagccgatcggcctgctcggcgaacgtgccgccgacgcgaatcgcgcgcaacgaggtcaccgcatgattgatgagttccacggccgaagcgccgtcggcggcatccacatccacctgcgaggcatccagcgcgcccagcgccgaacccacgccttgggcgatgtcggccgcgttttcgatgcgttcgcggcgcgccttcagctcctcgtcctcccccggctgcgggtcggttcggttgatgcggtcgatggattcgcgcaggtagtcggcctgttggcgggcagaggattcctgcgagcgcaggcgttccagccgctcatccatggcggccagcgcatcccacgccttgcggtaggcggccagttcggcttcgtctccggccacccggtccagaaactcgcgttgccgtgcggcggccgcgattttcagctgatcggtctggccatgaatgatgaccagttcgccggcgatggcccccagcaccgaacgcggtacggacttgccgccgagcacggcccgcgaacgtccggaagcgcgtacggtgcgggaaaggaacagttcgccgtcttcggggtcgacgcccgcgtcgtgggctttggccacggccgcggcagcaccggtgagcccgctgtcagaatcgtcagaaccggcatcgtcaccggcatcgttggtgtcgccggaatattcagatgcgacggcatcatccgcgagcgcgaaaatcgcctgggcccaagcctcgtccgccccggccgagacgcgcgaggattcggcggccccaccggagaccagtcggatcgcggagagcagcatggatttgccggcgccggtctcaccggtgatggcggtcatgcctgcggccggcgcaatggcggcttctcgaatcggccccagattgcggatatcgagttcttcgagcatcaggctcctgccttgccgtcacgttcgcccggcttgtcgggatcggtaccagcgacaccagcgtcaccggcaacgccagccgcatacgcggccgccgggaacgtgtgcccgtgatgcagcggctggctcgaggcctcgttgcgcgcgtgctcgcgccagccgaccacgggcagatcgaacttggagaccagacggttggtgaacggcacgccggagagtcgggcgaggcgcaaggtatcgcgcgattcgcgcaccatgacgcgcgtaccctgcggcagggcgcgctgacggcgtccatcgcagcaaatccagccttcggacatggaatcgtccagaatatcgatggtgaaggtcgaaccggagccgatgatcagcggcctggcgaacagggcatgcgcggccaacggaatcaactgcagggccttgacgttcggccacatgaccggaccgcccgcggagaaggcgtaggcggtggaaccggtgggcgtggagacgatgacgccgtccgcgccgaacgagttcatctccacatcgtccacgcggatggacagttcgaccatcttgccccggtcggcgcgttccagcgtgatgtcgttcagcgcccaatcctcaatgggcttggtggtgccaggcagccagacgtccacatgggcgatcatgcgttcgtcgatcgaatagtcgtgggtggcgacccggcggatcgcctcgtcgatctggaagctttcgaattcggccaggaagccgacatgccccatgttcacgccgagaatcggcacctgggtgcagtggacgagttcggcggcgcgcagtatcgtgccgtcgccgcccaggaccacgacgatttcggtgtcgtccgacacgcacggcggctgcacgccgaaatcgggggcctcggtgttgtcgatgatggtgacttcgaaaccggccactcgcagctggctcaccgcctcggccactacggttccggtctgcctgagcctggtatgcgtcaccaccaccgcgttgcgcttggccatggcatcctcctgtcgattcggtcgcactgctcattattctagccgcagacaccgtcatcactcgtacaggtgttcgaaaaatgccgcttcgtggcgcgtcgccgacaacgttccgcagagtcgattaacgtaaggcttcggcatacaatggcatacagccgcgcgatcaccgtacgcgtgccgtgcgcagcgcgatggcatgccgtatgaccatacagcagtatcagttgaggagcttgaggacccatggccaatgacttcgacgaatcctccgccaatgaggaggcctcgaagggcctgtcatggtggtattcggccgatgtactgagccgagacaaaagcgataaaaccgccaagcgcattcgccgcatcagcatcaccgaccgtctgctcaggcacccgggccgtctgtccatggtgtatttcggcgcactgatcatcatcgtcaccggcttgctgctgctgccgatctccacatcggacatcatcttcaccaacttcccggtcgcgttcttcaccgccgtctcggccctgtccacctgcggcattccggtggtgaacaccggcgaatactggtcgacgttcggccaagttgtcatcctattctccatccagttcggcggcctgggcgtcatgaccttcgcctcgatggtggctcttggcgcttcccgcagactcaaggtctcccagcgcatgcttaccgcgaacgaactgggcaccacgaagctttccgaggtcaaaggcgtactcaccgtggtattgggcacctccatcatcgccgaggtgcttaccttcgtgctgctgctgcccgacctgttccgcgtgaaccacggcaatatgggacgtacattgtggcaggcgctgttctacgcggtatcggcctacaacaacaccggtttcacgcctgacgccaccggcctgcatgtgaaccgttggggcgtgggactgccgattctcatcagcgcattcataggaacgctcggcttccccgtggtgctgaatctggtgcagtgcgcacgccgacatctcagcccgaaacgttggacgttgcacaccaaactcactttggtgaccaccgctgtgctggtggccacctcactggcttggttcctgctggtcgagtggggcaataccggcctgttccccgcagacggtcccggcatgaagatgcgccgtgcgatgagcgccgccgtcatgccccgctccgccggtttcgatatttcctgggtgcccgaagtcacgaatgagaccaaggtgttcatgagcatactcatgttcatcggcgcaggctcctcatccaccgccggcggcatccgtgtcaccacgttcgcggtgattctcttgatttgccgcgccgcattcaccggccatcgcgatgtcaccgtgttccgccgccgtatcccccgccgcatccagatgaccgccgtgtccgtgaccacggcctgctttgcgctggttatggtcggtgcgatgatgctgatgttcaccaccggctgcgcgttcgtggacgccgtgttcgaggcctgctcggccttctcgttgggcggttattcggtgggcgtggcaagcgccggcaatccggccagcctgtttattctgtccgccgagatgattgtcggacgacttggcccgttgaccatcgcctactccatcagcagaccgatggctcccgaacctattcgttatccgcaggaaaacattatcgttggctgatcggccattcaatcggcacacagaaatccggcatagagaggaccatcatcatggcagcaaaaccgagcggcaacaaaagcgtgctggtcatcggcctaggccgtttcggcgggtccgtggccgccaccctcgaccagatgggtcaggatgtgctcgccgtggataagaacccggagcttgtggcccgttggtccgcgcatctgcccaccattcaggccgacatgaccgatgtgctggccatcgagcagatcgacgcctcccagttcgacacggccgtcgtggccatcggcgacagcatcgaggcttcggtgatcatcaccggcaacctgctggatgccggcgtttccgatctgtgggccaagtccgtgtcccaggagcatgcgcgcattctgcagcgcatcggcgcccgtcacatcatcaatgcggagaccgatgccggcaagcgcgtgggtcatctggtggccggcaattatctggattacatcgaaatcgacggcccgtacaccgtcgtcaagatccacacgcccctatacgcggtgggtcgcagcatcgaggacgtgcaggtgcacgacaaatacggcgtgaccgtggtgggcctcaaggccccaggcaaggagttccagtacggctccaaggaactggtcatgcatcgcaacgacgaactcatcctcatgggcaagcaggatcagatcgaccacttcatccaaggctaacccccccctaactgcgctcgctataccccctatctgctcacatcgtgaccgatataacccccctcaacatggatgcgctcattattggggcaataagccataaagctgtacgtccatattgagggggctttatcatcatgggcaagcatacgcagaattgcacgttgataggcaaaggagtctacggcaccataggagtggaccaacgttcccgtcttgccgatggcgcgcattttcacaccatgattgtgaccagcaccctcgaggcctcagttatagaaggggacaaactggtcatcaagagtggcattgtgcggtgtgatggtgatattcgcgtatccagcatcagcggcagcggcgacatcgaagtcggcggcgacattatttgcgatgaaataacctttaccggcaaactgcgatgcaacagcgatatcgtttgttccggaaatctgtccgtcaatggctccctaggcacccgtcatattagcggtcagacagtccgcttgaacggcgtgttgaagggtcatgacgtcaacagcagggctctggaagttcatccactgcgcagtacgatgttttctcgttttgatatggatgggtatgaggatggcagcatggttcgccatatcacagccgtcacggttgaagccaaccatctgcaatgccggactttgacggcggactccgccatgctacgcaacggcagtgcggtggaaagcgccacgtgtgccaccgcaataggcatcgaccgtacctccagcgtgctgctggtgaacggagactgccgacgcattcatctcaagacagcgtaaagcaggtattcctcattaccgtgggtgccgatgatgggactatcggcagtggccaccacgtcaagtccgtgctgttcagcacaggcgaccacgtcgtgcaatgcccgctcccgcaatgccggatcttccacgatgccgtttttgccgagtcctgcccgcccgacctcgaactgcggtttgaccagtaacacaatctgcgcaccgggagccgcgatgcgcgcgattaccggaatcacataggtcagggaaataaaggagacgtcggagacgatcatcgccggccggtaaggcaggtcgtcggcctctacttcgcgaatgttgacgccgctcatttcgatgacgtgctcgtcattggcgatgcgcgggtcgagctggccgtggccgacgtcgagcgccacgactttggccgctcccccgcgcaacagtacatcggtgaagccaccggtggaggcaccgatgtccagacattccaagctttccggcccggtaaggccattgccggcaaaggtctcgaacgcgcccaagagtttgtaagcgcctcgggagacgtagtcgtcgcccttatccacggcgagttcgctgtgcccggctttgaccatgaacgatggcttggtgatggtctcgccgtccacgcgcacatgcccggctttgatgagtcgctgcgctttggcccgcgattcgaccagtcccgaagccacgagcatcatgtcgaggcgatcaagtggggtcgagggatcgatatgttgctcggtcatataccttcctttcgacccaccatccaccaacggggtggctcggcatggacccaccatccagcacttcacgtcatcttccgctggcgggagaatgaatctcctctgctagctgcggctgttatcaagctcgtgttgtaacgattccagcacgttgcgataggtctcaagcttgcggtcgttgtcttgttcatcaatatccgcaagttcggggtatcgctcggtgaccggcgcgtgttcgctatccgtaggcataggactatgcctcgatggcgaacaccggtaccgtggcctcgctgagctgtgcgccttggtcggcggcttcccatgcggcgcatacggcggcacgcaggccgtccatactggtggggtcgctgacgtgtacctggccgttttcaaaccaagcgctagccttgcggcattcccaagtaccgctctcgtcgcggaccggctccggttgggcttcgccgagttcacgcagatcaagggcgatgaatgtgggcctcaggtgtgccggagccagcatcagttcggtcgggttggtgacaccggtcagcaccgccagcgaatcatagtcaccgcggttaccggcctcgatatcagtgtcgagtcggtcgccaatggcgatggacgcctccttgggcaccagatcgtggccttcggcggcgttcagttcgcgggcctcatcgtacatgtacgcttccggtttgccagcggaggcgaccggttcgacgccagtggccgtgatcacggcgcgaatcatcgatccgcaaccgggggcgatgcccagttcacgaggaatcgtcaggtcgcggttggtcacgaaatacgtggctccggcctcgaccgcgaacgcggcatcggccatcatctgccaagtcatatccggataccagccctgaataacggcctgcgggcggtcctgaggaccgtccacgatggtcaggccgttgcgggtgacctcatcgcgcaaatgctcggcgcccaatacctgtacgcgcgcgccggcgggcaacgccttggccaccacacgggcggccaccaccgaagaggtgatgacctgccacggctccacgtccaagccgaagcccttgagctggtcggccaccacgtgctggaagcgcgaggagttgttcgtggtgtattcgatggtcatgccggcggcttcggccgcacgaatggaatcggctgcgtattcgaccggattcttgccgcgatacaccacgccgtcgaggtccagcagcgcaagctgataggcctcggcgagcgggcgatcggtgcctttgaggaaacgggtcattacgccgctcactcctcggtttcggtctcggtctcgtcggactcagccggttcaacggcatcgtcagcggactcggaagactcctcggcttcagattcctcagattcttccgatgcatcctcggactcagcattttcgacatcggcctcatcagactcggcatcgccgtcttcagcctcgtcgtcctcatcgccgtattcctgctccggatccggggcgtactgcgcctcgtccggatcgatgccgagcttctcgagcacgtcggagtcgtcggtgatgtcttcgagatcgtggtcaatcaccacgtcgtcgctgttttcgtcaatctcctcgtcggcatactgatcctcaagacggtccagcaggtcattaagctgctcggcttccttgctgcggccggcctcttcaaggaagtactgctcggcctgcacggcacgcatacggtactcacccggaagaccctgagagcggccgacggtatgaaccacttcaatggccttgtcccacatctccaaatcgccaagggcaccggcatacaccaggaacatctcgaccttgggagcgccatgcagctgcttgccctcatcggacagcgccagttccacggccttcttcggttcaccgacaccacgctcgcagtcagcgatgaacggcaggtagtcgaggaagccgttcatacggtaggcggtacggaactcacgcagggacagcttgtagtcgccctgacggtaggccacgaacgcgagcgtctcgcgggcaaagtcgatgcgggaggcctgacgggccacccacttggcgtgttccaaggcaagttcgggatcgctctcctccagcgcgaaagcggcgaggatgtgcagaccaatgttctccgcatgctccttggacaggccgcgcagacgttcgcgctcatccttggacagcatcgaccattccatgcccttgggcatcttgggctcgtcgggacgacggtcggtgtacgggttctgcgaggggaagctcatcgtgccgtcggagttacggcgcggacgcctcatgtattcagagcgcttctcctcacggtactggcgcttctcttcctgcgaaaactcgcggaattcgccgtcacgacggttgttgtcgcggcggtcgtccctgcggaagttgcggcgatcgccatcacggcgatcgtcgtcgcggcggaagttgcgacgctcaccatcacgatggaaatcacggcgatcgttatcccttcggtcatcgcggcggaagtcacgacgatcattgtcacgacggaagtcacgacgctcaccatcgcggtggaagtcacgacgctcaccatcgcggtggaagtcacggcgatcatcgcgacggaaatcacgacgatcgttgtcacggtgctggtagcgcgggttctcgccgttctcgccttcgtgggaacggtagccgccttcgcggcgcggcttgaaaccttcaccgtcacggcgcggaccactgccgcggtaactacccttgtggaagccaccggacttgccgtacgacttgcggtagccgccgtggccctcgccatcaccatcacggcgcggcgcgtaaccctcaccatcctcacgacggcgcggcttgaagccctcgccatcgcggtcgcggcgcggacggaagccgtcgccatcgcggcgcggaccgttgccgcgatagccgcccttgccaccgaaaccagagcgtccgcccttgtggaagtcgccacccttgccgtacgacttgcggtagccgccgtggccctcgccgtcaccatcacggcgcggcgcgtagccttcgccatcctcacgacggcgcggcttgaaaccctcaccgtcatga

SEQ ID NO: 2032 - DNA, 4106 bp, Unknown
  R17_18m  MAG No. k141_40520
cgcacggacggttcggggtcttcggagagtttgaccaatacgttcgggaacggcatggtgtcggcgaggaacacgcgatcggccaccggggtgtgcgggttgccggccacagcctccaaaagtgcggtggcgcgggagaacgccgcctgatcggcacggtcaggcaacggccgacgggcgaattcggacagttcggccgggtcggtggaatgacgcagacgttcgtatgtagcggtcagcggttcgaaatccaccggagcggcggactcggctgcggcctgcgcgccttggtcccgctgctgggcgcccgtgtcggttgcagtctcggttgcggcctcggtgggctgggtctgctggctggtggtgttctcgtcggtcatgatgcccagcttagtcatacaggcgtcacgcgagcggaaccggaatgttgaccacgtcaatcggatccggcaccaccgcggcattgaacgcttcccgcacacgctcctcgaatcgcgcgcaatcatcctgcggcaccaccgcggtcagttcgacgttcaccgcatacgattcatcctcctgactgccaccgagctgcgccaggatctgctggaatcgggccaactgcgggtattcgagacggacccggtatcgcttggcggtcatgatgcgggcggcgcgggcggctttcatcgccaatgatgcggcggatgagtacgcgcggaccagaccaccggagcccagcagaatgccaccgaaatatctggtgacggcaaccacgcaatcggtggtgccggactgcttgagtacgtcgagaatcggcttgccggcggtaccggacggctcgccgtcatcgctcatgcgttcggacagtcgcccatccgcgcctccgcacacggcggcatacgccacgtgtcgggctttcggatgctgctcacggatcgcggccacgaacgcgagcgcctcgtcgagcgtatcgacatgggcagcgtcgccgatgaattcggactttttttcgacgagcgaatcgtgggcgggatcgtcggacgtgttgagaatcgtctgcataagcgtgttccggtggtcggctgactgggtgttcgattgagcgcgaagctagacaggactatcagcgttcggagacgacgacgttatagtcctcgccggcgaagtaggcggtcaggcaggcgatcatctggcgggtgagctccttgaacgcgccgtcggtacgccagccgacgtgcggggtcaggacgatgccgggcacatggcagatggcgtcgtcggcggtcagcggctcgtggtcgaacacgtcgagtgcggcgggaacatcgcccttttgcagtcgggcaagcagcgcaccggattcgatgacttcggagcgggcggtgttgatgaacagggtgccgggcttcacatgcgcaaggttctcggcggtgacgatgccgcgagtggcgttgttgagcggcagatggacggagatgacgtcgctggtttcgatgagctcgttgagatcgtcgaccggagtggcgccggagcgttcgaaatgctcgggcggcacatgcgaattccatgcggcgacctccatgccgaaggcgcgggcgatgccggccacggtggcgccgatgccgcccagtccgatgatgcccatgcgacggccggcgagttgcagtccatcgccgccggcccacgcccagttgccggccttgacgtccttatcgagttggccaacgcggcggatgagctcgaacaggagggcgaaggtgtgctcggccacggcgtgatcgccataatgttcggcgttgcagacgcggatcttcagctcgcgcgccttatcgagattgatgtagctggcgacgccggtaccgcagaacacgatgcacttgacgtgcccctgctcgctgatggtgcgcagcagatcatccgaaatgtggtagccgcccaccagcagggcgtcggcatccttcagacgctcggctatggtcgcctcgtcggacgtgaattcctcgaacatacgcacgcgggcaacgtcgtggagcgcggggaactgggccttgatgggctcgatcatcgcgtcgagcacggacggcatcacgacgaggggcagatcggtgcgttcgctttgggtttcgtaaatctcggtcatgggctccacattaggaggccgacgggaaaagcgtcaccttgcggcttcccctccttgagaccaagccgagcaactattgctttgccgcctgctcctgcgtgatgttccattccttgacgacgttctggtccgcgcccatcgaatagatgacatcccagatgcgttggcgtatctgagcgtcgtaggcttcgtcccaacatgtgcctatgggatggtcgctggatatcgggcaccattggtagttgccttgatgcacgttggcggtgggcacccagtcgatgcggttgacgcgccacgaccccttgacgcccttcttgccggcgaactggatgcgtgcggtcacaccctggttgttgaccaaggtttccggcgtgttcgccgactcggtgacggtgttgcccagaccgtagacaatccacgtgccgttatagttctcgatgggctgcgcacaatggcagccggcaccgtagataacgtcgaaggcaccagtgtcggcaagctcatgggcttccgaaatctgccaggaatcggcgtaatcaaggtattcctgcaccgagtgcatggcgatggccaccacatcggcaccttgctcgcgggccttgttggccttgtctaccgcgcgctggatgtcgctgccgtgattcgggtcgccgtcttcgcgcagacgatccacctgccagtcctcgtcggcggtcatgccgttgagggagaccgtgccggtgaccagacccagcttgccgccgccggtcggggaatcgatgactaacggtttggtggagtcggcttcggttttgtacgagccggtctgggcgatgccatcggcctcaagcgtgtcccacagacgggcgatgccatccgccccctgatcccaggaatggttggtggcgtgtgtgcaggcgttgtatcccacgttgcgggcggcatccgccacttccggcggaatgttgaagatcgggtacgcggcatatgggccgccgcgctgggcgatcggggtttcgaattcgcacacggcgatgtccgaagcctgaatgtactgcttcatcggcgcgaacagcgggtcgaagttgaaggcggtgccatccgtggcgttggggttcgggccttggaaatggctccacaatccctcatggaacaacaaatcgccgttgaccagcatggcgatgcagtccgtatccgggcaatccggtgaattgccgtgatgttcggtcaccggtttgggcgtgttcttcgctttattcaacgcgacgtccgacactccggcgcgtgcggggccattgccgtccgtgcgatgggttgcgaaccatgcgccgatgcccagcgtaacggcgagcgtgatcacgaacacgataatcagcgccgcacggttggttcgtgtcgagttggagcgatgttgcccctgcccagcgatatggctcatctttgcccacccttcggaactcttcttctctctctaggataccgcccatctcagtcaaacactgcggggaggaaggcgatgggcaagcgattggacaagcgacataaaccggttaatcttcaatcaccattcacgaacaccacgcaaaagtctcacttagtggacattcttctttcgtttgttagccttttccccgaggtgccgcactcgttcacccgctaaaatggcggtttggagacggacggacaatggcgtacctccgactccgcttaccacaagcggagaccgaccgtcctcggttatttcggttatttctagcgacacattcccaggaaagtttcgcaaaacagacccccaagcaacccactagaaacacattcccaggaatgcgtcgcaaaacagatatccggacaacccaccagaaccgtattcccggggttcgaatccctctgactccgcgaagtgcgaacaggcccatcatcaggagtttccggaaaacaaaaaagattccaagctttcacccggaaccttaatcggcggagtcagagggattcgaaccctcga

SEQ ID NO: 2033 - DNA, 8662 bp, Unknown
  R17_18m  MAG No. k141_40613
atcgacgaaataccgtctccaagcacacggtcgaacgcgacgatcgggcgatgaatcgacgtccaataatcgccgggatgcgaagtgtgcgcacacatgacgatgccgtccatcatgtgccgacgcaacatgtcgacatactggatttcgccctccgcctcatctgcggtagagcacaacatagtgcgtaatccttgcgcggcgagcgcatgctgcagatgtgcggtaaacgttgcaaagaacggatgacgaatggtaggcacgatgacgccgaccagattcgtacgatcatgatacagattgcgggcaagctcgttcggcacataattgagcagttgcatggctttgcgcacacgttcgcgcatgtcatcagacacgtacccgttgccgttcaccaccagcgagacggtgctcagagacaccccggccttcttcgccacatcgcgcatgccgaccatgatcgcaccttccccgtcatcactgttctatcgttgtatgctcacgtgcttaccacgaaatattacattcatttacattctctcgaacctgttcgacagtccggcaacgaaatacagcttcttagtgtcgactcctgcggaggcgaaggccttcagcagcggcttggtctggtcgaatgcaatcaccagcgttgcatccggactggcggccttgatggcggttgcgctcagtctctttcacgttactcagcgaccgtccgtgtaacgtgaaaattacgccggattggcaagcagcgcaatgccgaaaccggcggccacgcaaatgagaggcaccgcgacggttgctattccatagcccagagccagcgtaaaacgacgctggcgaatcaatgaaaccacttcgttgagcgccgtggagaatgttgagaaaccaccgagaaatccgacaacgaacatcatgaccgtgtccatatccaccgattgcgaatagtaggacatcatggcgatgcccgcgcatagcgaggcgacgccgttgatgacgagcgtggatagcgggaagttgcggttcgttcttcgattctcgcggttccagccttgttgaattgacacgtcgagcacgtaacgggccatggctcccagaccgccgaacagacagatcatccacatcatcagcgcacctccccggtagtcgggtcggcgacaagcgaaatctccgcagtgatcggtttgggctcgaagctgggtggaagcgggttggccggctgctggattggctgcgactgctgaatctcgggcagctgccccaagtctggagtatccggctcgcgcagcaacggatgcgccggctgcgtcagctgaggaacggccagcggaggaatctgcggaacgcggcctgtctgcataggctggctggcggtcggcggcacggttggtgtttcgactcgcggaacctgtcccgtctgtgcaatctgctgggccgtctgcgcggcttccattgcggcctgcgcggcagaacgcgccacgtcggccactttcacatggcgtacgccctgcgtgtccgattcggcagaatcggacacggaaacagctgaaaacgcaccccgaacccgctttcgagtactccgtgacagcagtgcctgcatcagaaccacgccggcggcggcagtgagcaaaccgcctgcaaaatttcccgcaagatagccaaacgcactggcgatatgccgctcgtgcagaccttccaccgtttccagcatcacgccggacatcgtcgaaagcccgccgagcaagccgagcccaacgccacggctgacaacctgccgcacccggcgacgcagccacgaagcggtcgccatgaattcggtcagcatcgcgaacaggaagcaggcgaccatattcgacacaaacgtgcccacaacgaacggcgtcccgctgaccgacggcaggagcatatccaacgcatgccgacagccgactccaacaaatccaccgacgaacaccacaacatacatcagtccgtcggcgagcggattgaaccgcgcctgcatacgtttcatcggcgccaggggaatcgtaggcggatccatggtgttagcggcgggcgcggttgcaccagcatgcgtcacctcaacagtgtcgattgcctgcgtgatgggatgtgagtcctcacccgcagtcaccacgtctcccggcgattgttcttgcgattccattgcgctccccctgtactggccttccgcggacagcgttgttccgcccataggccgtgcaacaacgagctgggccgcggttgccaccttcctaacgcatatgagtttacacggagcgccaacgtatgcaccctggatgtccgattccgcaaattcgtacatccagagtccagccgaattcagccaggctcagtcaagccgggcatcacacagccgccgcatcgcaggtcgcacctcgcgctcctcctcgccactgaacagcaccaccagatagtcgccggcacgcagccgtgtatcgccgcgcggcacgatctcgctttcgccgcgacgcaggccgatgatcaggcacccagacggccaacgcacgtcacgcacccgcttgccgtccgcaatcgctcccatttccaatggcagttccataatgccgctgcccacatggcttgcgatcgccatctgcatgccttgcgcgcgcacgtaccgctccagcaactccccataaatcggtttggtgcgcagcaaatcggacaccaacagcgcgatgaaagcgacggccgcgaccggcagcatgtgcgtcaacgttccagacatctccacagccaacagaatcgacgtgatcggcgttttcacggacgcggcgagcgtgcccgtcatcacgcacaccgcaaacaccgccactgcgtcggatggcagatcaccgaatcgatgcaacacttcaccgcagatgccgccggccaacgaaccgaccgcaagaatcggcatgaaaataccgccaggcgcgcctgagccgaaactcgtagatgtgaacagcatcttcgccacgaacagcagacacagcattcccaagccgacgcgcgcatgttcggcggtatcaatcagattcgagccgccgccgagcacatcgggcaaccagatgccgacaggcaacgcgatcgcaatcgcaatcatcgggcggctccatgccggcagtttgccgtacagcgtctggaagccaagcaacgagcggttcatcagcgaaccaaccaaaccggccaccaatcccaacggaatcagccacacatactcttccaacgacagctgaccgatatcaccgaaatccaaaaccggacgcagaccgaaacagtattttgagacgaaatcggcggtcagcgatgcggcggtggcgcccatcagaatcgcaggggaaaaactccgatgcaccccttccaaagcgaacatcatgccggacagcggcgcgctgaacgcggcggacaagccggccgcggcaccggcggtgaccagataatgctcctgcatgtcctcacggcggcggccgcgcaaacggtgggatacacactgcgcgcccgacgcaccaatctgaatggacggcccctcacggccgagcgacagaccaaacaacgcgcccaacagtccaccgacgaaacggactggcagaatcgtctgccaacgcatcttcaagccgcatatcaccacgccgttggtctgcgggatgccgctgccaccagccatcggctccttgccgaccatccacgcgatcgccagcgcggccgccaccgcggcaaccgcccacggcgcaatcagccacggggtctcgcgaatccgcgcatatatccaacgggacgcatccgtgccgtattcgatgccgagacggtatacgacaaccagcaatcctgaaaccagaccaatgactatgccggccgccgccatcttccacttcaagtggtcgaatcgcggaatcagccggcggatatcatgtgccgcgtcgttaccagtcaagccgggaaattcgttgcagacggtcagtcgaccagcgaattgatctggatgacatggtcgcgctgcggaccggtgccgatcgcggagatacggcagccgctcagctcttccaaacgcttgacgtaggcctggcaggtggcgggcagctcgtcgaaggagtggcagtcggagatgtcctcatcccagccgggcatggtctcgtaaatcggcttggccgcggcgaaggcggcctgatcggtcggcatatcgtcgtgacgttcgccgtccacgtcgtaagccacgcagatcggaatctccttcaggccggtgagcacgtcgagcttggtgagcacgatgtcggtcaggccgttgacctgggaggcgtaacggttgacgaccgcatcgaaccagccgcaacgacgcgggcggccggtggtcacgccgaactcgtggccctgctgacgcagccattcgccggactcgtccagcagttcggtggggaatgggccttcgcccacgcgggtgacgtaggccttggagacgccgattacgcgggtgatcttggtggggcccacgccggtgccggtgcaggcgccgccggcggtcgggttggaagaggtgacgaacgggtaggtgccgtgatccacgtcaagcatggtggcctgagcgccttcgaacagcacggtcttgccttcgtcaagcgccttgttgagaatcaggccggtgttggccacgtacggcttgaggcgttcgccgagcttcagcagctcctcggtggtctggtccacgtcgatcggacgacggttgtagagcttgaccagcatctggttcttctggtgcaggctggcctccaccttgtcgtgcagatggtcggcgttgaacaggtcatgcacgcggatgccgacacggttgatcttgtccgcgtaggctgggccgatgccacggccggtggtgccgatcttgtgcttgccaaggaagcgttcagtcaccttgtcgagtgtgcggtggtagggcgcgatgatgtgtgcggcctcgctcaccttgaggtgggagcaatcgatgccgcgggattccaagccgtcaatctcctcgaagagcacttccgggtccacgaccacgccgttgccgatcaccggggtgaggttcgggttgatgatgccggagggcagcaggtgcagggcgtacgactcgtcgccgaccaccacgctatggcccgcgttgttgccgccgttgaagcgcgcgacataatcgaccttggtaccgatcagatcggtcgccttgcctttaccctcatcgccccactgggcaccaataagaacaattccaggcatgatgcacctccgcattcgcacgattccgccggaaacagactaccttacaccctctactcggggcgcggccatctcacgcaatcgggcttctggtgtctttgccgcgcgttgcgcgaggcgggccgacaccaaggcgccgccacggcgaatgacagtttatttgggtgttatctgagtgctttgccggccgagccgagttgcttgcatgcctcagccacgcgggcggacatggattcctcggccttgcggccccaggaacgcggatcgtagaacttcttttcgcccacttcaccgtcgatcttgaggaccttgtcatagttctcgaacacatggtcggcaatcgggcgcgtgaacgagtattgcgtgtcggtgtcgatgttcatcttgatcacgccatggctcacggcttctgcaatctcttccggacgggagcccgaaccgccgtggaacaccaattcgaacggcttgccgttgggaaagtcgactatgccggcggcgctgggcagctcaccctcgaccaccgcgcgcgccacacgggactgaatatcaccgagcagggcgggacgcagcttgaccacgccgggcttgtaggagccgtgcacattaccgaacgtgaaggcggccatgtatcggccacgctcgcccaaaccaaggcgacgggccacttcaaggccatcggccggcgtggaatagaggcgttcgtcgattttggcggaatagccgtcttcctcgccgccgaccgcgccgatctcgatctccagcaccgtgtgcgcggcctgcgacttatcgagcagctcctcggcgatgtccagattttccttgagcggcacggtggagccgtcccacatatgcgactggaatgtgggctcctgaccatgcgccacctgatcggcctcatgtgcgagcagcggttgcacccattcgtccagatactgcttggcgcagtgatcggtgtgcagggcgatggtgatgttcgggtacttcgcggcgacctcgtgtgcaaaagcggccaaggccagcgatccggtgacacggtcgttgacgccgatgccggaaaggtatgcggctgcgccgacggacacctggatgatgccgtcggattcggcatccgcgaaccccttcagcgcggcgttcagcgtctgcgagctggtcacgttgatggcagggtaagcgtagccgccgcgtcgtgcggcgtctagcatttcggcataacgttccggtgttgcgattgtcatggcttcattatcgctcggggtgtgcccgccagactaggttctggagccaggcgagctgtgaattatctcacgaggaacaccatgatgataatcatggcgaagccgaccaaatcggtcggggtaaagaccgcgccggcgaataggacaccggtgatagtggcggttacgggttcactggtgccgagcatggtggcgcgcattgcaccgcagcgctgggtgccgccgaggaatagccaataggcaccgaatgtgccgaacaccacggtgaataccatcagaccaatgccgaaccagtccaacgcgggggcggtggtccacgggcgcacgagcggcagcagcattaggccggaaacgatgaacatgacgccgctggccatgaagttgccccatttggccattaatgcgatgggcagaatcgcaagcagtgacgtgcatacggcatcggtcaggccccacagcagaccgggcagcggcagactgagctggctgagatcgccgcctgtggcgatgagcaccgtgcccacaaaagcgagtaccacaccgatgctttcgcgtttgccgggcagccgtttgcccataatacatacgaatacgagtacaaccagcagattgagcgtctgcagcactgtggccgtgccggaattggtccagtcaatggccttcaagtaggagacctgcaccatgagcacgcagaagaacgcgcacagcaggagtctcgggtaggaacggtagtccttaagcgagttgatgaacttgtcaggcgtgaagattcctgcgcaaaccagaaagatgacaccggccaatagctcgcgcacgcaggcgatccacagcggatcggcgtgatagtcgttcatcaggagtttggagacggtggcgttgacgccccagaagacgcctccggcgagcgccagtccggcaccgacgaagatgtcgtgcggggtgcgttcgagggttggcgttggttggccattggttgcagcggtcttgggttcacacatcgcccatcacgatacgcggacgacgtgaattgttctcatatagcggtcatacggcaggaaaataagctctcaaaagagggaaaaccgttgaaatttcaaggaaaatcgatggagcggacgacgggagtcgaacccgcctctaaagcttgggaagctttcattctaccgatgaactacgtccgcatgtgcgcttccacgcacgagaggcaagtgtatcacctatgcggcaccttgcgccatgtgccggtttgagttctgtgctggactagtgaattgcgcgcgtggaatacgtggatgcggccaccggagtgccgttcatttcattggccatttgcatcaggcgtgcgatgcgctgatcagtcggcggatgcgtggagaacagtttggagaaaccgaccgcggagaacggattggcaatcatcatcgcggagacggactgggtgccggccgttttgcgcatgggcgtggtctgggcaccataggagatcttgttgagcgcggaggccagggcctcggggtcgccggtcagcagactgccgtcttcgtcggcgtcgtattcgcgagtacgggagatggccatctgaatcagtgatgcggcaatcggcgcgagaatcacgctgaggagcacgccgatcaagccgagaccgcctgaattatcgcggtcgtcgcgcgagttgccgccgccgaaatacatcagagaataaccgaggtacgtgatgacggtggccatggcagaggcgatggcggaggtcagaatgtcgcggttgtacacgtgcatcagttcatgacccagcacgccgcgcaactcgcgggcgttcagaatctgcaggatgccctgcgtgcagcatacggcagcgtgacgttcgttgcggccggtggcgaaggcgttcggactcatggtgggcgcgatgtagatgcgaggcatcggcttgccggccttggcactcagctcgcgcacgatctggtagatttcgggggcttcctgctcgctgacctccctggctcccatggatgcgatggcgagtttgtcggagaaccagtatgagccgaacgtggtggccaacccgataatgacgtagatgcccagcgtctgctgcctgccgcccgtggcccaccatatcagcatgatgatggcccacatcaaggcgaacagcagcgtagtcttcaggccgttgaaatggc

SEQ ID NO: 2034 - DNA, 31352 bp, Unknown
  R17_18m  MAG No. k141_40771
agcatgaggaaacacgcgataatatccgccctgccgcctagtttggtgaaccatgggtattgagaacacgcataagctgattgtcaactgcctgccactcaacgaaggagaacggcgcgctttcgccaaggcggcccgcgatgtgccgcaggaattcgtgggcgacgaagcgcaccgcggcgacatggtatggtcggccgctgttcccgaggagcttcgctcccgagccaccgcagtcatcggcaactttccggtctcgcaggcttcccaatacacccgtcttgaatggttgcagaccttcagcgccggtgtggatgcgtacatccgcccgggtgtgctgcctcgcggcaccatggtcaccaatgcgagcggcgcgtatggccaaagcgtgtcggaacacatgttcgccaccatgtgggcattgatgaagaacctcaaccggtatgcctccaatcagcgtgatcatcagtggcaggatgaaggcccggtattgagcccggaaggtggcatcgcactgattatcggcgtcggcgacatcgggtcgcatttcgctcagcttgcccaatccgtaggtatgcgtaccttcggcgtgcgccgtcatgcggacgtgccggccaagggcattgaaaagatgtatggcttcgagcggctggaagcactgctgccattggcggacgtggtggcgatggcggtgccgcgctcgccgcagacccatcatctgctgaatgcggatcgtctggggcgtctgaaatccacagccatcgtgatcaatgccgggcgtggcgacgccatcgatcccgaggccttggccgacgccttgcacaatggacggctccacggtgccggattggacgtcactgagcctgagccgttgccggcggaaagtccgttgtgggatgagccgcattgcctgatcaccccgcatgtggccggcggcaatcatttggaaaagacttccgaacacatcatccgcatcgccctgaccaacgtttcccgctatgccaaacagcaggaactgttgaatctcgtgcgatactgattcgcctgtatcgggtgtacatgaactcatgtacacggccggcgtgtcgcatcccacggaggctgcggcatcgagatgatacctgcagaggcgtggttgatcagaggcccaatgaacgtggcccgaggtcagtctcagtctgatagttcgtagccgttggcgtctttatgccacggcgagccgggcttgctgcacagaatgatgatgccttcaacaaagccccagatggcggctgcgattgggccaagtccgagcagaatccagccgacaagcgtcagcagcagctgggccacggccttgccggtgttgccgagatagaagttgtgcacaccaagtccgccgaggaagatgcccaacaggccggcagccaacttggacttggatgattgccacaccggggcggcggcatacggagcggcggtgtattgcggctgtgcgtaggcattcggctgctggtaggcctgtccatagccgggctgctggccgtagcccgctgcgggctgtgcgggctggccatactgcggctgagcgtactgagactgagcgtatgcgccggcgggctggccgtattgcggctgctgctggccgtagcttccggcggcgggttgagcgtatgcggcgggctgtggggcgccatagccctgaggctgccgtgcggcatcttggccgtacgacggctgtgccggctgtgcaggttgtgccggctgcggaacactgtccgaaccgtacggttgttgttgattatcagtcatgtgggtctatcccttctcaatcgggaacggcagtaccttcttaccgtttctgcacaacatcatctcacgttttgcctaatagtaaaacctgccgcgctacgattgggccatgaaaagtttcctgaccagctggttgattatgactatcgccgccgccgtcatggtcgcggtgactcccggcatgaccccggtgggggagcctccgattctcggcatcgccgcgttcgctttgttcatggcgctgattaatgcgtcaatcaagccgattgtgcatctgatcgcactgccgtttgcgattctgtctctcgggctggtcaccttgattatcaattggctgttcatgcgactcgccagctggctggcggtcagtctgttcggcgtgggcgtcttcgtacacggtttccggtggtcggtactggggtccttggttctgaccattgttgcgggaatcgtcgggtccatcttggatcagtgacggtgctcgctgggcgaatatgaataatggcggttggaatcggactgactccgcaagtggttccggattgttgatttttcaacgattcggaaccttttttcatgccgggaatcggtatacatttcggtatatatttgaaggcatgaacggcacggttttctatgacgcgaacaacaagcgatggattgcgcgatatccggcgggacggttcaacaccggaaaagtgatagccggttatgggcagacggcggaaaaggcgatggcgcggcgcgacgcggcgttgaaacgcgcgttgaacggaaccatgcgcggcggaaccatcaccgtccggcatgttcttatgaaatacatggcgtggattgaacagggaaacgacaggcggaacagcatcgcgcggaaacgcgaccggttggaacgctatttgaagccatacatgggaaaaccgatgaaatcgtttgacagcgatgatgtcggcgcgattatcacggcggcacgcgcggcatcgaccgacagcgcgaacagcaagatagcaaaaaccatgtggggcgaaatacaccaaatgtgcgattttgccatacagcgcggcatgattgaaaaaaatcccacggattatgtcattcgaccaaaatacaccagcgcggcgcggcgaaccaatgaacttcacatagacgaacgcattgaacaagggcgctggatgctggaacacgcggcacgcgacggcggaaccgcatacggcatgttattactggcatgtatgggattacgcgccggcgaaatacgcggcatggaatacaaatgctttgcgcacctgctggacggcgcatgggattcaacaaccatgaccgtccaacaaatatatgaccgcgatgtcgaaaccggcgaatggcgattgatgaagcatacaaaatcaaacgccatgacccataggacgctggccgttccaaaaccatgggcatataacattttctgcttttatgaacagatacaggacaaacacaaacttccatatggatatgacggattcgtgtgtttgaacaaggacgggaaacctcttacaagaaaccaacaatccgccatatggaacgatttaagacgggcatacatcaatgaacatccggatagaaaaccaatcgcatcaaccatgcgcatacatgacatgaggcatgtcatcgcgtccgtgcttgtcatgaacggcgcgacattggaacaggtgcgccccatactggggcacatgaacgcggaaatgacggcatattacacggcactttcaaccggattcaaccgcgcgacgatgaatgaactgccggaactcatgaaccacgggaacaatctattgaacttcattaacattaacaatgaaaacaaaaaataaaaataaaaaggaaaaataaaataagcaaaaaaacgcgaacgcgaacaattccaacgcgcgcgaacaattataaccacattaaaccatagaaatctatgaaattatccggcgagtggtagcgcgttcttggaggattagaattgaacacatgttgaacacatgaacttgtttcatgtgtgataacgcgtgtgattcgtattatgtaatgatttttatgttgtttttgtgtgcgcctttcaaaccgggaaacaaaatggttccatatttaaagtggaaccatggaatcttttaaacattaccatgtgttgacatcaacggtgatgttgaatatgatttttcaacattaatgtttcggcggtttaatattcactggaatatttgtaagtccaggattcggacacaggattttatctatgattgaatcgatatcccatgtatgaaacggttcaaacaatgaataataatcctcatatgaataatcaggataatattcaaccaacgcaaccgcgttatccatattcttaatattaaaccacgccataacacgacgcgcttttctcattgtattaccatcaaccattatgtttccttccataccattgaaatgaatacacatgaaaccattaaacataacaagcgtttaaacataatcatcacgcgttttcccgttccttcttcgcgtccgccatcatgcgatagacgcacgcgtgtgaggttttcaaacgcactgcgatatcatcaatcgtccatccttgttcacggtattccaatgccttacgcgctttacgcatggtgtaagttttcggacgattacataccttgccggacttctgcgccgcctctctgcctgccgccgtgcgttccaaaattaaagcatgttccatttctgccacggcgctgaaaatctgcgcaaccattcttcctgctgcggtttccgtgttaacattctcacgaatagtgcgtatgttaacgccgttctgttccaatacattcatattaagaacaatttcattgaaattgcgtcccattctatccatggaataacatacaatcgtgtcgccctcacggactgcttttgtgaggttaatccatccatcacgattgaaattggttccggttttgcccgcgtccatgaatatgcggttcgcttccacaccagcattaattaatgcctgttcctgctcattcaatgaatagccgcgcattgcctgcgttccagttgaaacccttatataaccatataacatacttattaatcctttcaatagaatatgtgttttcactatctatctatcaaactgtgttcaaaagccatatcatttgagaatccgcattttcgccattgaaatggaaaatgaaaatccagtatttttcagggttttaaaatattaatgaatagcatatataccgttcactggattataacttttgaacggtggtatttaaatacatatttcaacattgaaataacatattattcgaataccatttgaaacgctcatttcgattctaacagcgatttttcatgtttcatgagcaacgcatcgaaaacagggttttccacggtttcaacaaaatacgccgtccacagggctgaatattacgcgctctgtggacggcatcgattttcacggattttcaatattatatattttccttcaaatacaatgaaaccggtgatttgtattctcaccggtttcattattggatctatggattggattcatgtattatatatcaaacaatccatatatgttattccattaattaatcatttttgcggtatcactggcgcttttaattgccgcgctattctgtgaaaagtattccggggcaatatatacaacaacagcaacagcgattccaattgttaagaagttaatgaactggctccattggcgattcaataagaattttaatgaaagtgttcccattaccatgataataatcggcgcaatccattttgaaaccgctgcgttccaaacatcctgtaatgtagcaatgtcataagcataattaataatcataatccataatcctttgtgttaaaataacttgtctatcatctatcaaaggaaacggcgtgccggtttgttccttgctccggcacgccgcaatatattatttgatgacaatgtttaaatatcatggtttcatttttttaaaacgccgccgtcaggtgggcactattctatatacacagttgcgtcttcccgagtttcacgggtttctattaatcgttggattaatacagccatttcaaagggaagctccgccaacatcgccatgtattcctccaagagcaactatccccgtccccttagcccggctctacggccatctcaatcggcatgaaatagcaatgttgccaatcaagattacgaccgcttccatgaggacccatgtttattaacacggtgtctgacggcatacatccagaggttttaaatgttaggaatcacccgtccgtatctttcaaatggaaaacgagccttttattctattatttcatacacatgctttcaaatctcatctgcggcgcatgacagcctgattctcataatttcaatctcattgcggtttatgttaacctgatttgcgtttcattgaaatgctgtatgaaaatgttcattccaatgaatgattcatccaatcaatccatgctttcaaatctcatttgcggcgcatgacagcctgacgcatcccgacaccccttttgattggattaaccatttgtgaagtcgccggtgctcacctctatcaccatgatatctatcaaacatgtgtttgaaacatatgaaatttgaacaaaagcattctatggcggttttaacggcgtttcagcgtgaacatgaatacttatcgtatttcatatgaaaagccgttagaatgccgtttaaatgcgttctaacggcatatacaccattaaccgtgaaaccatgcgtttcaaaccatggttccatacactatgaaatgtgaaaatattgtgaatattcatggcatgccgccgcttttcaaacagggcacatgaaccggtatatttttcggtatacttccggtggttttcaatacgaacacaaccggaaaccattgaaaatagcggttttatggcaacagacacggaatcggactgattccaaccgccattactcatatcaagctacgggatcgagcagagcgaacgctactcgcgcaccaagcggatatgctccacatcgtcgcgccgggagcgacggaacagcacgaaacgattgccgatggactgcaccacttcggcgttcagctgctcggcaagctcggcggcggcttccttggcggtcaggccagaaccgtcctgcacggcgcacttgatgagctcgtgcttctcaatggtttcatcggcctgattgacggccgactcggtcaaatcgttcttgcccacatagaacaggggcttcagcgagtttgccatcgcgcgcagctgcttgatttgcttcttggtcaatgccatgggaatttccttacatctttcgtataaccacaccagcatagcaaccggtgctgtctgtgctgtttgccgccctacagcgcgatgatggcggcgatgtaggcgatgacggcgacggcgaacacgagatcttgcgcggcgatggtcagggcacgccagtgggtgcggcggatgctctcctcgtagcagcgggcgtcaagtgcgaggctcaggttgtccgcgtgacgcaacgtgccggcgaaaatcggcacgataatcgcgctcatcgccttgatgcgctgggccagcgaaccggtttcgatggaaccgccacgcgcggattgggcatcgacgatggcacgggtctcgtcggtcagcgttggaatgaatcgcaatgccagactcatgaccaacgcgatctcctgggcgtggatgccgagccggttgagcgggctgatcagggtgtcgaaggcgtcggtcatggcggtaggcgtggtggtggtgaggaacaccgcgcccagaatgattaccaatgcgaaacggcaggcgtacagcacggctatggtcacgccctgatcggtgatgctcagcgggcccagcgccaccaccggcgtgccggtgcgtaccacaaacagattgaccacgcccatcagcaccagcagaatcagaatcggatgaatggattcgagcacccgtaacgggttcaggcgtgccgccgcgataacggccagggtgatggcgatgcccagcgcaagctggaggggtgtgttcaccgcgaacatcgtgaacatggcggccaggaagcccaccatcttcacgcgcgggtcaagtcggtggatcaccgagtgcgcgggtttgtcaggggagacgggctcggcggggaaggcagtctcggttgccgagatgctctcagcaccagccgcgccggcaatcggcatacgtaccacgcgatcggcgatatgcttggcctccgctcggtcatgggtgatgatgagcacggtcacgccgcgcgatttgagcgtgcgcaacagctcatggatgcgctccttggcctggacgtccaggctcgcggtcggctcgtccatgatgagcacgtcaggattgcaggccagcacgccggcgatggccaccaatcgctgctgtccgccggacaggtcgaaaggggagcggtcggcaagatgcccgatatgcaacaggtccagtgattcgcgcacacggtcggccacctcggcctcggcgagcccctggttgcgcgggccgtacgccacgtcctcggccaccgtgtccgcgaacaactggtgctccggatgctgcatcacgtaacccacatgccggcgcaattgcgccaattgcctgcgattcgccggcttcggccgtgcgttgctaccgcgtttgccggtcgaggccaccggaacgccggccacctcgatgctgccggcggtcggcgcggccagcgcgcacagcatgcgcaccagcgtcgacttgcccgaaccgttcacgcccatcagtgccacggtttcaccgcgcgcgatggtgaacgacaggtcatcgataaccgcccgtttggccgaaggatagcgataggtcagatgcgagacgcgaatgatggggttcgtcatatcaccgatgccgtcggagagcagcggcagttcggagccgtcttcgcgcttccgctggcggggtctgtcgttcgtaggacgactgggggcggcttctgtgccgataccaccctcggtctcgctttgcgagacagcctccgctagcgggggtcgattatcggcggctgcagtgacaccaacgattcgcccggcctccatgtgcacgatgcgatcggcatgaacggtctcatccggatgatgcgtgacatgcacaatagtggtgccgcgcgcctgcaaatcatccaaaatgcgcataacttcggcgcgtgcggattcgtccagcatggcggtcggttcgtccaataccagcatcgccgggttcatggccagcatgccggcgatggcggcgcgctgctgctgtccgccgctcatacgggtcgggtcggactgacgcaagttcgccaaccccacggcctgcaatgaatcaacgatgcgctcgccgatgagcccgcgctccagcccgagattctccgggccaaaagccacgtcatcctccaacacggtggtgaccagctgatcctcgggattctgaaacaccataccgatgccgcggcgggcagcgcgataggcgtcggcattcgggccggctgcgtacacgcgctgttccagtagcgtcacttcgccaccgtccggcgcggtcaatcccgcaatcagacgggccaacgtggacttgcccgatccattcggaccgaccaagcataggcgctcgccggcatggaccgtgagcgaaacgccatccaaagcccatgaagtgccgcggtcatagctgaaacgaatgtccttgagtacggcggcggggggagcgggctcggcggaatcgtggaactcgtcggcgtcgaaggaatggggtgcaacggtcatgaaacagcaatccgtaactgataggcgaaaacgcagaatcccggcaagggccggagttctgcgttcttgttctttgagtggtcgttgagtggtcgttagtcgtggcgggcataggcccgtctcaggccggtcactgctgcttggacagcaggttggagaccggcttgtagatcaggaaggtgatcacggcgtgaatcgccatcttagccacgttgaacggcagcagaatcggcagaatcatcgcggccacagcctggtagggcatgtgcgcgtaaatcggcgtgatgatgaggttgcccaccagcgccaccacgatggccagcaccgcacccaccagaatgccgatggcggcacccttgcgcgtacggatcttacggtagatgaacgcggccggcacagacaggaacagcgccaccagcacagccatcagcgaaccccacgggtcggcgaacatgtgcggcacaaagccgagcacagacacgattgcggcggcggccggaccgtacgcaaagccggcgatcaggcagacgatgccggacgggtcgtacttcagccaagtgaccggcgtaatcgggaattcaatgaagctggtgaccatcgccagcgccacgaacagtgcatacatggcgatacggcgcgtggaccagcggccggaatcggccacaccagtggtgtgcgagccgagtttggcgctggtgctggcggtggacgcgctggccgaaccctcggcctcgggcgccacagaacgaacaacttgcatgcggatacgcgaagatacgctcataatgagccctcgtttcttccatccggactataccgttggctccggaatctcaccggatcagccgcttgcgcgggtcgcgggcttcccgccatccccgttatgaaacccggggtacaggttaccgccagtaaggaattgcaccttccctgaaactgacaggcttattcatacgccatgcgccggacgtacgcaacccgcgtttcactgtgcagaaattcgtcttgtgccggtcaagtgcaacaatgggagccatggctgaagtgaagaaacccaacaacaccattgacaagcttgccctgatcgtcaccacctacaaacgtcagcagctgctcgaggtactgttcgattcgattctggcgcttgagcaggcaccgtggcgcattgtcatcgtggacaatgagcagtccgatcagacggcggacatggtcgctgcgtttgccggcaaggtgaccggccagtggggcaccaccgtggccgaccagtccggcaacgaagagcgcgtggtctatgcgccgcagaccgagaacctgggtggcgcgggcggtttctccgccggcgtggccaaggcgtatgatctgggcgccgcatggttctgggtgatggatgacgatgtggccgtgctgccggacgccattgccaagctgtccaagtggaccgacaagcacgaggtgattcagggatcccgattcgattacgatggcggcccgttctactggcagtacgacttcattgtgccgctgggcattccgaacccgatcgcgcccgccgcattcggcccggccggataccgagtgatggacacgctgtgcttcgaaggcggcctgttcaaccgccgtgtggtcacggaaatcggtctgccggacccgcgcttcttcatctactgggatgacacgatgtatggctaccgcgccagcaaggtcaccaacccgattgtggtgcccgacgtgattttgcgccgtacgcgcgaaatcggcaattgggatatcgccggcgtgcgccagctcaactccacgtccgacatgaaccggtatcacatcatgcgcaaccgcggatacatggcccggtacttcatgacctatggtgacttccgtccgctggtgtttggactgggtaccgtgctcaccgcggccaaggaagtcattcgcctggtgatggtggatcgcgaacacctcaagaccggtttggtgcagattgccaagggctggtgggactcgcgcaagctgatgcacgaccccacctggaagcccatgccgtcgcttgagtgacggtcctgccccggcccgtccggcgcgtccgcgtgatggtcgcgttagactgggcgcaaccctacgaactgatgaaaacgtatggaaaggaaggtcaacgatgattgaaactgcacaggctttcggtgttgacattggcggttccggcatcaaggccgcacctgtcgatctgaccaagggcgatttcgccgagccgcgattgaagattctcactcccgaggtctccacgcctcaggccgtggccaaaatcgtcaagcagcagctcgaccacttcgaagtgcctgaatccgcacccgttggcatcgccttccccgcgccgatcaagcccggccagaagctcgacttcatggccaacctcgaccagtcttggattggcgtggacgttactgaagtgttctccgaagcctgcggccgcccggtcgtcgtggtgaacgacgccgacgccgccggcctggccgaagtccagttcggtgccgccaagggccaggatggtctggtcatcgccaccacactgggcaccggcatcggcaccgccttgatctacaacggcgtgctcatcccgaacaccgaactcggacacatcatcctgagcgccaagcatctggacgccgagaagtatgcctcctccgcgattcgcgagaacgaggaactgggctacaagaagtgggccaagcgtctgaccaagtactacggccttatggaaaagtacttcaacccggacctgttcaccgtcggcggcggcgtgagccgtcagagcgaaaagttcctgccgtacgtggatatcaagaccccgattgtgcccgccaagctgcgtaaccaggctggcatcgtcggtgccgcctactacgccagcaccaagcagcagtgagctgagttatttctgctggcgcaggagccgtattgaccatatgtaaggccgtccaagtatttcgggcggccttttttaatgagtaattcgttcattaggtcgattatgtgttcattaggtcactcccattccaaacctgaattgcaatgggctcggaatggcggcgtttcaagcatcaacaattgtgaggctcgactagcagtgacctaatgagcgcgaaaatgacctaatgaatgtagctaggccgttattcgatgtggattgaagtcatagtatgtctgacgactccgctgccgtgccgcacgattgtcgtagtgctggatgctggtggatatgaggcctcgatatacctggctcggcaggggtggttttatcgtggagggtatgagcgtgcatttctcttctcgtgtggatatttctgcgccgaatcccattgcggcggccgaggcggcagccaaggcaaacggcatcgcactcagcaaactcaacgattccaatccgacccgccacgggttggcacccgaattggtgccgagcgtgtatacggccgacccgcgtggaccgcgtgcggcacgagaatcattggccgcattcctcaatacggcaaacgtggtagacgcaagcagccctcagttggcttcgcccgccgccggcgagggcaggaacgagcgccatgccgctttcaccaatgtgaataccgccatcgagggcgccgacccggacgccctgtacctgctgagctccacgtccgaggcgtattcgtggctgattaagttactttgcgatgccggcgacgcggtgctggcacccaaacccggctatccgctgattgagtcgattgcacggcttgaatgcgtcgatacggtcgaataccagttgcaattcgacggctcctggttcatcgacatcgccgaactcgagcggctactcagcgagcccggtggcgaacgcgtcagagcattggtactcatcaacccgaacaatccgaccggttcgtacgtaaaaccaaccgagcgtgcacgtatcgtgacattgtgccgtgagcacggcatcgcccttatcgccgatgaagtgttcttcgattactctctcgaacctttccccggcgacgcacggctcgcgggggagcgcggcgtgctcaccttcgccctagacggattctccaaaatgctggccgcgccgcacgccaaagtcgggtggattcaggtgtccggacctgccgaggacgttgccgaggcccagcgtcgactggacgtcatcgccgacgattatctgccgatgggcgacatcatcgccgaacggattcccgcattattgaacgccgcgcccgcacagaccagacgggtgggggagcgcgtgcgcaataacctggccaagttgcacgagttgcttgacgccgatcccaacgggctggtcagcgtgctacgggccgaaggcggctggaacgtgctgttacgagtgccttccgtcatcgatgagaacgaactggtgttgcggctgattgacgagcaccaactcaccggacagcccggctacttcttcgacatgacctccaatggatacctggccgtttccctgctgcccgaaccggacgaattcgagcgtggcatccgcgccgtgctcaataccgtcgccgctttgctgcgataggccggtgtttgccggcaccgcacctgtactccacgtacaatggcggcatgggattcttgtttagaacgaaagaactgccacgcccggcatcgctgacgttcactttgaatcaggccgggcatacgtatgatgatgggcacgtgggacttgctcccacggacatcaccatcagcgagcggcgggtggccgtgatcggactgaacggcgcaggcaaatccacattgctgggtctgctggacggttcgttgaaggccaacgctggcacggtgaccattgcgggcggtgaggaacgtcttgacccggctgtgaagaaggacgcgaagcgcatcgataatctggtcggcaaagttcgccgcgaggagattccgaacagtttctaccaagcggcgaatatttccgaggctgtttccgaagcgttgaaaaagcacaaggtgcccgagtcagaacgtcatgcgcgcatcggtaatctgttcgcgcattttgatttggcgcaggtctccaaggccaaggccggcgaattggactccgagaaacggcacctgctggctattgcggccgcgctgagctttgagccgagtgcgattgtggcggatgagccgagcaagggattggatgagattggcaccgcgcatgtggccaaggcgttgttcagctacaacaagcaggtgattttcgccacgcatgacacggatatgatccgccggcccgaatacgccatcgaccgcatactggtgctggacgagcacgcggtcgtgtttgacggagcgccggctgaggctgtggcgttttatgaggatctgatccgacgccgatacgagactagagcatcgtgaaccatgcctgaacctgatgccagagcgccggattgttgtcgatcatcgaatcgctgcgcgactgcacgaagcagctcagtatggctatgcccagcgcccacaatacggccagcaccacgacccagcgcatcagccaacgccacggagtgacgcgggcgatgccatcgcctgaagcggcgtcgttggcccccgccaatgaccggctcggttcgcgcccattgaccagccacagtagccccggtatggacgccagcgagatcagccagccgaaatcggcggaataccgccatcccaaaccgccgacgcggctgtcgaatacgaccagcaccgccgctacggccaagcaagacatcagccatggccgcatgccgtgtgtttccaatctgcgcagcaggggcagcgccaaagccatcaaggtcagtggcgtggccgtgaaaatcgcgccgaccatcacctcgtaataaccccattgcggcatcggggcgggagagcccgccagccacgggaaacgatccatgaagcgcagcggcaggaacaggtaataccagatgttggcgggcatatccgcggacggggtggtataccgggtcatatcggatatggagaactgatacgcattgccgaaattgaacggggaatcgaaccgaaccatgttccacgccatcagaggcgtcacgacgagaatggcgggaatgattaccgccagcggcgcgcgcaacgcctgcaacggcttgatgcggcgtgtgcgcagaccggtgcccagcgcgcgaatctgcggccagaacagggggaacgcaagcaatgcggccaaggtgaacgtcggtcggcatccgaaattcgccgcaatgcacaaggcgcccaaggccagtcgtggcagggagagaggcttggcatcgcccgcctgccatcggtccgatggtctcagcggacggcgggacgtgtccgcgccgagccatagccatagtcccagcgacgtcaacgtcagcgatgcggcgaacggtatctgatagaagttcgtgcgatacagcaaataccccacttgcgcgctcaccaacgatgagaccactactaacgacgcggccgccaccgaagtcttcggcatcacacgatggatgacgcgcagcaccagcaaggagaagaagatgatgaacagcagcacgagaatatactcggcggcggatgtcggcagattatgaccggccagcagacgataggggacgaacagcagcactgcgggcaacacgccaaaataggaataccagtgaccgtcataatacgcgtaatcccagtagagcggactggctccattggcgagtagctgggcacgtgtggctacgtcataggggtgctcggtggcggccagttgttcgggaaccggcaagtcgagccagggccggccggcgaccagcgcatcggccacatgcccatactggtcgaaatcataggtgtaatcgccggaaacgtggaagacgagcgaagacgcgtaccacagttcgtggatgatggatacgccgataagcagggtaggaatcgccagaagccccacgaaagcaagtcgttgccgagtgctggacgggtcaagcgtgatacgccacaggcgcgatcccggcctccagacggcaatcatcagcaacaccaaggccatggcgagcacgcgcatccaattgatgacgaacggtacgcgcacgttggcgcgggcgtcggtgaccggtacgatcgcgccgcgctcttcctgaatccaaatacgcacgatgccggcacccggcgccttgacataatggctgcgaatagcgtcgggattcatcgactgggccttgccggtgatgccatcgacatccgcgcgcacatgaatggtcgccagcggtttgaagacttccttatcgtcgttcgctttggattcggcctcggcctgctcgcgggccttatcgatgaccttgctgctctcggtatcgatgcgtaggtaatccgacgtgccgtccgcggtcagttcaagataggccttggtcggatcggtgacggtcaacatgccatcattccggcgcgtgagacccgaacccagcgtgttatgcacggcgttcgtatccgtgctcgctccgagcgtacgccagaacggcaggttgaacacgatgcactccatggcggcgatggcggcgacggcggccagcaaggcgatcagcaggcgcaccaaacgcagccggtgccgggtatccgggcggctgggcaggtgccgttcatgattcgacggcatcggacggtctgcgcgagtgtggtctatggaatgcacgcatttattctataggctttattcgggcttgatgtcgggcaaacaagagacaatgtgaatcatgccaaaacgtacatcggaccatgggaagcacaaccgcacgccactgctgggcgggctgaaggattcgatgaacgcgctcgcggccgatctgggactgtccaagccgaagaagcacgatacgaatccgttcggcgatgccttgcgggagaccagtgagcgtaaaggcggcattatcgacgaactgactcgccatgcagtggcgctgagtccagtaatcaagcgacgcaccttccccgaattggagaacgtgccggaagggctggtgcttggatgggcgcagctgccctccaccagaggccgtggcttttcgcttggcattttccccgaccgcgatcattttgcgcaggtggcgttcgccgatacgcatggccgcgtattcgtgggcaccgaccccaacatggacgtgcaggatatgcaggcgcgattcatgttcggcaaggaaaaggaagtgactctgccggacggtgagcggctgggcgaaagcgacgagccgcgttcacgttccggtttctcccgtgcaggccatggcctgggaagtgcgctgcatcatgggcgtggtttggggcgtggccttggtcatggtgctgacggcgtgaaggccattaccggtggcgtggtggggcgtgacgacaccggacgcatgacgtggctcgcctcatggctcaaggccggcaaccggtacacgcttgagcagatgcgtgccaatctgccgcctgtgatgcgtcatgatttggaataccgcgatgccattaccatcgcgttcttcgccacgtatatgttgccgcagatcaatggtctgctcatcggattcggttccggcaatatcttccgccgtctcaaccgtgaggcgccaatcggtgcgattcgccgttcggtgcgtgacactttggcggcacgagcccacggcatgcgggcctccggtctggaggatcacttcgccgatctgatgcgcgaagccggcgccctcgacaccacgccgggactggaagcggtgcatggcgccgaaccgttgcacctgtacacctcgacgtattcgagcggctatttctttacgtgggataagtccttggcattcgggcaggcgctgaaatccttgaagatcgaaggcaacctcaaccgattcgctgcggtgagcgcttggctggagcgcaacgcttccttggggcgcaaccctacggaagatacggtgacccgtgccgaggccgcgcaaatcgacatgaaactcattgagaaccctgcgattatggcgcttgacccgtatgatggcgagcaggagcgtcgggccgtgctgagcctggtcgatatcgccgcacgcacggctgggcagattcgcagtgaattccctgatcctcgagatgtgctgacccagcagaacgtgccggattcgggtgtgacgaatgctgcgggcgctgaaagtactgagagtgttgagggcgctgtagagcggaccaataagagcgacaccaacactcaagccgctcggccttcgtattcgccggcgaggagcgacgaatgggtgtatcgtcagaccctctcctcactgttgcgccggttacggttgccgtatcggtttgatgtggagttccggtcgcgcttggattcgggtgaagtggccattggcttcaccactgccggcacctcgatgatgcccgatagccggtatgacaccactcgccgtacgtggcgtgcgctgagcagcgccgaacgcgcgtcgatgagcgccgcctacaacctgcgtgtcggcctgatgatggcagcgctgagtttcggcaccagcgaatccgtgcgccaggtgtcgttgcacatcgattccattggtcttgaagaggcgattgccgaacaggattccgccatcgaggcgatgatgagcgaggccctaagcgccttcgaacatctgcgcagtggcgatttggggcgtgtgggttccaaagccgaccccaaagatggtgatttccatggcgacccgacccgccccatcacccatgaggagacgttcgggcaggcggcgtccggtgacgaacgcggcacggccgggggaacaggcaacggtaccggaccgtctgcggatgctacggatcaggccgcggccgaatccgctgacgccgatggcgccgcgtccatcgattcgcagttcgaagacctgatgaagggcgtcgatatcgacgaaatggcgttcggcatgccggacgataccggcgcaggcgacgacctgggcggtatcggcggcgagggcgtcggcactgacgatgctgatggggccgccggcatggacgatgatccgatgagcgtgctgcgccgcaatcccaccgtgcgcaatatggtcaccgtcaccttcacccgtgatgccttcctcaagcgactggacaccgatgggcttgacaatcccgaggaaacctaccgcatgttcggtgccgtgatggacgtggacggcgaaggcggcctgaaacccatcagcgccgacttcgacttggcggacagccggttctctcccaccggatcccaggaggagcccgaactggccgaccgtcaattcagcccggcgaccgctcacgtgctgggcgcacagaatagtgccggactggctatccagcgagtggacttactgcagcatggcgtcaacgaattccacgatatcgccaggaacacgtcactcggctccgtggaaaaggcccagcgagccatgcagatcatcgaatcgatatgcgatcccgaactgaccggtttggcctctcaggtcaccagtgcgttgatcgatggcaaggacaccccggacttcacgttcacgcttgccgacgatcttgacaaggagcgtctgcgcgcccgagacatgctgttctcgggccaagccgatcaggccatcgaagcggccgaagcggctgtggcccatttggatcaggtgtatgcggcaggccatggcgtacctcgatacttcaactcctatgccgagcgcgtggtctacaaccgactgttcgccacattggacgagcgtacggtgctcatcccggacaatctgttctacgcacacatggagctggctgacgtgttgagccagatcaagggtgccgaggcggccatcccgcacctcaaccgtatggtggcgtacgcgcccgcctacccgctctcacatctgaagctcgccatccaactggcccgcaatgaggattgggattcggcacgcgccgcctgcctgaatgctctgcgcgtggccttggaccgcgacgatgccgcgttcgcctactaccggttcgcgtacgccgaatggatgcttgaccggttcgacacagccgccgcagcctacattatgagcgatcacatcgctcccggggccattggttcgctggagagcgaactgcaggaactggtttcccgtgcggactcgcagtgcatgccggtgcctgaatcggtggagacggccgcccatgtgcttgccacgcatgatctgccggtctggccgcataacgaagtggccgacatcgtgcgtgacgccgcccgcgtgtgcgtggatgaaggcatgttcgtgccggcccgcacgctctcggtggccgtggcccgcatgaatgacggtgaaggcgacaacatcgacatcatccaagcccagttcctgcgctcgctatccgcgtagccgcctgaggggagttgacggtatagccggccgaggggagccgagcccgctaggatagacaaccatgagcacgaatgaacaattggcatgggatttcgacgatggggatgtggccgaggtccggcctgataccggtattgcacgttttgcccctggctccgaacaatggatagccgcactgcagcccactgacgacgacgcgatacgcctcgaccgtttcgacgtgaacacgatgaccgctgaggccgccgcccgcctgtgggctcgcgtggccgcatgggtggaatccgatcagatcgcctactacatcgacgactcacccgtcagctccgacgccgcctacgacgcgcgcatgcgttgcctcgaacgactcgaagcggcgttcccctcattggacaatccacagtcgcccacccatcgcgtcggcggctccttctccaacgacttcacctccgtgcgccaccccagccgcatgatgagccttgacgacgtcttctccatcgaagagctcaaggattggtacgattcggtgattcgcgacctcgattggcccgaatccaagcccctgcccatgagctgcgaggtcaaaatcgacggcctcgccctgaacctcatctatcgcaacggcgtgcttgaacagggcctgacgcgcggcgacggcgttaccggcgaagacatcaccctgaatgtgcgaaccatcggctccattcccgccaacctcggcggccccaaggaagacgttccggacttcgtggaaatccgaggcgaagtgttcatgcgctgggatgacttccacaccctgaacaacgagcaggaggacgccggacgagcgcccttcgccaacccgcgcaacgccgccgccggctcgctgcgtcaaaaagaccctcgcatcaccgccacccgtcgcctgagtttctatgcgcatggtctggggcagctcacctgggggccggaccatccgcgcggcacccatgacgtggtcgccgaccagtcgcaggcctacgatctatacaccaggtggggcgtgccggtctccccgcataatcgtgcggtgacctcattccaggagattctggacatgatcgagtactacggcgagcatcgcggcgacatcgagcacgcgctcgacggcattgtcgtcaaggtcgatgacctgggcctgcagcgcgccctcggtgccacctcgcgcgcgccgcgctgggccatcgcctacaaatacccgcccgaagaggtcaacaccgaactgctcaacatcaccgtgcaggtggggcgtaccggccgtgtgacgccggtcgccgtgctcaaacctgtctacgtggccggctccaccgtggctcgtaccacgctgcacaacggatttgaagtcaaacgcaagggcatcctgatcggcgacaccgtggtggtgcgcaaggccggcgatgtgattcccgaactggtcggcccggtgcttgaacggcgcaaagggcgtgagggccagctgcgcgaattcgtcatgcccgagttctgcccttcatgcggcgcgaaactggcacccgccaaggagggtgacaaggacatccgctgcccgaatgtggaaagctgcccggcccagttgaccgagcgcgtgatttcgctggcctcacgcaaggcgttcgacatcgagcatctgggtgaacagtcggccatcgctctgaccaacccggaggagaaccggcctgattcggtggcgacctacgcgccgaacatcaccgaggttctggtcgcccccggcgaagagcccgaaccgtacgagccggtggaggggctggaattgccagccgcgcagaagccggtgttgtctaacgaatccgggttgttcgacctgaccgccgccgatctgcgcgacgtgcgtgtgtggcgtgaggccgcaatcgtcgaggtgcatgagacggtcggtgcgaacggtaagaagaaaaaggtgcgtaagcgtgtcggcggctctggcctgtggcatcaggtgcctgccttctggaccgcgcccacgccggccaagaagctcacggccaagcagttggccgaacgcgcgcaagaagaggccgcagtcgaatccgccggaacacagggaggtgccgccagcgagacgaccggcgcacctaccggggctgaggctccacttggtactatgccgggctttgccgcagcctcctatcccgagtatgacgtgccggccgacgcggtcatcgtgcgcgtggaccacaagaccacgcgcaccggcgtcacggatgtgccggtgatcattcggcccggcgaaaacacgcgcaagatgttcgacgaaatggacaaggcccgtcacgccgacctgtggcgtgtgctggtcgcgttgtcgattcgccggctcggtccgcctaccgcacgcctgatcgcctcggcgatgggctcgctggcagccatcgaaaacgccacgattgaagatctgacggccatcgacggggtgggcccggaaatcgccgaatcggtggtgaactggttcgccgccacccgcgaacccggcgactggcgcggcgcgactttgcgtgcttggcaggccgccggcgtgggcgtcgacgaggccgagaccagttcgctgccgcagacgctggccggcaaaaccgtggtggtcaccggttctctggaaggctattcgcgcgactccgccaaagaggcgattatcgagcgcggcggcaaggcggccggttcggtgagcaagaagaccgattacgtggtgatcggcgcaaacgccggctccaaggccaccaaggccgaggaactcggcatccccatgctgggcgaagcccaattcgcccagctcctagccaccggcaccatctaaaatagccccctcagacgcttcattaaccccctctgatgagggggctgtcagcctttaggctgactgggggagagaaaaagcgaatcccgccccagtgtgacttactccactccctctggcatgccgccgcatcacacgctagggtagaacaggccctaaaggaggatacggatttatgagcgacgcacgtcagatcgaagccgacatctacgaacgcctgagcaaggtcatcgaccccgagctcggtcgttcggtcaccgacctcggcatgattgccgctatcgaagccgcgcccgcatcgtcggacgccggcacttacgacgtcaccgtgcacgttgagctgacggttcccggatgcccactgagcgagaccatcaccaaccagatcaacggcgcggtcagctcctatccgggcgtacagctgctgcctcatatcgaagtcggttcaatgagtcgtgacaagctggccgatctggtcgccgacctcaaggctgaacgcaagcggaaccccttcagcaagccgggcgtcaagacccgcatcttcgccatcgcctcgggcaagggcggcgtcggcaagtcctcggttaccgcgaacctggccgccacgtttgcggccctcggcttcgacacggccgccatcgacgcggacatctatggcttctcactgccgcgcctgttcggcgtgcacacgcagcctaccaatctgaacggtatgcttatgccggtcaccgcgtggggcgtgaaactgatctccatcggcatgttcgccggtgccgaccgggcgattctgtggcgcgggccgcgactgcagcgctccttggaacagttcctgtctgacgtatggtggggtgagccggacgtcctcttgctcgacttggctcccggcaccggcgccatggcgatttccgtggcccaggcgctgcccaacgccgaactcgtggtggtcaccaccccgcagccctccgcctccgacatcgccgtgcgctccggactcgtggccctgcaggtgccgatgaaggtgcgtggcgtggtggagaacatgagctactacgagcacaagggcgagaagctggagattttcggtgccggcggcggtcagcgcgtgtctgaacagttaagcgcggcgcttggctatgacgtgccgctgatggcccagctgccgctggaacccgaagtgcgcgagatcggcgaagcaggccgtcccgcggtgctggatgtcgatggtgccttgcgcacggatggcattggccagaccttccgagggttggctgaacggctgttggcagtgtgagcctgcgcagcctcacacttttgtaggcggcgctggcgtttaagtccggctcgctgctggtgggcgaatcgcttgaccacagcacccgcgacctggtggtcgaggcagtggagcgcactgccggcgtggataggctgcattaacctgcaggccattcacatggacgaggacgccgtgccgcgctgccttggtatgaatgggggatctacgtcgagcccgatgtctggcgggcacctcgcggtaaatagcggcatagcgcattatcggtgcgatgctaagaggtaatggcccatgagcggttccaatcggcgagattgcgttgccgggacaccacgacatgggccatctcgataaaacgatgccgcgtgtcggctgttctcaggtcatccgcagtgacgagaatggcgatccagccgagcagttgcaatgcgtttcgctttgccgcgtcaattcgcatttgtgccggatcggcgtgataggctccctgatattcgaacgcgacgcggcagtccggatatgccatatccaatatgacgtatgagttgccgatattcacgcgatagttggcggtggggcatcccaagcccgaatccttcagcatcccaaacagcgtgttttccggcggagaatccgtgttctctgtcatgtagggcagtgcctcgtggcatttgttacgacctatgaaccgcggactgatttccaagtaagtatcgaaatccttgcgagtggccattctgcgccgtttatcgcggctcatcaaagaggctccaatggccgcaagttcctccaatgtggagtattgggccatctgagcccacatcatgaccggcgaggcaatccagaaatgttcatagtcctttttgcggatatccagttttcccttaaacacatggaagaccacgcctttgattcgtctgcgtttgttggcactggaaacacaggcgtgcacggcatcaacagatagcgtgcaatgtcgggggatgggcgcgccgtagtagttggccgcattgatgtatcccaccagcaatggaccttttgaacggcgcgcagcatcattgcaacgttcacgttctgctcggcgtcggccgacaatatcctcatgcataaaagagctcatgatgcgaccgtaaagctgatttggacttgaatgcaagccaggcagggcaatgtggttccagcttatggagttatccacattgtctatttgcgcagagaacggttctcagtagtatctgtgcgctcaaatgaacaagaacataacaatctcacatcatcgcaaatggcgacatggcagtgattagggcatatcccatgtgcgcttcgggcgtagagaagtgcgcacagatattattgagaaccgttctctgcgcgcctactctccggtggagcctctggccacgacctcggtgggcaggaacaccgtgcgctggaacggtcggccctcgatctggtcaagcactagggtggccaagctgacgccgaatgcgtccattggctggtgcacggtggtcagctgcgggtgcatggctgtggcgtcggcgctgtcgtcgaagccggcaatggcaatatcgtcgggcacacgcacgccgcggtcgagcagataattcatggctccagcggcgatgcaatcactgccgcatatcagcgcgtcgatatgatgctcggcgaggagctcgggcacgctggcgtcggcgccggcaagtcggctacccgacggctcagccagcgagtccagcagccgcacgacggcgttgcggccatcgggccgggtccagccgtcggaccgaatgaccagtgccgggtcgaaatcgccggccatcgcatcctggaatccgagcagtcgttcgtcggaacatggcaagtacggcggtccgatgatataggcgattcgccgatacccgcgccccaacatatgcttggtgagcttgcgtgaagcgagtcgattgtcgatatcgacggtggggaaggggatggcgctgccatagccgacgccggaaatggcgaccggcacgctgatattggcgaatctctgaaatagcgggtcatctttatggaacgtgttgagaatccatccgtcggcgaatccgctggaggcgagtctggcgatgcgtgcgccggccgcaggggagtcggagatcagcgtgatgagttgataatcggcattgccgagcgtctggttggcgttgagcaggatggtgttgatattggggtcggcgattagcgaatccggctgcccgtgcaccacgaacgccacggtttgcgtgcgttggcgtaccaatgatcgggcggcgttgttcggcgtgtagttcacctgcttgacggcggcggcgatgcgctcggctgccttggccgagacatgcggattgccgttgagataacgggagacggtggcgtaggagacgccggatgccgcggcgacgtccatgatagtggccggcttacggggtatggccatgcccgtctccttcctgtcctaggaccgttcacagtgattgtaccgcgcgattttcctgatgattccgcatggcccatgtccggtgcctgtggattgccgtgccggcgtatgaaagtcggtaaacattctctgccgtaagggtgtacgaagtaaatagtaaaagaaatttaccgatattaagtgaagtacgacacgcacatgatatttgtaaacctttacgtgagtgttatactccttttcgtaaacgtttacaagaaaccaccagtcaatggagacggccagatcaagcgagccgcaacggttcacaactggacgggaaggaacatcatgaagcagcagcacaacgtacgccccgccatccgcagggtgctccaggccacggccatcgtcacggcagcggcccttaccctcgccggatgctcgatgggcgcaccatcctcggacaccggttcgagcgatggcaagctcaccgtctgggtcatgcagggcgatcaaagcgaggccaccatcaaggccatcaacgaccagttcaccaaagagaccggcgtcgaggtcaacatccagaaccagcagtggaaggacatcagcaccaaaatcaccacggctctgtccaccagcaccccccccgacgtgctcgacctcggcaatacgcaggtcgccggcttcgcggccagcggcggcctcatggacctgaccgaccacgctgacgagttgcgccagggcgtcacctggctctccggtctggaagagcctgccaccatggacggcaagctgtacggcattccggccctcggtgccgcccgcgcagtggtctacaacaagaagacctgggccgcggccggcatcaacgagccgccgaccacctacgccgagcttgaagccgacctgcagattctcaaggacgcgcaccaaggcgaggacttcaccccgttctatgtgccgggtgccgattggaagaccgccatccagtgggtgtgggacgccggtggcgactacgccgtgcagaaggacggcaaatgggtcagctccctgtccaccaaggaatcggtgtccggccttgagcagtggcgtgaattccagcacaagtggtcatccgaagcctcccgcccgctcgacaccgatagccccgacaccagccagctcatggccgagggcaagatcggcgccgtaatcggcaacagcgcctccatccgcgtgattcaggaatacaacaaagacatcaccgccgacgaactcggctccttcccgatgcccggcctgagcggccagaaccagccgtcgatgatggccggctccgtgtggggcgtggcccagaaaagctccaagcaggatcttgccctgaagtggatcaagatcgcctccagccctgacatccagaacgactacgtgttcgccaaggacggctacctgcccaacaacgtcgaaggactggacaaggccatggcctccgacgacttcccgaccgccctgaccggcttcttcgaggccgccaagcgcaccaaggccacgcccgcctccccgcagtggaccaccatcgaaagcgacggctcgctgaccctgttcaaggacatcgccaccgacaccagcaaggccgaggcctccgccaagaagttcgacgaacacgccaacgagctgtatgccaagtgacgggtcggaccatgacaagctcaacgcaactcgcgcacggcgaggccccggcctcacggccggctaagaaacgcggcaatcacactccggcgttcctgctgacgcccgccggcatcgtcatcatcgcactggtggtcatcccgctgggattcatgatcttcacgtccttcacggatttcagccagcgcacgctgttcaccggcgaattcgacttcgtcggcctcaagcaataccaatccgtactcaccgacccggccttctatgcggccctgctacgcaccttcggcttcaccgcagccctcgtggccggcagcgtgctggccggcatgggagtcgcccagctgatgaccaaactcggcggtgtgatgcgctacctggtcatcttcgtgctcatcttcgcgtgggccatgccgaacgtcgcatcctcggtggtctggaagtggctgttccagcccggttacggcgtcatcaactggctgctcacccagctgcacgtcttcggcgacatgaccaacacctcctggatcgacaacacctggctcgcatttctggagatctggctgctcgtggtctggcaggccgtgccatacatcgccatcacgctgtacgcggccaccacccaggtcgaccagtcctgcatcgaggccgcccagctggatggctgcagcaagctgcgctgctactggcagatcgtcgtgccgctgatctccccgagcatcatggtcatcaccatgctctcgattatctgggacttcaacgtgttcaaccagatctggctcatctcgcagggcggcccacaggacacgaccgccaccatcggcatcttcacctataagaaggcgttcgtcagcttcgaaatcggcaccggttcggccgcctccgtgctcgtgaccatcgtgctgctcgcgctgacctccgtgtacatccgttacctgctcaagtcaggagaggacctatgagtacgtcaatgagtgcaagtcctgcacaggccgtatcgcaggccgcagcgcagtccgcatcaccccgccgccgaaccaaccccggcaagatcgcgcgccgcgccggcaccactatcctcgccctgctgttctgcgtcgtatggttcttcccggtctactggatgattatcaccgccgtaaagcctcgcgatgagatcatgaccacgacccccgtgttctggcccacgcacctctcgttcgacaacttcatcgttgccgtgacccagacctcgttcctgaccaacctcaagaacagcgtggtcgtgaccgccatctcgatcgtcctgtcgatcatcgtcgcgttcttcgcgtgcgcggccctgaccctgtaccgcttccgcggccgcaagccgatcatggtgttcgtactggccatccagatgacctccggcggcatcatcccgcagttcatcatctacaaccagctcgggctgctcaacaaatacagcggtctgatcttggcgtacatcgccatggtgctgccgttcgcgatctggaacatgcgtgggttcttcctgaacatcccgaaggacatcttcgaatccgcggccgtggaaggcgcgaacgactggcagatcctgtggaagatcaccttcccgctggccgcgcccggcatcgtctcgacctcggtgttcgcgttcatcaacgcctggaacgactacatgatcgcctatacgttcatgaaggaccagtcgaagtacacgctgccggtatggctgtcgtccttctcgacacccaccatgggcaccgatttcggcgggcagatggccgcttcggtgatcttctcgctgccggtggtggtgttcttcatgctcatccagcgtaacatcatgaagggcgtgacgaccggtgccgtgaaatagcgtatgccgccgtacctcaccaacgattcgtccgctgatggcggcgcgaccacgtgtcgcctgccattagcggacgaacgataataaaaacagtatgaaaggaacagctgtgcccacattcgaatatacagtcgatgccgcaacgctgtgtctcaccctgattcccgctccggtgacattggaatacacgcatggcacggctatgatcgggtccctggtgacgatcgagaaacgaattcccgaatatgccgccaccgaaggtgccgatgagacttggga

SEQ ID NO: 2035 - DNA, 9266 bp, Unknown
  R17_18m  MAG No. k141_42057
aacaattccggctcttccggctccgattcaggaacaaccaccacgccctccggccgactctggcacgccaccgtagcccaggctcaggcctatgccgccggtgccgccgcgcagcgcgggtggacaggcaacgactgggattgcctggtcaaactatggaaccgcgagtccagatggctgtggtatgccgaaaacgcgagctccggtgcctacggcattcctcagtcgcgaccagcagacaaaatggctgcgttcggcgccaattaccgtgacgatgccgccgtacagatcgattggggtctgtggtacatcgcacaagcctacggcagcccgtccaaggcatggcaacattccgaacaaatcggttggtactgatcggttacgaagcccacaaggaacacacgcttatgaacgacaccattcccgccaccggtcacctgttaggtgccgccgatatccgtcgtatcgcggccgatgccggcatcagccccaccaagaaattcgggcagaacttcgtcatcgaccccggcacggtccgtcgtatcgtacgagaggcgggagtgaccgctgccgatcatgtcatggaagtcggccccggcctgggatcgttgacattggcgattctggaaaccggcgccaccatgaccgcagttgaaatcgatccgccgttggccgaacgactgccgggcacagtcgccgaattcatgcccgaagccacatcacgactcaccgtcgtcaatcgggatgccttaaccgtcaccccggagaacgtgcctgatttcagcgatgacgcatcgtttacgctggtcgccaatctgccgtacaacgtggccacgccgattctgctcacgctgttggagcgtttcgacaacctcggctcgttcttggtgatggtgcaaaaagaggtggccgacagactcgccgccaagcccggttccaagatctacggcacgccgagcgtgaagctcgcctggtatggcaccgccgaacgggtgggcaccatcggccgcaatgtgttctggccggctcccaatgtggattccgcgctcgtcagattcacccggtatcaggccgatgacccggccgccccgggagcctcgaacagcacggccgacggcggcgcacaacgggaactcgtatttcgtctgattgatgcggcgttcggtcagcgtcgcaagaccctgcacgcggcattgaagaccattgcgccctccgaggcattctccatcgccggcatcgatccgacccgtcgaggagagacgctcaccatcgccgaattcaccgctctggccaaggccatcgaatcgtgtggagatggagatgaggcacaatgagtccggtaatctcacatccacacccagccgctgcccgacatcagttcgatgagctctcccccatcaccattacggtggattgcccggcgaaaaccaatctcaccttggaagtgggacctgctcacgacgaatggggcggacgccacgaactggacaccacctactgtgcaatcggcgtatacgacaccgtcaccgcaaccgccaagcaacccggagcgggattctctctggagctcgaaggcgcttatttgggcgacttggcctcctcacgcagcgacatgcgccgcaaccatgcggtactggccctcttcgccatggcccaggcggccgagcgcgagccggatgtggcgttgaccatcaccaagcgcattcccgtgggtgccggactaggcggcggttcagccgacgccgcggcgaccatgctggcggtcaatcgtctctgggagctgaactggcctatagagcgtctgcgcaccattgccgccacgttgggcgcggatatgccgttctgcctgaccggtggccttgcatacggcaccggtttcggcgaacgcatcacggatatcgcccccggcagccgcgatgagctggcgctgatagaacagggattcagcggcgaagtattggtcggcgcgtaccagtcgcaactcagcactcctgaggtctaccacacctttgacctcgtgggagccgcagaaggcgaccgcaatcatctgcaggctgcggcaatcagcctgcatccccgcagcgggcaggccatcgacgccgccacgcaggcgggtgccagccatgcattcgtctccggatccggcccctcagtggtcgctttcgccgccgacgaggcagcggcacaacgcattatcgatgtgtggcgcgatacggctgtggtcgatcgcattattcgagccaaatctcccgcacaccccaatatcggcgtcagacagtgacgctaaggtagcaaccagccacccgacccatgaaagaagtccaccgatgacgtatcaggttgatgaacgtgaagcccgcaaggcgtacgtgcgccaccgccagaccatcgtcttttccatcagcggcgcggtattggcagtagtgctggtcatagccctactgttcaatttccacgttttcggcctcggcgaagtggagactccggcccgccagccgaattacggcaacgcggcgccgtgcgcggtcaaggacagcagcggcaaagcgcaatacgtgtccaacgcttcggtcggcatccgcgtgatgaacggcacctctcacggccaattcgccaaggccgtgggtgaggctttggccaatcgtggattcagcgtgcagaaaatcgataactattccagcaccggcgttgaacgcaccaccatctacttcggcaagaacgccattaatcaggcgtatacgctgatcggcaatttcaccgacgccaccatgatcatgacggctcgcgaggatcaactcatcgatgtggtcatcggcgccacgttcaacgatctgcaggacaccaaatcctccccacaatccggtaagaccatcaccaatatcgagggttgcaaggccgccgatagcatgaccaagctgcccgccgacaccaaacacgacgcatacacggcggagtaaggcgcatacagcttcatcttcgcgaaaaaccgtacgctgacacgtattcagcgtacggttttttggtatcggactagtatcggactactgaatctcggcgtaccagcgcttgagttcttcgacggccacatcgtggtccaccggaccgttatccaagcggtattccagcatgtgcttgtaggcgcggccgatcatcgggccgggctccaggcccagcaactccataatttcgttgccgtccagatccgggcggatcgcgtcgaagtcctctttcttcttgagttcgcggacgcgctcctccatctcatccatggcctgggagaagatcatcgccttgcgcttgttttgtgtggtggcgtccgcgcgcgtgagcctgttcagccgctcgtacaggtgcccggcatccttgacataccggcgtacggccgagtcggtccacggctcgtccacatagccgtggaagcgcaggtgcatattcaccagttccgagacgtcctcgaccagatggtggtcaaaacgcagcgccttcaaacgcttgcgggtcattttggcacccaccgcgtcatggtggtggaagctcactttgccgcccggctcgaaccggcgggtcttcggcttgccgatatcgtgcatcacggcggccaagcgcagcgtcaggtcgggggcgggcaccgggccgtccgggccggtttccagggcgatcgcgcgttcgagcacaatcatcgtgtgctcgaagacgtccttgtggcggtggtgttcgtcgatctgcaattgcagggccggaatctccgggaagacgatgtccgcaagaccggattcgaccaacgcctcaaggccggcgcgcggacggtcggagagcagcagcttggtcagttcgtcgcgcacgcgctcggcggatacgatgtcgatgcggtcgcgcatcgaggtaatcgcctcggccgcgtccggcgcgatacggaagcccagctgggccacgaatcgcacggcgcgcatcatacgcaacggatcgtcgtcaaaggactgtcgcgggtccaccggcgtgcgcaacacacccttggacagatcactggcaccaccaaacgggtccacgaattgcaggtcgggcacgcgcagggccatcgcgttgacggtgaagtcgcggcgggacaggtcgccctcaagcgtgtcgccataattgacctcgggcttacgcgagtccgtgtcgtacgtgtcggagcgataggtggtgacctccaccttgacctcggtgccgtccgggcggcggcgcatggcacccagcgtgccgaacttgcgccccatgtcccagaagccgtcatgcccccaccggcgcagtatcggctcgaactgctcaggccgtgcggatgagcagaagtccaaatcgtggctctttctatggagcagcaaatccctgaccgggccgccgaccaatgccagctcgtaaccctgttcggcgaacagtcgaccaagttcgatggcttcgggccatacttcgaaattcaatgggcaccttcccgcgtgcgacgtttttctgccctaccagcataccgttaccccacctgcacacggggttgagtaaggtggagaatatgattacgcccgccgaccttgcccgcatactggggcaaacaccagattcggcggatagccatacccaagaccacctgctgtatacgtccgaaactccgcatcattccgccgattcgggcgattctcccgatgccggcggcaccgtgagccactccaccaatcaggccgttcatcaagacgaagtagacgcagtaccgactgcgcaacattccggtgtacccggcacacccgcaacgcccgccacacccgcaccatccgaatccgaaatatcggacgccgccagcgacatgcccacaccgaagccgatgatgcccacaccggccaccgtcttcggcatgcatgccaccgtcaccatcgccactaccagcggcactatcgaggggcaggccgatggtatcgccggcgaggccggtgccgagacgattgccgaggtcgagccgattatcgccacggcacaaacgtccgtaaccatcgtcacgaacgattccgcggcgaccgcccacgcggccgtagatactgccgttgcggtcgccaaggccgccgccgcgcataccgcagcgataccgactccgcgcgacgtgctgatgccgcctgcggcacgtaccgcaccggccgcaacgccggtcaccatgccggtctcagcgccgtctgcagcaccagtgaggcccgcaacgtcagcgcatcccacgccggccacggtcttcggccggcatccgtccgcggatgttgcctcgccggaaccggcagtgccagtagaaccggtaacgccatccagcccgactccggccatgatgccgcaacgccgtacgtcggacggtccgaccacattcgcttcactggatgcccaggaactgccggtcgtacgcgaatattcggcaggcggtctgattttcgatgaccagaatcgcgtggccattatcgcccgtcattcccgctccggccatctcgaatggtgcttgccgaaggggcatatcgaaaaaggcgagaccccgcagcagaccgctgtgcgcgaagtgcatgaagagaccggcatcctgggcgaggtgatcgattccatcgccaccatcgactactggttcaccggcaccacgcagcgcgtgcataagctggtccatcacttcgcgctcaaacagaccggaggcgaactgacggtggaaggagacccggatcatgaggcggaagacgccctctgggtacgttttgaagatttggatgacgtgttgagctatcccaacgaacgcaaaatcgcgtggctctacgccaggaagaagaacaggcaggcaaacgagtgaacctacccggagtcttacgacattgcacacgtctggcacacgcactggcggctggcgtcgccgttgtggcgatgctggccgctccattgaccgtctacgcgaacgatacgacggacacgactgattcatccgatacgacggacgcaacgggcaatcagaccgagaatcagcccaagcagagcattgccatcacgcaaagcacccccatcgtcacctccaaatcgggctatcatgtcaccgcggtcatcagcaatacggacagcacggccacgtcaagcggcacactgcacctgaccaccaatacgctgttcacctttgtctcgcgcaccgatattcagaattgggccgagaacaacgcccccatccccacccccaacgagttgggttccgttgacgtgccatcgattcccgccggcggcactgccaccgtcaccatcgaggtgaacgccaatcagcagacccttgcctccatagggagctgggggccgaagccgctgatgctgtcgtatatcgtcggcaatcggatactcgccgatttgccgagttttctgacccgatcttcggatgggctcaacaccgcgacgacaccggccatgaacctgaccgtggccatgccctacaccgccagcggctggcaggtcgataacaaggccatcagcaatcgcattgccgaaaccaccacttcctcgacatcaacatcgtccaagtccaacagcacggacaaggccgacaagtccgataacgccgacgccggcaacgcggccaaagccactgatacgcaagccatatccttatccgggcaggatgccgataccgcgcgatcccttgggcagacattcgccaagcaccgctcgctgcaagtgatcgcggatcctctgtattggcgtcagtccgcagtgcaaccgtccattgccggcatcatgcagcccgccgactttgacatcaccgcctataccgcgctgggtgataccgcggcctacgaaaaggccggcatcaccactgaacagtggaacgccaagcaggcggccgcatggtatgccgacggaggcgactccgaaacaccctccgcgtacgcatggcagggcaacaactgttggacgttggatgcgctgaccgcagcacgcgagcagggctatgacacggtgattgccgatgcctctttcgatgccgaccagactgaagccgtacacacaggcacctacgtggtggatacgcctgccggcgatgtcaccgtgctgaaggagcaatcgaccttgggcatgctggccaagggccaacccaccagcacggacgcgcaggccgagtccagcgatgccggtcggttggcccgactggtcgctcagagcgcgttctaccagatggaacagccctatacatcccgatacctgcttatgacgttctcccgcaccacggaggccagctggatcgatcaggtgatgagcgccttcgagcaggcgtcctggttgaatctgacgaatctgaagaccatggccaaggccgatccgtacaatgtcagcgattcggtcaatcccgacaaggccgatgatgccaacaccgccaatacccggtcggcattgagacagttggccgacagccggcatgacatcatgcgcatggccacctccatattgaagaacgagattgattccgacgaggtctcgtcgttggccccgcaggccctggcccggcaggatgccaatgacaccgtctcgcacagcaacgatccgacgcaatggattggctctttgctggtgctgcatgacgatatggcgctgcgatccatgtctggctccccccagccgacagccacgcgaaaagccatggtcagagccgcgaaaacactggccagcgatcttctgaacggcgtacgcatcaacccatcggaatcaatatccgtgttcagcgaatccgcgaaaatgccaatcaccgtcagcaatgaccttccttatgccgtcagcgtgcaggtcaactcgctgactgactccatgcagatcgtcacctcgcgaaccactgacatcgatattcccgcgcatagcgacgctcaggtgaccttcaccatccgcgtttccacttccggctcatcgacggcccatgtgtcgctgagcgaccgggaaggcaacagcttcggcaacacgcaggataccgcgatcaccagtgtgatgcgcgtcagtgatgccagcggtttcattatcatcggcttcgccgtgctactgtgcattatcggcctgtggcggcagttccatcggaagaaggaccccgacgaatgagttcaaccgtaggtcgtaattccctgatcatggccacgggaaccgctgcttcccgtgtgaccggtcagctccgcacgattcttctcgctgcggccatcggcaccactggattggcggccaacgcctatcaggccggttccatgattccccaatccgtgttcacgctggtgtccggcggcatcttcaacgccgtgctggtgccccagattgtgcgcacgttgaaagaaaaagacgcccaagaacgactgaatcgtctggttacgttggccatcggcatcctgttggccatgactgtggtgatggcggcggccagccctctgcttgcccgcctgtacgtgggtagcgacgatcaccagatgatagccctgaccacctcgttcaccctgtggtgtatgcctcaggtgttcttctacggcctgtatacggtattgggtcagatcctggccgccaaagaccatttcctcacgtatgcgtggagctcaaccggtgccaacattattagttgcgccggttttactggttttattctgctgttcagcaaggccaatgaacagcccctcgaattctggaccgccgacaaaatcgcgcttaccgcaggcacctggactttgggcgtggccttccaagcactgatactgttcctgccactggcccgtatcgggttcaagtacaaacccagcttcgggcttggcggctttggactcaggtctatgggtcccgtggcgttaggctctttgggcgtggtggtcaccagcgagatctgcggcattatccttacccgtatcgccacatccgcaccgcagcgcgcccacgaactgacgggtgccagcctgttcagcgtggcaggcaacgcgacctatcagaatgcgtacacactgttcatcctgccctattcgctcatcgccgtatcggtatccacggctgtgttccccaaaatctcccgttctgtcgcagctgcgaatctggatgaggcacggcacgatctggtgagcgcgctgaacaacgtagggctgctgatcatattcttcgccgccgccatggtcgtgttccccgaaccgatcatccgcgcattgcttccgtccgtctcgatggacgagaccatgctgatttcctacgcgcttatcgccctatctgtgggcactcctttgggatcggcgttcctg

SEQ ID NO: 2036 - DNA, 5620 bp, Unknown
  R17_18m  MAG No. k141_42090
aaggaacagctgctgcactcctttaactacaacttccgcgaccgcaaggctcgcaagggcgatttccgtaagctgtggattcagcgcatcaacgctgctgtccgcgctgagggcatcacctacaaccgcttcatccagggcctgcgtcttgccggcatcgagctggaccgtcgcgctctcgccgagctcgccgtctccgacccggacaccttcaagaccatcgtggacgccgccaaggctgctctgcctgaggacgtcaacgctccggttgaggcctgattgcttgaagtcgtgacttcacactagaaaccccgcttccgagcggggtttcctattattagccccccctctgacgaggggggggctcccgcgcagcgggtggggaagagaacaaacacatgaccaacggattcaccaaactcacagagcagttcctcgtccacatcggcgtggagcgaggactcgccacggccaccgtcaccgcctacgaatccgatatcgccaaatacattgattggctcgaaacccgcggcatccacgaaccggacgccataaccaaacaagacgtcgaagactacatcgccgcccttgaccaggcgggggagtccgcccgctccaaagcccgaagactggcctcgatccatgaattccatcgcttcgcgctcggccagcacgcggtgactgccgacgtttctgccgcagtcaaggcacccaaaggtgccagcaccctgcctgacgtactcaccgtggatgaggtaacccgtctgctcgacgcggcggcagccggcggctcaaccgatccggtggtattgcgggacaaggccctgctcgaattcatgtacgccaccggctgccgcgtctcggaagccaccggtgtgaatctggacgacatcgacctggacgagcacatcgcgcgactcatgggcaagggctccaagcagcggcttgtgccattgggcagctacgcatgccgggccatcaccgcatacctcaatgcggggcgtggcgagctggaacggcgctccagcgccaagattcccgagagacgcgcactgtttctcaacaaacgcggcaagcgcatctcgcggcaatcggtatgggaaatcgtcaaagcaaccggggagcgggccggcatcaccaaaccactccatccgcacaccttgcgccattccttcgccacgcacctgatccaaggcggcgcggacgtgcgcaccgtgcaggaactgcttgggcacgccagcgtgaccaccacgcagatctacacgcacgtaagccccgaaaccctgatcgaaacgtatctgacctcacaccccagagcgcggtgagacacaccattttgcgacgcgcccgcccatagcggaatcgcggcgggggggggagcaccaaagtcggccggaaattcaaggcgtgacaatacagtacataacagcgaaccgtcagccaggaagaggtattcatgctgcagatcaaatcgatctcgaagcgctataaaaccggtgatttcgttcaacaggcgcttgacaaagtcagcctgaacctacgcgacagcgaattcgtcgcgattctgggtccctcgggttccggcaagaccaccttgctcaacatcatcggcggcctcgaccggtatgacgacggcgatttggtgatcaacggcatctcgacgcgccaatacaaggatcgcgattgggattcgtaccgcaaccacaccatcggcttcgtgttccagagctacaatctgattcctcatcagacgattctgtcgaacgtcgaactcgcgctgacgatttccggcatcggcaaggccgaccgtcgcgaacgtgcgcgcaaggcgctggagaaggtcggactcggcgaacacatcaataaaaagccgaaccagctgtccggcggccagatgcagcgcgtggcgatcgcccgcgcactggtcaacgacccggacatcgtcctggccgacgagccgaccggcgcgctcgattcggacacgtccgtgcagatcatgaacctgctcaaggacgtggccaaggaccgcctcgtggtcatggtcacccacaaccccgaacttgcggaacaatatgccacgcgcatcgtcaacctgcgcgacggcgtgattcgctccgactccgacccgtttgtcgtggatgagacggccgaacagccggccgtgcacaagacgatgggccgcgcgtcgatgtcgttcgtcacgtcgctggcgttgagcttcaacaatctgaaaaccaagaaggcgcgtaccctgctgacctcgttcgccggctcaatcggcatcatcggcattgcgctgattctatcggtgtcgactggcgtgaacgcatacatcagcgacatccagcgtgacacgatgaccgcctacccgatcaccatcgactcccagaccttcgacctgagcagcatgatgggcggccagatgggcggcgatgacggatacggcggcaagacgcacagaaccgacggcatctacccggacgaccgcagcgtcaagcaggcatccagcctgaccagttcgattaccgaaaacaacctgacccgcttcaagaaatacctggataattccaagagcgagattcaccagtatgtgggttccgccggtatccagtacacgtatgacgtgaaattctccgtgttcgaccacgaccccgatggcacgctggtcaatgcggacggcgtgacgatcggtgccagcgactccacttcaatggcctcgcagatggcgtccacaagctcgtccggcatgtccggcacctcgtcgatcacctcgcagcagatgtcgatgctgaccggcaaaaccgatgagaacgccgcgcccgactcgttcaatgagatcatgcctggagcggacgacagcaagctcgtaggcaaggtcatcaccgacaactaccaagtggtcaacggttcatggccgaagtccaaggacgaggtggtgctggtgctcgacgacaacaacagcgtgccgctgaccacgctgtacgagctcggcctgctgcccgcctccgactaccacgagatgatgtccaagctcaacgccggcgacaaggtcagcactccacaagacaagatcgactatgctaaggcgctcgaccagacgctgtacatgattccggcatccgaccagtacgtcaagggcgatgacggccactaccgattcatcggcaacgacaaggatgtaatcgaacagcgcctcgaaacggccaccaaactcaaggtggtgggcgtcgtcaaggcgaagaaggatgcttcggccacaccgttggccgctggcgtgggatacacgcgcgctctgaccaatgatctgatcgaccgtgcggcctccagcgccatcgtcaccgatcagaaggccaacccgaacacgaacgtgctcaacggcatgacgttctcgccctcggacgacgccaccaaggcggccgacgcgcgcacctacgtggtttcgctgggcgtgacgcagaaggcgaacatggccaagtcgatgatgagtgccgggcagcggtccggtacgggcgatcaggccgacgcgatggccgcgatgagcgaacagcagctcgccgacagtttcgactcgtatatcgccacggcttcgaacgacgtgcttgtcgcgatctacgaccagtacgtgtcgaccggcacctacgacgacaacctcgccgcattcggtgtggtgagtcgtgacgcgcccagctcgatcaacgtctacgccgacagcttcgaagacaaggaccacatcgccgacgcgattaccgactacaacaacaccgtctcgaagaaagacaagatcacctacacggattatgtggggctcatgatgagctcggtgaccaccatcgtcaacgtgatttcctacgtgcttatcgcgttcgtgtccgtctcgttgattgtttcctcgatcatgatcggcatcatcacctacatttcggtgctggagcgcaccaaggaaatcggcatcctacgcgcaatgggtgcctcgaagcacaacgtgtcccaggtgttcaatgcggagaccggcatcatcggcctatgctccggcctgttgggcgtgggcttgaccgtgctgctcgatattccgatcaacgccgtgttgcatcacttcatcggcaatgcggacgtcaatgccgccctgccggtgaccggcggcgtggtgctggtgatcctaagcgtggtgctcacgctgatcggcggcctgattccctcgcgcaaggcagccaagcaagacccggccaccgcactgcgcaccgagtaagcgcatcgacatagtacgagacgagatccataaacctcggaacactggaatgcccgctgcaaaacggtgttccgaggcgagcccggcgagtacattaggataggcgagcaggtattcccggcaaagggggcgaggggcaacgatggacgactggcgagacacccgcgataaagacagcgcattccgtcaaggaacgctgcctatggcgggaacgtatgtcgttgcacccccagcgaacccggatgttgataaggtagacagtatgcctaccgatttgcttggacgtgaatacgaaaccttccccgcacccgaaccgctgcaacagcacggtccggcgcgtgtcattgccatgtgcaaccagaagggcggcgtaggtaagaccaccagctccatcaatatcgccggtgcgttggcccagtatggccgccgcgtgcttatcgtcgatttcgatccgcagggcgccgccactgtgggactgggcgtcaacgcgaataccgtggagaacacgatttacaccgcgctgttcgatatttccgtggacccacatgatgtggtgcagcacaccgcattcgagaacatcgatgtgattccggcgaacatcgatttgtccgccgccgaggtccaactggtcacagaagtgggccgggagcagatcctgaacagtgtgctgcgcaagctcaagtcggaatacgatctcatcatcgtcgactgccagccatcgctcggcctgctcaccgtgaacgcgcttgccgcagctgatggcgtgatcattcccgtggccgccgaattcttcgccttgcgtggcgtggccctacttatgcagtccatcgaaaaagtgcagtcccgcatcaatcccgcattggaagtggatggcgtgctcatcaccatgtacaccaagacactgcactgcgaagaggtctgccagcgcatttacgaggcgttcagcgaaaaggtgttccacacgttcatctcccgctccatcaaactgcccgattccacggttgccgccgcgcccgtggtggtttatgcccctgagcacaagacatcaaaggaataccgtgaggtggcacgtgagctcattgctcgcggcatcgtggcgtaacgattgtttcgataaacgatgaatgagacttccctttctcggctcccctctctgagggaagctggctcgcgtagcgagactgaggggagctccgcggaagccgaaatcagcacggaggaatccgccacttccggcttccgggtcaacctcgaggtctattccggtccgttcgatgccttgctcggcatgatcgccaacaacaaactcgagctgaccgaagtttccctctcctcgatcaccgaggaattcctgacatacgtgcgcgggctcga

SEQ ID NO: 2037 - DNA, 3791 bp, Unknown
  R17_18m  MAG No. k141_42724
cgtcatcgacttcgacgccagcctcttcccatacttcatggaatggaagtcgatgggtgcgggcgactacgtggtcggcctcgaaccctcgaactccagcgtccacggccgcggctggcacgagcagcgcggcgacctgcacaccatcgccccgcagaccagcgaacgtaagtccctgaccttcaccgtcatcgaaggcgaggccgcgattgacgggctcatcgcccgccgcgacgccctgcttggctgaattgtgagataatatcggccgatatgtgaacggctgattagcgtggggagcatggttacccgggattcggaacagtatctgcgattcaaacgggagcacacgctgccctcgcatgaggcgattatggactggtatcgcggcaccggcatgcgtccgtatctgcaggcgcttgacgacgccggccgcaagaagttcgaggccgaagtgttctcccaagtccgcgaggaataccccacacagtcggacggcagcatcatcttccccttcccgcgtttcttcttcctcgcgactcggtagaagctcgccggattcgtgtactgggcggcgcgacctgtttcccgcgccgccagctgtgggttgacctcgctactgggcttgcggtgatgccgctggctgctgcgctgcttccgattgcgatggcatttgcatatgcggtgcgatgctggggagtgtgccgtcatgcatgcactgcttcaatatgaggtctcgctgggcgatgaggtcgtcttcgatctggtcacgcacgtcgcgcacggacgagaaatacaggtagaacgtggcgtgattgtagccggcgagttcggtgatctgacgcaccgagatcttctcgatcggcttggtttcatacagcttccagaacgcctccttaaggcgattgaccgtctgctgcgtaagttgcgggttcttcttgattgcgattcgcggtatggtgatttcgcataagacgcacaaccccatcgattcgtcggtcaaattcgtgaccttctcgatgcgatgctgtcgctggtggtcacgcaggacgtgctgttggaatcccagggaaccgcgcacgcggcgcaatcctcgggactgttcggcatcgggctcggcgtggtggccgtgatcatcggcctgtggatgttgctgagacgtaagtggacggcaacggaataggaatagtgacagcggaatagcgcgcgtgatattggtacgcgacgtatcgtaaaagcggctacaatgcttacggaaaaagtctttgcaacgagaaggaagacatgactgagcggcgtcgagcacggatgaggattcgtcgtcaacgaatttacgttgtacggcgcattgtggttgcggtatgcgcattgttgtgctgcgttcttgccgtcttctcgacgattgacgcccaacgggtgtggccccgcggtgagtcggtcgcacaggggcaggcagaggttcaggggcaggcgcagaaggtgagtcaatccgcgcaacagtcggcatcgcgagtgtctgcatcggcctcatccttggaccgccagcaggtaccggtctttaaccaggcgattcaggagcagcgtgacaaggaagcgcaacgtgcgcgatggacgaatcccaccggcaagcagcctgatttgtcgcaatactccgatctcagcgtgaaagtcagtatcgccaagcaggaagtgtatgtgcaatccggcggtgagaccatctacacgatgatcgccagcaccgggctcaacgatacgaccccgcgcggcaactatgttatcgggatgagaggcgatcacttctacaatcccgcagaaggcatgggtgctgattattgggtgcgattcaacggcccgttcctcttccactcggtgccgaccggggcgaactccggcgagtatatggaagaggaaggcaacaagctcggtcagccggcctcacatggttgcgtgcgactcactgtggccgatgccgaatggttctacaaccaaattccggaaggcacgccggtcaccatcgcctgaggcttggcctgagatcgatactgaggctatcgtgctttaggcgtctgatattggtcgtcggtagtgaagcaggtgcgatagaccatggccatgatcagaccgtcggccagcaaggtcagcgcggcgatggcaccgaagaccacgaactggtatttggcggcgttcagcggatctccgccggctatcacctggcccgccatcatgcccgggatggtcacgatgccgctggaggccagcgaagcggtggtgggcagcagtcccagccgaatcgacgagatgacggatggacgggcggactcccatgccgtcgcccccaaggccagcatcatatccacctcgtcgcggcgttcctccatgctttcatagaatcggctcagcccgacagcgagcgcggaaacggtgttgcccagcagcatgccggtcaggggcaccaccagctggggcgcataccatgggtgtgggcgcacgatgagttcggtgaccaacgccagcatgagcagcatcgtgatgaccaggctcaggaagatcggtccggcaagacctttggggatgccgcgcgcgcgggatatcacgatctgcaccgccgcgaccagcatgaccgtcatcagggcgaacaccatccacacgctgttcgaacgaatcacgtagctgatgatgaatcccatggcgcacagctgcacgagggcgcggcatgccgaccacatcagggtcctgccgatgcccatgtgcatgagttcgctgacgatggccgccacggccaccatgcccaacgccagaacaagaccccaggtgtcgatgtcgtaggcgccgttcatgggcgcacctccttatcccgcgtcagatcggtgagccgtcccgcatcgagcatcagcgtgcgggtggcgcgtccgtccggcggacggtgtcggatgcggatgatcgccatgccgtgtgcggccgcgtccgccatgatcgcggccactttggatgcgttgtcgtcgtcgagtccggcgtccgcctcatcggccagcagcaccttcgggtcggtgagcagcgtgcgggccaacgccacgcgtgccgcctgaccgcccgacaggtcatgtggcgcgcgcgccaggtcgatgtcctcgcagcccatcgcgtccaacgtcgtgcggatgcgctcgtcgggcagcagctgctcggccctgccccccttgcctcgaatcgcgagcgtccagggcagccggatcgcctcggccacgtccttgccggtcagtatcggtttttgcggcaggtaggagacgtcccgccgccactgctgtgcgctgaattcgtcactgcccacgccgtcgaggacgaacgtgccgtgtgcgtgcgggttgagtcgggcgcatgcggtcagcagactcgatttgccggagccggacgggcccaccaggtcgatgatgtcgccgcgttccatgctgaaggacaggttgtcgaacaccgtgcgttcgtcgtccgccggcgatcgcgcggggacgacgcaggacacggatatggcttcgaagaaggatcgcatattcatccagtctagtcgggggtcacgtgggaaaccccagcgttcacttcctgtatacccggtgtggcataatagccgaggcaatttttgggctttgcctaagctagtttgaatttgaaataggtgaataacgtggcacagactactaacgacatcaagaacggatccgtcctgaacctcgacggacagctgtggaccgtcatgaagttccagcacgtcaagccgggcaagggccccgccttcgtac

SEQ ID NO: 2038 - DNA, 5275 bp, Unknown
  R17_18m  MAG No. k141_43033
gttcaacgacaagaccaacatcaaggttgttggcgtcggcggtgccggcggtaatgccgtcaatcgcatgattgccgagggactgcagaatgttgaatttgtggcggtaaataccgatgcgaaggatcttctgcgctccgacgccgacgtgaaaatctccctgtccgatcagtccagccgcggactcggcgctggcgcggacccggagaagggtgccaaggccgcacaggatcatcagtctgatatcgaggaatccctgaagggtgccgacatggtgttcgtcacctgcggtgagggtggtggcaccggtaccggcgccagcccgatcgtcgctcgtgcggctcatcagcaaggtgctctcaccatcgcggttgtcactcgtccgttcagcttcgaaggtcctcagcgttccgcttccgccgaatacggcatcgacaacctgcgcaaggaagtcgacgcgctgatcgtcatcccgaacgatcgcctgcttgagctttccgaccgttccatcggcatcatcgaagccttcaagacggccgataccgcactcctcgccggcgtgcagggcatcaccgacctcatttcgatgaattcctacattcacgtcgatttctccgacgtgaactccattcttcgtggcgctggtactgcgctgttcggcattggttccgcgcggggcgaagaccgcgccacccaggccgccgaaatcgccatcagctccccgctgctcgaggagagcatcgagggtgcccacggcgcgttgatcaacattgccggcccgaccgatctgaagctgcaggaagcttccgccgccaccgagcttgtacgcaaggccattcaccccgaggcccagatcatctggggtcttgctctggacgatgcctatggcgacgaagtgcgtgttaccgtcatcgcggccggtttcgatccggttacaccgcaggatccctctgccgccgctccggcaattgccgtaccggccgcccagccggctgccacgcaaacgcagcagcccgccgccgctccggccgcccagcccgtggccactccgcgtccggaattcaccccgacgaccgcagacccggcatccctgccctttgacgatccgactacctcgcatccgaacatcgccgtgaacgatcccgccggcgatctcgacattcctgatttcctgcgctgaaaggactgatccatggctgggttcatgaaaaacgcgatgtcctatctgggcatgagcgacgttgtggacgatgaggacgactacatcgaagaggacgaggagcagaagccggctccgaagtccgcattcgattccgaccatacggtcacgccgctggcatcaaccaccgcgcctgccgcatcgtcgactaccaagccgttccccggtggtcgcgtgaacagaatcaccaccatccatccgaagtcatatgaggatgctcagctggtcggtcgcgcattgcgtgacggtgttccggtcgtactgaatctcaccggtgtggccgaagccgtggcatatcgcattgtggacttctccgccggcgtggtgttcggcgtgcgtggttccctcgagcgtgtcactccgcgcgtgttcctgttgagcccggcgcaggtgaacatcaaggtcgaagagccgacaaaaccaacctcggcacacgatttgttcgctgactgaccggttcagtagttttcgcattcgacgttatatcggtattcggccgactcccagcaaggagtcggccgattcttattgcgctccgagcaaacttttcatgcgcggttgttagtctgtcagcatgctttccttagtgttctctctgatcggccgcattcttgcatggctcatcaacgcgtatatcacggttctgttcgtgcgcatgattctggactgggtctccgttctcgcacgaaactggtatccacgtggtgtggtggcccagctgatcaacattgtgtattccattaccgaaccccctctgcgctggctacgtcgctatattcgtccattgccgctcggctcgatttatcttgatgtcagcttcatcgtgctgtattttgcgttggtggtactagaaagtgttgttctgatagtgttctgaggccgtttttgacccgccggaggcatatatctggcataaaaacccacgttgaatgttctgaaacgatggggtcgtgatagcattctgacttgagaccaacgtaagtgcgggcaatgccccaaagcgaggtgcaagatttatggctctgttgacgccgaaggatattagggagcataccttccagactgttcgattcaaggaaggttatgatgtcgacgaggtcgatgacttccttgatcaggtcacggaaaccgtcgaggctcttggacgtcaggcggtagccggcggtcaggccactcagtctctgggccctgacgtgaccaaccttaatgcgaagatctccgatcttaccggtcaggtgcagcaactccagtcggagaatgctggtttgaagaacgctgtggctcaggcccagcaggccgctcaggctggcaatgatcaggcggcacagcttgcctctgccaagctcagcgaagccgaggaatccaaccgcgcgctgtcctcccagaatgagcagctcaagggtcaggtcgatcagctgaacgctcaaatcgatcagctcaccgcccaggccgctcaggcctccggtaaccaggaagccgtcggccagcagatcgccgccattcagcaggaacgtgatcagttccgcgcggccaacgaggagctgtcccgtcagctcgccgctgctcagcaggagggttccgccgctcagcagcagtccgctcagatcgctgaactgtctcgtcagctcgaagaagccaagcagcgtgaaaaccagcttcgtgcccaggtttccaaggtcgagccgagcactgagaccggttctctgcagaagatcgctggcgtcgcttccatgccgggcaccgagcccgagcgcgccaccgccatgctgaccctggctatgcagctgcacgatcagtacgtggagaagggcaagaacaaggccaaggaaatcaccgaggccagccagaacaagtacaacgatttggtcaccaaggccaacaactactccgagcgtacccgctccgaggccgacgactactccactcgtactcgttccgacgccgacacctattcggatcgtacccgctccgaggccgacgcttaccgtgaccagattcacgcggatgccgagacctactcccagaacacccgttctgaggccgacgcatactccgtcaagactcgtcaggatgcggacaactactccaagtctcagcacgatgacgctgacaactacgagaaggaagtgcagcagcgtgccgccgagtatgacaagaacactcgttccgcagctgatgcgtacgacaagaacacccgctctgcagccgatacgtatgccgagcaggtgcgcgacaaccttcaggctcagtccaaggtcgtcgagggcaacatccagagcctcaagcagttcgagactgaataccgcgcccgcctcaccgagtacctcggccagctggcatcgcaggtttccgagtcgaacaactacgtcgaccagacctcgtccaagaccaactgagcgcaggcaggtacaggtcgtatgacgaaccaacagggacggctgcgcactcgcgtggccgtctttgcatgtgtggccgcggctgcgctgattgtcgatcagctcaccaaggcttgggcgatggccgcgttatccaacggtcagaccattcgcgtgattcccggactgctgtccttcaccttggtgcgtaatccgggcgcgtccttgggcatggggtcaggcgctacttgggtaatcagtctgttggccgttgtggcttgcgtggcccttgctgtggctggggtgcgcactatctccatgaaatggtcggtggcgctttctttcgcgtttgcaggcgctctgggcaacctgattgaccgtgttatgtacgctgacggcttcctcaacggcaaagtggtggatttccttaactatggctggtccgttggcaatgtggcggatatctatctggtagtcgccggtgtggtcctggtgattctgattcttatgggggagccgttctcccacaaggatcttatcgagcaatccgacgaatccctacagtctgagccggaggcggacgccaagtaatgagtcgaatggtccctgctcccgatgcattggtgggtaagcgtttcgacgtagccgtggccaaaatgctgggtatttcacgatctaaagccgccgatctggttgactccggacaggcgcgcgttttagggcgtgaagttgcgcggtccagcacgttgcaggcgggggagaccgtcgaatttgatttggcggaggaacaggccgggcctgagcctatcgcaactgatatggctgttgtctacgaagatgatgatgtcgtcgtagtcgataagcctgtaggcgtggcggcgcatgcctcggttggctggaccggtcccacggtattgggatcgttgcgtgatcgtggcgtgcatatcgcttcctatggcgcggccgggcgtgaaggcattgtttctcgccttgatgtaggcacttccggcttgatgttggtgtgcaagtccgaccttgcgtacaccgagatgcgtcggcagttcgccgagcatgaggtaaagaaaacctatcatgcgctcgtgcagggcggtcttaaagagaacaaagcgaccattgaggcaccgatcgggcgcgccaaagtgtccgatttccgcttctgcgtgactccggccggcaaaccggccgttacgcattgggatgtgttggagcgtttcggccatgaggccacactggtatccgtgaatctggagaccggacgtacccatcagattcgcgtgcatttctcctcgattgggcatcctctgtgcggcgaccccatgtatggtgccaatccggtgctgtctgaagctttgggacttgaccggcagtggctgcacgccatgaagctcgaattccgccatcctcgcacccgcgtctggaccacggtccggtcccagtacccggccgacctggccgccgccctcgatgccatgcgtgcccgtcacatcgaacccgctgaacctgccgagcatgccgaagttctggtggactaattccgcaacgtgtgcatcatgcgttttaatatttagattcagttccagcctcgccggattcatcccagaataatgagagatcggtcatgatggctctccgtcatgaccataccccaagtgactgcgga

SEQ ID NO: 2039 - DNA, 6526 bp, Unknown
  R17_18m  MAG No. k141_43708
caccagcattacagcaatgtcgttcagcgtgtggaggcgcgggcgatgacctgggattcggtggtgagcagttcggacttggtgatgctgccgtcgatgcgtccgaggatgcgatccactgccgtgggagccgtccagtcaaggcgggaatccatggtggtcagcggaatctgcaggtagggggcttcctcgttgttatcgaagccgatgacctgcacctgcacgggcacctcataaccagcggtgcgcagagcggtcaatgcgccgatggccaactgatcgttcaaggcaatcacaccgtcgaatggcacgccggaatcaatgagccgctgggtcacacgggcaccggctccgatggtccaatcctgatcggtgttgccaatcagctgcggatccaaggagagcccacgcctacgggtctcttcgatgatgccgcgcagacgcagctgcgcgttgccttctacggcattcagcaatgcatcttcgtcgtaaacgtcacgggcaccgatcactgcaagtctggtggaaccgcggtcatacaggtagcctgcggccatggcggctgcggatacatcgtctgggatcacgtgatccacaatgccccacgtggtacgcgcgccaacgatgaccagcggaaaatcaaccttcagatcatcgggcgaaatgttttccacctcgctcatggaaaggatcatgccatcggacaccgtggagttgaacttcttcagcagatcgcgcgcgcctttcgcggagccttccgcatacgtggtgacgtatacggaatagtcgcgctgacgggcggcctcgatggtgcggttggcgagctcggccagatatggcggaatcagcgaaggcacggcgagggtgatgaagccggtgtgatcgcggttgaggttgcgggcggccacgttgactcggtagtcgaggtccttaatgaccgactcgaccttggcacgggtctcatctgtcatacgcccggagccattgatcacgttcgacgcggttttgagcgatacaccggcggcctgagcgacatcgcgtagcgtcactcgacgcttggctgttttctcgtcgctcatgccgcactcctctatccggacaacattgccattctagcgcggtctagcagaacgttttagcgataagaatggcgttgcggttcagcgtatatccaacggcgtcagtctcgcaacggtgggcgatgatgggatcaccttccacaccgttgatggcgacgggctggtttgagcggttgaggtagaaatcgaagcgggtggagccgtctgcggatcggcggatggtgtgcaggatgcggggatctgtggtgggataggttggagtttgaccactctcagtcggctgcgccgacaactcctgccatcgggagccaagtgctttgagcaactgggcaatgtcgtgacggttgaggtcgcagcccacgtagatggcggtaccgttgccataggggcggctggtgatggcgggggtgcgctccagctcccagtcggcggcggactcacctgcgtaagaggcaagcactgtggtgtccgcggctacggaagtcacgtcgttctgccacaggcgggtcgtcagaccattggacaggctgatttcgctgggctcgccttcggcttcttcaccgaggatgttgaattcttcggagcggatgccgagcatgtcgcgtaggagcccgttgccggcgccggggtagccgccgaggccgatgtggaagtgctcgtcgatcaggccggcggcatagccgacgatgacggttccgccggccttcgcgaagtcggcgatacggagaacgtcttcgtcggacaggctgagcacggtgggcagcacgatggttttgtagccggtccagtcgtaggcgagcggcaccacgtccgcgcgcagcccggcatccaggaagccgcggtaccagtcgtgaacgtcgtgccagtggttgagtttcatgctgggcagggtttcggagcgtgtggcccattcggattccgcgctgaacaggatcgccgtgccggcacgctcgagctcagtgccctgcagcccggcgtcggagagggtcttcagcgccttaccgagctcgcatacgccgcggaagaccttggaatcggcacccgcgtggggcagcatggcggagtggaacgcctcggcgcccgacttggattgccgccattggaaaaagcagatggcgtcggcgcccatggccacgtgggccagggagtcgcgcatgagttcgccggcccgtttgcgtgtgttcagcggcttccactgcacggctgaggtggagtgctccatcacgtaccacggcttgcccagcgcgagggagtccatgagcgcgtccgagcaggcgagttcgtccaggtgggattcgccctcatggaagtagtgatcgttggacacgaagtccacctcatccgcccatttggcgtagttcatgacgcactggtcggtggagaccatgaagttcgtggtgaacggcttgtcggggcagatctgctcgatggcgtcgcgttcggctttgtagaagtcgagcagcatgtcgttgccgaaccgctcgtaatccaactgctgcgacgggttgaccatggcgtcgccgcccatgtgacgtggcagcagcacctcgtcgaaactgttcacgtgctgcgaccagaaggccgtgccccacgcctcgttcaacgcgtcgatggtaccgtacttggcctcgcaccacgtgcggaacgcggccaaggcgttgtcggagtagtcgtagcggttgttccagccgtattcgttgcccatgtgccaggcggtcacatacgggttgtccttgtagtgttcggcaagtttgcggcacaggcgcagcgcgtattccttgaacaccgggcttgtgggctgccacgactggcgtgagcccgcgttgacggtatgaccataccggtctaccggcagcacctctggatgggattcgtacagccacagcggcgcggcggctgtggcggaggccaagtccacggcgatgccggctctgccgagcctgtcgatcacatggtcgagccactcgaacgtgaacgcgccctcgaccggctcgatcttgtcccagctgaaaattgccagcgatacgacgttcacgccggcctcacccatgagacggatatcctcgtccagcgtctcctcgggccactggtccgggttgtagtcgccgccgaacgcgatgccgcggccggattccgtcagcagggacggccacctaaatgctctatgagtagtcatattaatcaaatcctttattgtatcggctcatggccggtgctgtgtttgccggttttgggctttggctcccctcagtctcactgcgttcgacagcgtcatcggcgctttgatcaaggcgtgaatgctgcgttgcgttactgcattgccatgttgccatgttaccgcgttattgcatcgctacgttgccacgttgccacatcacattgcattgccgcattgctgcgttgccgcatcacatatcgcaacacaaacgcagcaacgcaatgacgaccggagatggcatcgccgccacccgcgaggaaccgcaatgcaacgcggtaacgtaacgcaatgcgatgcgattcccgcgtagttacaggcagttacagattgagtaccgcatcagcaatgcgcatggcggattcgcggtgggagaccagcaccacagccgcgccgcgctccttgtctgcatgctgctcacccacggccatagcgtgaatggaacgtagaataatagcctcgttcaaagcatccaaacggctggtcggctcgtcgaaaagcaccagatcagcattgcgcaggaacacacgagccaaaccgatacgctggcgttcaccttcggatagacggtcgcccaactcgcctacctgagtatcaaggccatcgggcagggaatcaatgagatcaagcacggaggccttggcgagagcctgacgcaaacgagcatcgagaccgtcagctgctgccacctgaacggcatcgccctctgccgattgcgccgccaactgctgctgtcgggaatcaacggtcttggcacccacttccccattgcctgcaacatttgcagcttcaacctcggactcaggcaaagcaatcagcagattgtctcggatagagccatcaaacaggtgggtttcctggctcatcatggcctgaatacgtcggcgagcatgcacatcgacctcgggcaacggcgtgccggacaacgtcacctgaccgcgctgcggatcccagtagcgcagcagcagcttgagcatggtggacttgccccggccggacggcccctggatacccagcacgccatgctgcggcacgtcaagcgagaagtcggacaggacttcatgctcccccgcatatgcaaaggtgacgtcatcaagacgcatgcccatatactcctgcggcacaacagtgccgttctcggtcacagcgggcacctcgtccatcagtccgaacagtcggctagcggacgcgaaggtctgagtcaggttagcgggcaaggcggcgagcgccaaagtcggttcgaacgagctggcgaacagcacgaaggcggcaatcagagccggaatgctctgcgggttcgcgccggcacaggcaatagccacggcgaccgaagccgctgtgagcacagccaccaagagtccgctgattccggtgaaacggccgttgaccttgctgagtttggtgtgatccttccacaacgcatgggtacggtcctcgatggcctgcgcacgttcctcgccgcggccaaatcggatgatttcgtccaggccgcgcatgtcatcgagtatcacatcgtcgagttctccggcagcgccacggatggcagggccaaggttacgtacgccggtggcaaaaaatcgcggcacaaggatgccgataaccaggtgggcggcaatcaacgccagcgccatccatgggcttagggtggcagccacaatcgtgtagatgatggtggaggttaccgcgatggccaccggactgatggtgtgggcaaagaagatctcaagcagttccacatcggtggtcagcatggcgataaggttgcccttacctttgcccgcgagcttggccggcgccagtctgcgcaacgcggcgaacgccttggaacggaagagtgcgagcagatggaatgccacattgtggttcagatattgttcaatgtatcgggtgatgccacgcagaagagcacagataatcatcatgatgacggcgggcgcaacacccatgccccacaccggattaccggtaagtgcaaatgccgcgataatgccgaacacgggcaggaaagtggccgaaagatggccgatggtgccggcggtggaggccgctgccatcagtcctgccagaggtcgggcttccttaagcagtcgcctgatcacttggaatgtgctcattttggaagacgaatcgctatttgcaacaccagccggagtctcagccgaggcctgctcactcccgccaacggaagccgtcggcaaagctgactgcaggcggtcaaccgtcatacccgcctctgcgcttacgcgcgctgcgccaccctcagtccgactgtcgtcggacagctcctgcttgcgggaaccaacctgcagcacacgccgagcatggccttctccgaagttctcaatatctgcctgcgtggtaaacagcttggcgtagacgccgtccgccgtcatcagctcggtatgggtgcccctctcaaccgacttgccgtgttcgagcaccaccacttgatcagcgtattcggcgttggccatgcgatgggtgatcataataaccgtcttgccgcgggattgcgccaattcgcgaattgtatccaggatcagctcttcggattccatgtcaacgctgctggtcgcctcatcgaacacaaataccggcgaatcatgcaggagcgcgcgggcgatggcgatgcgctggcgttggccgccggacaggttggcggcatcggactcaatcggcatgcccagtccgttcggctgtgcgtgcacgaagtcggcaatgcgcgcctgctcgagcgcggaccacagacgggagtccacggaatccggcgaatcaggaatctcgtcatcgggcaaggccatcagaagattctcgcgcaatgcgcccgcaaacagatggctgctggcaccaatcacagtgacggctccggccagtgtttcgcctgacaaatcggatacctcgacgccgttcagtgtgagcgaacctcggtaaccggccagtgtaccggcgagcagcgaggcggccgtggacttgccggaaccggagatgccaacaatggcggtgaactgaccgggccgtgcggcgaaggtgatgttggtgagcgcaggagcgacggcggaattggggctggtttcaccttgcttatcggtctttgcggatgcggacttggagtcgccgtgcccggcatcatcataggaatagccgacgtggtcgaagcggaccgtcagaccgtcgtcagcggaatcggaatcgttggccggcagggtcgccgtgccatgctcgggctccgggg

SEQ ID NO: 2040 - DNA, 17727 bp, Unknown
  R17_18m  MAG No. k141_43723
cgctcgtaggcgccgcgctcgtcatagtaggccttgcgcatgccttcttcatcgatggtgaaggagtaggcgtccttcatgatgaattcacgaccacggatcaggccggcacgcggacggaactcgtcgcggtacttggtctggatctggtacagggtgacgggcaggtctttgtaagaggagtacatgtccttgaccagaagggtgaacatctcctcgtgggtgggggccagcaggtaatcggcctcgtggcgatccttcaaacggaagatgttgtcgccgtactcctcccagcgatgggtggcctcgtagggttcgcgcggcagcagggccgggaagtgcacttcctgggcgccgatgccgttgatctcctcgcggatgatggcctcgatcttgttcagcacgcgcagaccgagcggcagccaggtccagataccgggtgcggccttgcggatatagccggcgcgctgcagcagcttggccgaatcgacatcggcatcagcggggtcctcgcgcagggtgcgcaggaacatggttgacatacgaagggtattggaagtcatgtgttccaagatattcgcgtgaaccgacaagcccgcctgctattcgcactattccggccttcatcttggcattcggactcattcgtacaacaatgatggctagaagggtaggagggcacgatgacgcagccgaccgagcaacaggggaatcagccggaacccgcggagcaaccggtgtatcaaccggcccagcatgggccccgcaattttctgctgcaaccccgcaattcccaacggcagttccgcgacaaccggtatcgcaacagccaatggccatgccaccatttgcgcaatcgcctatgtcggtcccggaacaagcggcctgtccggagcggccgcgctgattgtgggtgtgcgtttgctgcaagcaccgttgatctacggcacggtgattcttatcgtcagcacggtgactgtgctgtggccatggcgggtcgaattctcccgccactaccggtgggtgcggcttgctttgggcggcatcattctgattgtggcagccgcgcgctatgaggcgagcctcaaatcgatgaggacgatcgccgcgcgtattggcgatctgcactaaatcgcgcgggcgacctgaggcagattaccaacgtccggcgatagcagtcctgcatacggggcagtgcccattgccactgtatccggcagataaacggttggcaatgattcgataccaatcgcgttccacgagcttggccctgcattcagggtttgggcaatatgtggtatcgccttcacgatcatgcacgttgccggtgtacacataattgagtccctcttcgagggcgatgcctcgggcgcgggtcagagtctcgtgcggggtgggcgttacgtccatcatgcggtaactggagtggaatgcggaaaagtgcagcggcacgtccgggcccaagtgctcgcgtatccatgtacattcagcatgcagctgggcgtcgtcatcgttgagtccagggatgagtagcgtggtgagctccacccacacgtgttcgccttctggtgtgcgtgcctcgttgaccgcatagtcgatggtttcgagcacatcggccagatgcgtgccggtcactttccaataaaattcttcggtgaagcctttgagatcgatgttggcggcgtccatggcggcgtagaagtcgggccgggcttcggcgctcatgtatccggcagtcacggcgatgggatgaatgccgagcgctcggcaggcttcggccgtgtcgatggcatattcggcgaacacgatcgtatcgttataggtgaacgccaccgaatcgatgccccggtcggccgcgacctgcgcgattttctccggactggcttccacgccgagccggtcgaaactgcgggctttggcaatatcccaattctggcagaatcggcaaccggaattgcagccagccgtgccaaaactcagcacgctggaaccggggtggaagtggttgagcggcttcttttccactgggtccacggcgaagccggagctgcggccgtaggtgtcggagacgatgagtccgtcgtggtttgagcggacgaagcaaaagccgcgttggccgggcttgaggacgcagcggcgcgggcatagttcgcagcgagcgcggttggtaccgtcgtggaattgcgtttgccagcgggctatggcggggttacgaacatctgtgactgacgccgtatgaccgcacgattcccggtgaccaccctctgattctcggtgaccaccctccgtcgcttcgcgccacctcccgccagcgggaggggacatggttgctgcgttagtgctcggcataggcggtcacctcgtagcgttgacagtcgatttcgccatcgttccagtcgtaggacgggcggataccggctttggcgagcaggtgagcgacgaaatcgtgcggattgggcagctcatcccacacttgtggcaggaatgtggcgctgcggccacgacggtcggcgagaatcagaccgtctttgccggggcgtaatacttcctcaagttcagtgcgcgaacgtaccgggcgttcgacgttgctgccgtcccgtttgacggcgtcggtctgaggtccggattgcagcgatgccagagtcgcggtcttcgagccggtatcgcgcgaatcggtgtcacaggagttcacggtaatcggctcgggctcgcccaagacggatacctccacgttgagcaacgggtattccgcggcggtgaccgggttgaaacgtgggtcacgggtggcggcgtccaccgcatgtgcagctatgtccttgccgagcgagcggtgggcggccagcgaaccgatgcacccgcgtagccggccaccctcggtcagggtaacgaaacaggcaccggactcgttcagccatgggtttgcggcaagaatggacgcggtcgaatcggcggctgttggatgctcgatatgcaaccgttcccggatagcggcacgggcgagtttcagcagcacatcaccatgggctgttcccgattcgcctaagtcatctgcaccggctggagcatctgcttctggtttggattcccacgcggcaaacgagacatatcccactaccggctcgtcggcgtctcgcattgcggggcgaggttggccggcaagcgccaccacgccgtcgtcgccggaagtggaacagccgagctcgaagagcttcatgtccttgcggccttttaacacatccagaaggccgttgatcgggtatgcgccacaggcccggcgagggtgaatcggcagatgcaaagccgcaatgtccgcaatggtctggtcatccaacgcgcgggcgacttcgtgcggatgatagtgcgagagatccgaactaatcacgatgacggtttccgggccaccccacaaagcacgcaacacatcacccgcctcttgtggcgtggcatcgcccgcgttcaacggcacaatagtgaggtctgggccgagcacggtttgcaggaacggaatctgcacttctaccgcatgttcttgtgcgtgggttgggccattgacgatcattgcgggagccgacgcgcccggacgggcatgtgtaccggagcgcaatggctcattgacagacaggcccagagccttacgctcggctgcaatgtctaccggcacagtgcccagcggcgtttcaaacgccgctgccgtggaacaggcgacgcctcgcacggccacacggtgagtcggtcccacgattaccgcgcgagtcacactcccccgccctcgttcgagcaaagcataggcaagcgcggccgccgtgccggaatacacataaccggcatgcggcacgattacagcctttggcactcccgctggaagcgtgggctccaactgttgcagaacctctcgactgtaatccaattgatgggtaatgagttgcttgagcgttgtgcggtcagcggggtagaacgaaccagccaccgctggcggacgtattgcgccagtgattttgccgctgccgtctgccgcgcttgctgcatctgacgcactagccacactaaccgtatcgatttgcacaccggcccgggcggcctcgcgaacctcattgtttccacgaaatatctcggatagcaccataactaccacctcttattccatggtagccgttcagttcctcaatgaagacaagttcgcagtgtcttcttcggcttcaaggggccgattccgcctcttggagacatctacttgcatttcgaggggctggtcatccgctcaatcgcacatagaaacggcttcataccaacgtcattccgccgtttttaagcgttgtctacttgggcatcagccccttgaaacggaagtagatgtcccgaaaactcaaaatccgcccctcgaagtgcagaaacactcaaattagcggtcgttcgatatatcgaccgtcagaataacgcgtcctgggcgaagtcatcatcgggattgacaccgaattcgtccggctcggcgggtttgaacgcgcttgcaccttcatcggccaactggtcggaagccgaggccgaggcttcgcgcaggtcgccgtcgagcaccacggcatcgggcgagacgaggaacatgcgttcgttgacgccagtcaaatacagtccgcccagcgattcgacgcgggacaacgccacatatcccatgcccggcgcgaaggtgcgcttcagatccatgaccgcacgatcaagcgtcatgccttgcgacttgtggatggtgatgccccacgcgcaacgcaacggcacctgcgagacggaggcgagcacggtgtcgccgtccatcatttcccatgtggcctgtttcatggtgacgatgttgccgttttcgaattccacgatcggccagccgcccttgttctcctgcgcgaagccgcgcacggtgccgagcgagccgttgacgtactggcgatcggtgtcgttgcgcagggccatgacagccgcgccctccttgagtaccagtcgctcgggggccagcatgttcttcttgagtcggtcgaccagattggcgggacccgcggtttcggcgtggaactcgtgcggctcaagcatgatctggttcaggcgcatgtcgttgagattgtcggcctgccggttcaccgggaataggtggacggcgacctggccgggctcgggcagtttgcccagacgggtgacgagcacgtcacggtcggactgggtcacgtcgccttcgcgaatgtcggtgagcacggtcagcagttcgccggtgtcctgacggtgctgttcggtcagatagcagatcaccgggttgagttcgggccataccagcgattcggtgatgaagccttcggggttcaagccggcacgggcataccgttcgcgactggcgatgaattcgggggtgggggcgatgaggtcgcggttgcgcccggacaccgaaaccggcggcagttggaagaagtcgccggacagcacgacctggatgcctccgaacgggcgtgggtcgcgacgcacttcgcggcagacttggtcgaccatgtcgaacagccatgcgtgcagcatggagacctcgtcgatgacgaggatgtccgtagcctgaatcttgcgtttgcgccgggatttgatgagtttgagcagactcgggctcagggcggtggccacgccgacgccgctccacgaatggatggtttggccgttgatatgcgtggaggcgatgcctgtggacgcggtgactgccacgctggcgccgtcggcccgagcctggcggatgaactcgttcaagacataggtcttaccggcaccgggcgcaccggtcagaaacacgttcgcgccggcgttcagaatggctagggcttcggtttggcgcatatcaacctctctagactcccctcagggaggggagccaagtacggcggactacttattgagaatgctggtggccacgatgtcggcggcgatggccttggaggcggcatcatccgggccggggacgggggccatgaaggccttacggtagtagcgcaactcgtccaaggactcgatgatgtcggcgagggcacggtggccgccgttcttcggcggacggttctcgtagacggccgggtaccagcggcgggcgagctccttcaaggtgctcacgtccacgctgcggtaatgcaggtggctcatgaggcccggcatgtagtggtcgaggaacttcttgtcggagccgatggtgttgccggccagcagcgggcgcacgccttccggcgtgaagcgcagcacgtattcggtgaccttctgctcggcctcggccaggctcaggccattctcccactcgttgatcaggccggaacgggtgtgcatctggcgcacgaaatcgttcatgtggttcacagccttctcggacggcttgatgacgtaatccacgccctcgtccagcacattcaggtcaaagtcggtgggaaccacagacacctcgacgagttcgtcgccgccgaagatgtcaagtccggtcatctcgcaatcgatccaaatcaggcgcgagtccttcgcgctgtacgtttccgcgtcatggctgtcgaccatggtgtgcctcttttcttcgctggtcatcgcttatgcagaacagttcagactataccccagcgcatacaagctatctcgagccacatacgcgaaaagggcctgcataagcagacccttttcacaaggaatcaacccctaactagcgcaagctagcgggcatcaaccgatcagttgttgtggaagccggagtagttcggggcttcggcggtcatcacgatatcgtgcgggtgcgattcgcgcagaccggcgtcggtgatgcggatgaacttgccacgctccggcatctcggcgatgttgtgggcgccgatgtagaacatggactggtgcaggccaccgagcatctggtagagcacggcgttcagcgggccgcggtacggcacttcgccttccacgccttccggcacgaccttgtcgctggaggtcacgtcggcctggaagtagcggtccttggagtaggacttcttgccgcgcggggccatggcgccgagggagcccatgccacggtacagcttgtactgcttgccgtgcaggagcaccttctcgcccggggcttcctcacagccggcgagcgtgccgccgagcatcacggaggaggcgccggccacgagggccttggcgatgtcaccggagtagtggatgccaccgtcggcgatgcagggcacgccagcggcacggcaggcctgggcggcctcgtacacggcggtgagctgcgggacaccgacaccggcaacgatacgggtggtgcagatggagccggggccaataccgaccttgacggcgtccgcgccagcctcaatcatggcctgagcaccggagcgggtgccgacgttgccgccgatgatctgcacgccgtcgaaggcggagtcgtgcttcaggcgggaaatcatgtcgagtgccagacgagcctcaccgttggcggtgtcgaccacgagcacgtccacgccagcctccatcagagcggaggcacgctgccaggcgtcgccgaggaagccgacgccggcggccacgcgcagacgaccctgctcatccttggtggcgtccgggtactgctcggtcttgacgaagtccttgacggtgatcagaccggtcaggcggccttcctcgtcaacgagcggcagcttctcaaccttgtgctgagcgagtagacggtgagcgtcgtccttggagatgttggacgggccagtgaccaggttctccttggtcatgacatccttaaccttcagggtgtcgtaatcctcggaggcgatgaagcgcatatcacggttggtgatgatgccgacgagcttgttgtccttgtccacaaccggcagaccggagatgtggaacttgccgcacagcttgtcgaggtcggccagcgtgacctcggggttgacggtcagcgggtcggtgatcataccggactcggaacgcttgaccacatcgacctgagcggcctggtcgtcgatagacagattgcggtgcaacacaccgatgccaccgttacgagccatggcgatggccatctcggactcggtcacggtatccatggcagcggagaggaccggggccttcatcacgatcttgcgagtcagatgagtgctggtgtccacttcggagggaatgacatccgtctcgttcggcaacagcaacacatcgtcataggcaaggccgagcttggcgaaaatcgggggaaggggagcatacgccgactgggcgtttaattcatcaaggtttgtagccatgtaaacactatatgaaaatgcgctgaccttcacgacacacgcttgtgagcgctcacttatccgctgccgggtcctgcacctcacccacctgcgagtcccgcgaatttgcaggcgaatcagtcatcgaatccgctgcctgagagccaatcgaatcccggctctcccctactgcagactgcgatttaggcactgtatgctgcgcgtttttacgtgcggattcgaacgtcaggttctcggcttggatctcgggaatacgatgccgcagataggggtacatcgtggctatggtcagcaccaccacagcgatggccatgcccacggccacgtgctgcgctttgaagaacagaatcgttagcgaaccgaatgcgatcaacgcggcccatccccacagaatcagcacggcgccacgcaccgaatgcccgatcttcagcatgcgatggtgcaggtgcatacggtccggatgcatgggcgactggcctttggccaaacgccgcacaatcgccagacacatgtcgagcacaggcaggaacaacaccagaaccggcaacagaatcggcatgaacaccggcagatagatgctggcatgaatcgaggccgggtcaagacgtccggtcatcacaatcgaagcgcaggtgatgagatagccaagcagcatcgaaccggaatcacccatgaacagtttggcgggatgccaattatgcagcaggaagcccacgcagatacccaccatcatcacgtcgatcagcgtggccaacgaagcataactcggggaagaccgggcgatgatatacgaataggcggcgaacgctatgccaccaatcgccacgataccggccgccagaccatcgaggccatcaacgaaattgaccgcgttgatcgaggcgacgatcaggaatgcggtgatcgccatggacagactcggcgaggcggtaatcagcgaaccacccaaaggcagtgagatgatctgcaatccgtcccaagccacgaatacggaaatcagcagctggccggcgagtttcagcatccaatcgagatcccacaggtcatcggccatgcccagcagactgatcatgatgccgccggcaagaatcacccacatctggtaattgccgttgaacaatcccgagagaaaaggcagccgactggcgaatacggtagccacggcaaaaccgataagcatgccaaggccgcccatgcgcggcgtgggaatggtgtgcacgtctcgggcacgcacctcgccaaccgcaccgatttcgatggcgacgtggcgaatcagcggagtcaccagccaggtgacgccaccggcgatggcggcaatcagtaggtagattctcatgcgccgagtcccccgccgttgaggtggagggccttgcgaatcacgttttgggcgatgacgccttcacgcaggatctcgatgccgtcgcgcgcatacggatcggctttgacgacggtgctggagacatggccttgggtgggaccgccgtccagatacaggtcgacttcgttgccgaacgcgtcaaccgcctcctggacagtctgtgcgctttcgtcgccggaacggttggcgctggacgcggccagcggaccagtggccttgagaatcgcgaggcacagcgccgaattggggatgcggatgccctgcgtgccggggcgaccatcggcggtgtcggccaaagtctccaacgtgcagtcgggccgggctacggcaatcggcgagaacgcgccgggcaggaacgccgccgacaaacgattcagtggagacggcaggtcgagaccgagttcatcaagctggtcggtggatgcgagcagtacctgcaacgccttatagcgcggacgacgcttgagccggtagatacggtcgatggcggccttattacgcggatcgcacgccactccatataccgtatccgttggaatgacgaccaatccaccatcccggatgacacgcgccgcttgtgccagcgattcatccgtgactttcagcgttgttccgccctccacgctcacgacacctccgttcgcctgtgtattcacaatctaccattgcaccattgcgccccgacttgcatagttcatcatcgctcgtttgccgtactgctgttttccgattcgccccatacgcacagaccgtagatacaatgagttcgtccatgctctttcgcgaaattacaggagtgttcaatgagcggaatcaatgctgaatccaccaccatgcctcccgtcgaactgcgtatgccgcgcgccagcgagcgcgtgttcgccaacttcaacttcactgtgctggattgttgcccggtgacgattggcgagggttgcgtgatcggtgccggctcggtggtgacgcgcgatattccgccgcacaccgtggccgtgggcaatccggcccgtccgattcgcgaaatcacggacgcggacgcctccgccctgcagtattacgcgcagtagcagcggcggccccgcgcctgtggctacttctcggcgaagagatagcggtctcggccggtccaatctttgccggtggaggcggtggcgaaacctgtggccttggcataggccactaatcgctcgccttgggtgagatcatgctccataaccaatacgccgccgggcttgagcaggcgccaggcgcgctcaataatgcgttcagggatgagcgtgccgtctgccgaaccgccgtatagcgccagttccgggtcccagtcgcgtacttctggttgttcggggatgtcggtttgtggcacgtagggcgggttggtgatgacgatgtcgatggtgccgtcgagttgcgccagcgtggccagtgacgtggcgtcggcgacttccagttggtaattggaggcgatggaggggtatcgtttcgcggttaccgccagattgcgccgggtccattcggcggtacgcggggataattcgacggcccatacttggctgccgggcacttcgctgactatcgacaggccgatggcaccggaaccggcgcacaggtcgaccatgcgcgggtggatcatgctgtgccgggtcagccagtcaagaccggcctggactacggtttcggtttccgggcgcgggataaagacgccggggcccacctgcaggtcgaggtagcggaaaggcgtgtggccggtgatgtattggagcggctcgcgtttggcgcgtcgggaaagcatggcgtggaaggcggcaaggatattggtgacggggtcggcctgaccacccccagtcgctgcgcgacagcccccgccggcgggggccagcgaatcgaggccctcccccatcagcatggccttgtcgatatcgcgtagctcggcgtccacggcctcggccagcaacagtttggcatcatgttcgggcgtctcgatgccggcttcgcgcaactgcgcggcggcttgacgaatcaggtcggctatcactgctggttggccagacggtcggcttcgtcggcttggatgtcggaatcgatgacggcctgcaggtcgccgtcgagcacggcgtcaaggttgtaggccttgtaattcgtgcgatgatcgacaatacggttttccgggaagttgtacgtgcgaatacgttcggagcggtcaagcgaacgcacctgcgagtgacgcatgtcggcggcttcggcggcctcttgctcatgtttcatggccagcaggcgagacttcagcacacgcagcgcggcggcgcggttctggatctgcgacttctcatcctgcatgttcactgtgatgccggtgggcaggtgggtcatgcgcacggcggaatacgtggtgttcacggactggccgccggggccggagctcatgaagatgtcgattttcaggtctttcggatcgatctcgatctcgtcgtcatcctcgtcggcttcggggaacacaatgacgccggcggcggaagtctggatacggccctgcgattcggtgacggggatgcgctgcacacggtgtacgccgccctcgtacttcatcgaagcccacacgccgtcttcgggagcgggcgtgcccttggcgcggatggcaatctgcacgtccttgacgccgccgagctcggtggtgttctcggactgtacgttcacgctccagccacgcttctcggcgtaacgggtgtacatgcgcagcaggtcgccggcgaacagtgcggcttcttcgccgccggtgccagccttgatttccatgatggtgtcgcgtgcatcatccgggtcacgcgggatcagcgcggtacgcaacttctcctcggcgtcgggcagttcggcttcaagacgcttggcttcctcggcgaagtcggcgtcctcgccggccatctcctgagcggctgccagatcgtccttcacctgcaaccaggttttgtaggcgcccacgatggcacccagttcggcgtgacgacggcccagcttgcgcagcttgtccgggttggacacgacttcggggctcgccatctgttcttcgatggactggtactcctcaagcgcggttgccgccgccgggaactgttcgtctgccataacacgctttctttcgtacggtggtgtctattcggttgtgcaggtcaaaaaaaaaatgtcaaagaatacaaaaacgccagtcctcgatcgggtatgccggagcatgccgaatcgaatcggactggcgtgaagtatgctacttgctcttcttgccgtagcgcttctcgaagcgagcaacgcggccaccggtgtcaagaatcttctgcttgccggtgtagaacgggtggcactgagagcacacgtcaacgaacatgtgatcttccttgccagcggtgcgggtcacgaaggtgttgccgcacgagcacgtcacctcaacggggtggtaatcaggatggataccctgctgcattttacgtctcctatggattcgggggacccgggtcgtcatgcccctatggcaggacgtgaaccggaacctaagggattgtacgcgcctatctggacgtgaagacgcgctgtgccgccgcaggaggcgacgcaaaagagtggggccgcaggggcttgaaccctggaccgggcgattatgagtcgcatgctctaaccgactgagctacggccccacgttcgctgcgtaaaacagccaacttgcaaagtgtagcatgaacccaccaacgccggcacacgcgccatgcacccatgccatgcacccgccagcacaacaagcggcatctcccggcgctacttctcccccatgtaccccaacgggttctcgatgaaccgtcgcaagcccatttcggccgcgccatatagcgagggatgcagcgccaccggcggcacgaacacgcggatcttcacattcgggtatcccagaatttccgaacgcagccggccttcaagcacggtggccagctcgtcgccgaagtgcgtccacagtccgcccaacagcaccgtatcgacatccaccagattcacggcggaagcgatggcggaaaccagcgcatcagcggcctgatcgaccactttggccacgtctggatcccccgcacgccaacgctggaggaatgtatcgatggcctcgctgctggtggcatccccatcctcggcaatgccggcagcctcgaccaaggcgcgacggcccgcaaacgcctcaaggcacccgtggcgcccgcagctgcacaacggcccatccatcgccacggacagatggccgatctcgccggcgaatccgtgcgagcccatcaccacttcgccgtcacgcaccaccgcgccgccgatgccgatatcggtagacaggtaaataaaggaatccgtgcgatccaccacattcaggaaggacgcacgttcggtggcataccccggaatctgagcgatggcggccatcttcgcttcgttaccggccaccacatccagccggcgtaccacgttgaaccgggtgaggttgacgttttcccaacccagattgcgggccaccaacagccacatgtcgtcggtgacgatgcccggcagcgcaagcccggctcccaccactttgcagccacgtcgtttgagtcggctttccaacggaaaggtcatcgcatcgagcttggcgaagatctcgtacgggtcagtgccggtcatatcctcactcacccactcctgaccgagagtgtcgccgttcagatcgagtgccaggcaaccgtagccatcggtgttgatctgcaggccgatgccggcgatggacccgccatgaatctccagcggcgtgctgggccgcccatatgtggtggagacgaccggctcgccttcctgcaccacgccactatcgatcagcatcgaggccaacagcgaaagcgtggccttggtcaggcccgtttccttggccaagtcggccctgctcatgggtttctccgcgcgcaacaaagtgtcgagaaccaccgacaaattatggttgcgcagatcctcctgattgatcctgcgtagacttgccataggctcctacctccttgcacccctagtctcgaacgccgcacaggcgctcacatccgtctatcgcacaatgatattgtgcgtcaaacgattgaaccagatacgcaccctcgcgtgtttccgtttgcaatcatacactgcaatacagtatagtttaatcgtctaacttattggttgtggcgcgccgaaacttgcaagcgcgaccctcatcgaggaggaatgcatgacgaaagtactggttgccggcgtagatacgtcaactcaatcaacaaaggtccgcattacgaacgccgccaccggcgaacaggttcggttcgggcaggccaagcacccggatggcacctcggtcaacccggaattctggtgggaggccttcaccaaggccgccgagcaggccggcgggcttgacgatgtcgcggccctcgcggttggcggccagcagcatggcatggtcattctcgacaagcagggcaacgtgattcgcgatgcgatgctctggaatgacaccagttccgccccgcaggccgccgccctgatcgacaagctcggtgcaactccggccgagggcgacgaaccggacgacgtgaccgcccgcggcaagcagcgctgggtcaaggccgtcggatcctcccccgtcgcttcctacacgctgaccaaggtggcgtgggtggccgagaacgagcctgagaacgccaagaagattgccgccgtctgtctgccgcacgattggctgagctggcgtatcgccggctatggcccggtggccgagggcgaggacgctcatctcgaagccctgttcaccgaccgttccgacgcttccggcaccatttactacgatgccgcgcatgacgagtaccgccgcgatctcatcgccatggtgctgacccccgccgagggcgaggaagccgccaaggcccacgccgacgccattgtgctgcccaccgtgctgggcccgcgtgaggcagccgccgtcaaggccgaccccgccattgccggcaaggacgttgaaggcggctgcatcatcggccccggcggcggagacaatgccatggcctcgctgggcctcggcatggccgtgggcgatgtgtccgtatcgctcggaacctccggcgtggccgcggccatcgctgaaaacccggtgtacgacctgaccggagcgatttctggctttgccgactgcaccggtcattatctgccgcttgcctgcaccatcaacggttcgcgcattctggacgccggtcgcgccgcccttggcgtggactacgacgagctggccgaactggcctttaaggccgagccgggtgccggcggcatcaccctggtgccgtacttcgacggcgagcgtacgccgaaccgtccggacgccaccgcctcgctgactggcctgaccctgcacaacaccaccaaggagaatctggctcgtgcgttcgtcgaaggcctgctgtgttcccagcgcgactgcctcgagctgattcgttcgctgggtgccgagatcaaccgcatcctgctcattggcggtggcgcgaagtccgtggccatccgcacgctggccccctcaatcctcggcatggacgtgacccgtccggccaccgacgaatatgtggccatcggcgccgcccgtcaggccgcctgggtgctgtccggcgaggccgaaccgctgacctggcaactcaccatcgagggcgtggagaccggcgagcccaccgaagccgtgtacgaggcatacgccaaggcgcgcggctgatacgctgccagcacaatccatgagataacaactgaataacgattcctgatgaatgccgccatggcaagcatcgcgaagagccgctgttataccgcgctcctcgctgaagcacacatggcggcatttttcgtttcccacgcaatccacaaatacggctataatcaagtcgtttgaacaagtctggagattcttctatgaacgaccgctcccgtatgatgctgtacgccctgaccgccgtcgcatgcgtgatttggatatggcaatccgccaaagaagcaatggccgatggcacgatgatcagcacctcaaacatcatctttttggtatgcatcggcgttgccgccgtctactgcgccgccaacgcattgatattgtggtggcgtcaacccagcaaggaggatgcggagaacgatgacgccgcggatacgcctgacggtaccgataccgacaccgcagatgccgagggatccgaggacgacaccgatgacgatgtcgaaaccgacgtcgcaaccacggatgccgatgcaccgccaaccactaatcgccagtaaccatcgttatcgttcgcccgaatcaagcgaatcatcccacttcagcaaaggaacattatggaagtaacaaccgtgtcaaccgtgatcagcgtggtgctgggcgtcatatgcgcgccttgcggcctgtttctggggctcgttcccatgaaggccgatctggtgaccgccaagcagtcaaaggcctcgcagatggtgagcttcatcgttgccatagtgttcatcggcttgctggtcgcaggccatgatctggagacctgggccatggtaatcggtctggtcatcggcttcgccgttgccaagattcccgcgctgcacgcctgggctttgcacaagtggccgttcttcgagcccaagaaagcggctcccgctcccaagcgcgtcaagaaagccaagaagaagtaagctctggccttacctattcgctgaaagcgggatatcgacatcggtatcccgtttttcattggccgtacatatccgctgaggcacatcgccgaatcatattgtcgaaatacaccccgagtcagggctgatttcgcgaagaacgtacaccgggatccatccatcgcgacaaacggaaaagggacgctgcgtgcaacagcgtccctttcggaggaggaatggaactcaggtccatccccgtggccaccgggcgggcccggaggccaggtttagctcagcctttctttttcttggagagcaggtcgtaggcgacggcggcgatgacgacgaggcccttgatggtcttgacccaggcggcgtccacgccca

SEQ ID NO: 2041 - DNA, 14643 bp, Unknown
  R17_18m  MAG No. k141_43921
cgaggtggtcacggagaccggctcgggcatgaacgacaagcggcgcaagctcaaccggctattgtccgacccgaccgtgggcacgctgatcgtggagcgcagggacaggctcgcccgcatgaacatgggactggtggagagcgcgttgaaggcgcagggacgccggatcatcgtggtggacgacacggagccggacgacgacttggtgcgcgacatgaccgaggtgctgacctcgttctgcgcccggctgtacgggcgtcgtgccgccaagcataagacggacgcggcgttgagggcggcgcgcgatgcttgaggcggtcagggtggcgctcgacccgacgccacggcaggaacgactcttggagtcccatgccggtgcggcgcggttcgcgtacaacgcgggactggcgcacgtcaaggccatgcttgaacggcaggagaagccggaatggtcgtactacgcgctgcgcaggtggtggaacgccaacaaggacgccctcgccgtcagcatggagaccggcaagccgtggtggccggagaacagcaaggagtcgtacaacagcggcctcgaatcattggccgacgcgctgaggaacttctccaagtcccgcaaggggcagcggaaaggccgcaggatgggcttcccgcgcttcaaatccaaggacagggcggttcccggattcgcgtacacgacgggctcgtttggtctcattgactgtgaccctcatgcgctgcggctcccgaagataggccgcgtgcactgcatggagaacgtgtccaagcgagtgaacggcgcgaaggtgctgcgcatgagcgtatcccggcatgcgggacgctggcaggccagcctgaccgtcgaacgcgccgacctgccggttccatcgccgccgaaaggcgggagcgtcggcatcgacttgggcgtgaaggaactcgccacattgtcggacggcaccgtgatacacaacccgcacgcactcaaatcgaacctcggacggttgaagaaagcccaacggaatctgagccgcaaacggaaaggctccaaccgccgacgcaaggcgagaacgagggtcgcgcgtctgcacgcccgcgtggcggacctacgccgcgacctactggacaagaccaccaccatgctcgcccgcgcctacgcggacatcagcatcgaggatttgaacgtggcgggcatggtgagaaaccataggctcgcccgctcggtagaggacgccgcgttcgcggagttccgccgacagctcgaatacaagaccgcacgcaccggcgcgaggctccacgtcatcgaccgctggcatccaagcagcaagacatgttcgaactgcgggacggtgaaagccaaactgtccctgtccgaacgtgtctaccattgcgaggagtgcgggcttgtcatcgaccgcgatctgaacgcggccatcaacatccaagtcgccgggagtgccccggagacgttaaacgcgcgcggaggaagcggaagacggaccgacgcatcgcgtcgggcaacgcggcatcctgtgaaacgcgaaccaagcgacggcgtaagccgtgtgagtcttggagctggcctcggcaacgaggccatgcagatgacttcgctctagcgacaagctaaaacaaagtcatctacaacggttgcaggaataaagaattcctccctgcaagcccatcaccgagacgtgcgttagcactccatgccgatttcggtgaatcagtgcaccacagtcaccgtgcattcggcgaagttcacgatctgacgggacaccgatcccaggaagtgcgcgtccagaccggacaggccgcgcgaaccgaccaccagatggctggcgtaccgcgaggccgcgatcagacctttggatgcgggaatatggaaggcgtttgtgctgaccttgacgccatcgggaatccgggccttggccatcagctcagagagaatctcctcggcgcggcgctgaccgaccttcaccggtgccacggcgttctcatagcccggaataacgcccaaatccttgagctgccagcagaacatcacatgcagcggcgcgtcgtgcagtcgtgcttcttccagtgcgaaatcgaacgcacggcgggaagtctcggaaccatccacaccaaccaccaccgggcggcgagcctcctcgaccaccggctgaggctgcgtgtagtgaacgggcttgtctcccggagtcagggcgttggcaatggcctcggtcacggtctcatcctcgctgccggcgatgcgcaccacggtcaccggcacttcggcggcctcggccagcgaagcggacagggaccccatgaaccagcgggccacacggctcagcgagcggcggccgaccacgatctgctgcgcatcatggccgatctgcagcagggccgaagtgccggaggccttcaccgaggtgagcttcagattcgccggatcgaagtcgatgcctgcagcggccttgtcgacccacacacgcagctcgttggcaatatcgtggcggaccttggcccaggcctcgtcgctgtccggttcggaccccatatcccaggaatgcgtccagccaaacacggcgttgacgctctgaccggttaacgaggcctcctcaagcgcccacttcagcgcggcaaaggattcatcggaaccatccacgccgacaacgatgtcgggcttggttgcagcttcactcatttcgagcctccttgtaatcgactacgggtgaatctagaaccagcatatcgttttcttctcctctcacggcgcaattcgtggaatctcatgaataaacgtcatcgtgaatcggtagagtaggacggaatgtcaattgaggaaggacaagcatgttcgaacggtttaccgaccgtgcacggcgcgtgatcgtgttggcgcaggaagaggcgagggcccttcagcacaactacatcggcaccgaacacctgctgctcggcctgatccgcgaaggtgagggtgtagccgccaaggcactcgcctcgaagggcgtggagctggatgccacccgcaagcaggttgaagaaatgatcggcaagggcaacgcggctccgaacgggcacatcccctttactccgcacgccaagcaggtgttggagttctcgctgcgtgaagccctgcagctgggccacagctacatcggcaccgagcacatcctgctcggcctgattcgcgaaggcgaaggcgtgggcacccaggtgctcatcaagatggacgtcgatctgggcgagttgcgtagcgcgaccatcgatatgattcgcggcaactccggcaccggcaccggtgacggcaagggcgacttggccaacgccggcggcgtgacggacaagcagaacaagtccggttccgccatcctcgatcagttcggccgcaacctgaccgccgaagccgctgaaggcaagctggacccggtcatcggccgtaccaacgagattgagcgtgttatggtcgtgctctcccgccgcaccaagaacaacccggtgctgatcggcgagcccggcgtgggcaagaccgctgtggtcgaaggcttggcccagaagatccaagccggcgacgtgccggaaaccctgaagggcaagcaggtctactcgctggacctcggttccatggtggccggctcccgctaccgtggtgatttcgaggagcgcctgaagaaggtgctgaaggaaatcaagacccgtggtgatatcgtgctgttcatcgacgagatccacaccatcgtgggcgccggctccgccgacggcgcgctgggtgcctccgacatgttgaagccgatgctggcccgtggcgagctccagaccatcggtgccaccaccaccgacgagtaccgcaagtacatcgaaaaggatgcggctctggaacgccgtttccagccgattcaggtgcacgagccgaccatcgccgagaccatcgagatcctcaagggcctgcgttcccgttacgagaaccaccaccacgtgaccatcaccgatggcgcgctgcagtccgccgcagagctgtccagccggtacatccaggaccgtaacctgcctgacaaggccatcgacctgatcgatgaggccggtgcacgcctgcgcatcaagcgcctgaccgccccgcctgagctcaaggaactcgacgagaagatcgccaagatcgccgccgacaaggacgaggccatcaagggccaggacttcgagaaggccgccgaactgcgcgacaagcaggagaagctggaagccgatcgcaagcagaaggaagactcctggcgcgaaggcgagtccgacgtcaagatggtcgtggacgaggacgtgatcgccgaggtcatcagttccaccaccggtatcccggtgttcaagctgacccaggccgagtccaagaaactgctcagcatggagacggagctgcacaagcgcatcatcggccaggacgaggcggtttccgccctgtcccgctccatccgacgcacccgcgtgggattgaaggacccgaagcgcccgtccggttcgttcatcttcgccggccccaccggcgtcggcaagaccgagctggccaagacgctcgccgaattcctgttcgacgatgaggacgcgctgattcgcgtggatatgtccgagttctccgagaagtacgcggcttcgcgactcttcggcgcgcctccgggatacgtcggctacgaggagggcggcgagcttaccgaaaaggtgcgccgcaagccgttctccgtggtgctgttcgacgagatcgaaaaggctcatccggacatcttcaacacgctgctgcaggtgctcgatgacggccacctgaccgacggtcagggccgcaaggtggacttcaagaacaccatcatcatcctgaccaccaacctcggtacgcgagacatcgccaaggccgccaacacgggcttcaacctgggtgccaacaacgagtccagctaccagcgcatgaaggaccaggtcagctccgaattgaagcagcagttccgcccggagttcctgaaccgtctggacgacatcatcgtcttcaagcagctcaccgagccgcaggtgcgccagatcgtggatctggacgtcaagcagctcaacgaccgcctgttcgaccgtcacatgtcgctcgaactcaccgacgccgccaaggacctgctcgcgcagaagggcttcgacccgctgctaggtgcccgtccgctgcgccgcgtgattcagcgcgacatcgaggacgccatctccgagaagattctgatgggcgatctcgaagacggtcagcgcgtgattgtggatgcggaaggcgagggtatcctcggcgaattcaccttcaagggggagaagttcgaggagccggccgccgccgataagcccgccgaagacggtgccgccaccgatgccgaaacttcgtccgaagccggtgcctccactgatggcgagactccagccgacgccactccggccactgaaccagccgaatccgctcccgccgattccggtgacgctccgcagaagtagtccgtttcgatagcgtagctagcgcataccagcaaagctccccttgacaggggagctgtcagcgaagctgactgaggggtagacctacgcacacataatgtgcacgtttttggtctacccctcagttgcctctggcgatagctcccctgtcaaggggaactactgtttgttgtcgggttattgcagcagggcgagtccggtgtcgatggtctcctcgcgggtaaacagcgtgcggccggcgcgcaccgaacgcaataccgagcagcgctcatacacggcgttgaacacactatcggcgtccagcacaatgaagtttgctggcttgcccgtttccaagccgtacatatcgcgcaggcccaacgtagtggcaccgttgacggtcaggaacttcaacgcatcgtcgatttcttcaaagctcatcatctgtgccaaatgcagcacataatcaagaatgagcatcatattgccattgcccagcgggtaccacgggtcctgcattgaatcctggcccaatgacacattgacacccgcctcagtgagctccttgactcgcgtgatgccacggcgcttggggaaggtatcctgacggccctgcaaatacaggttctcggtgggggcgcaggcgaagttgatatgcgccgccttaagcagcttggtcaggtggaagaagtaggcgttgtccgccgatcccagcgaacaggtgtggctggcggtgaccttcgggccaatgccagccttatatgccaacgccgaaagcagctccacgtaacgggaattcggatcatccgtctcatcgcaatgcacgtcgatgagcttgtcgtatttcgaagccaactcaactaccgtgtgcatggaatgctcgccaaactcacggcactgttcgaaatgggggatgccgcccacgcagtcggcacccatcttgagtccttcctccaccagctcggcccccgattcgccatgcgggccctcgtaggagtacatgccctcctgcgggaagctgacgatctggagagtgaccgtatccttcaattcctccttaagctccagcagcgcctttaatgaggtcaggttcgggtcggtcacatcggcatgggagcgaatgagctgcacgccatgcagcatttctttcttaatgccgattttcgcgcgctgcttgatctcgtcgaccgtcaagtcggacttggtctcactccatcgctggatgccctcaaacaaggttccgctttcattcaccgcaccgggcttgcgggccgtgaatacgtaatcaaggtgcagatgcgtatcgcagaacggtgggcagacaagtttgccgcccagatcgaccacctcaatggccgccagatcaccaccctgagcctcatattgttgcgcgagtccggggccgaatgcggtgaacacgccatccgtgacgagaatgtcctgcaatggcagggtgcttgcagccgtgctgccgggttctccggtggcgatatgtgcgttggtgaacagtgtggtagtcatcgtcgctccttcaactggtgtgttgccgaacggttacgtgaaccgactgcccgcgtaaccaactgaggttattgtcaacagcacgctttgcggtgaggttaaccggaacgaccggtgttccgcgggggaatggacagattgtatgactgtatcgattcgcagtgcgcttcataacacgcagttcaaacgagccgatcctgtggtggaggtcgaaggcaaagacctcgatacgccagtgcgatgggtgtttaccaacgagcgagaggatgtctccagtttcctttcgggcggtgagatgctgattatcgagggtaacgctctgctcgccgccgattggcacggcacgttaggacaatatgtagcaagcctggcacaggctggtgtcgccgctctggtggtcgaactggtggagggtgtggtgcggatgccggacgaactggtgtctgcggccaggctgcatgggttgacgttgattggtctgaaatctcgcgtaccttttgtcgacatctgtcagagtgtcaataccgctatcgtgcacgaacagatgcacttgcaattggaggtggacacaatgtccacttcattacgtgagggattgtcccgtaccggcaatatcgaggctgtggccgaaaccattgcgtcgctgttcggcgaaagcgtcgccattttcgatggtgacggtctgttggccgctcgagcgggtcgtgcgttcgatgccggcaacgaatcgagcgccgtcatcgcccttgaaagtcgctcccggccggtgggagcattggagatcacgcaacgcgccatgactttcgacgccacgatgcgtcgggccatcgccaccatcgtgtctccggtggccgccctctatattgacggcggcgcgcgcatgggcatgatgcatcatctgagtatgggcccggccgacggcgtgcacgtcaatacatttgaggcgcaggaagcgcatgcgatgctcgacgcgctgggttttgccggatcatgcatctatatgccattcgcttttcggttcagatcggtggtggaaggcatcaaccatgtatcgacgatggtcgaacggttcgaagaacggtcgggatgcgccgtctcctgcatgctggaaggtgacttgatggtcggatggtgctccaccaccgattcctcagacggtgcggccgcattcggacgccattgcatggatgcgcttgccgtactggaaggcgacggtgtgtacgtggtgcatggccgagtggcattggacacggtgacgctggtcgacgggttcgcggtattgcgtgacatcgccaatcaggaaccggcatacgggcgaatcgtaagtaccatgtccgcactcgtcgaccgtttcgtcgcatcctctgatatggacaaggcgatgcgcatgctcgtggtgcagaccatcggattcgaggtcgccgcctctccgttgttgctggacacactgtgcgtctgcttcgacaacctcgatagcaaaaccggcgcgtgcgagcaattgggtatcagacggcaaaccctgtacaaccgactggacaaagtgacacaaatggtcggcgtcgactataacgacaaaccgaactggtcgatgctgctattcgccgccaaactcacgaaatcatggcaagaacagcatggtgaataatgcgccagcaccactgggcaacctgtccacttctacgccgaacgggttaatcgacgattcacgtttcagcaaatactcaagggcatagtcgaggctatcgcggcgctggtcgacctgctgcgaaacgaattcccacttgaatcccattcagtcacacgaacagcacatccttgaaaggacggtgacatcatgagttccgcaacgattactacatctgcacgactgatgaatttcacccctcaaactgaagaacaggccatggtcaggaaagtcgcggtatcttccttccttggcaacttcatcgagtggttcgactacgcctcctattcgtacttcgccaccaccatcgccctggtgttcttcccaaccgacaatcacaccgtcgccatgctgcagaccttcggtgtgttcgcgctatccttcatcctgcgtccaatcggcgcactgttctggggtagctacggagataagaaaggccgtaaagccgcattggcccactcgattatgttcatgtccggtgcgagcttcctgattggctgcctgccgtcttactcggtgatcggcgttggcgcgccgattctgcttctgctgctgcgcatggtgcaaggcttctccgcttccggtgaatatgccggtgcggccacattcctcggcgaatatgcacccacctcaaagcgtggcatctactgctcgctgattccggcgtccaccgccatcggtctgctcgctggctccacgctggccacgctgatgaccgccaacatgaactccagcgcgatggtcggttggggatggcgtgtgccgttcctgctggccggcccgcttggcctgattgtgctgtacatccgtaccaagctctccgattcccccgtgtaccagtcaatgaacgatgctcttgagtccaagagcgccgcctccgctgacggccaagtcgtttccaagagcggcatgttcgccccgctcgccgaactcttccacaaccatctcaaggccctgatcatcagcttcggagcctgcgtgctgaatgcggtcggcttctacaccgtgctcacctacctgccgacctatctgtctgacaccgtcggcatggacgccacccagtccggcaccatcaccaccatctgcttggtcgcctacgtgttcatggtgttcggcatgggccacatctccgacaaattcggccgcaagaaggtgctcatcggtgcttgcgtggcgttcatcgtcctcaccgttcctgccttcctcatcctcaacacctcccagttctggcccgtgctgctggttgagctggcaatgtgcgccaccctgaccgccaacgacggtaccctgtccagctacctgaccgagacgttccccacctccgtgcgcttcaccggattcgcgttcagcttcaatctggccaatgccatcttcggtggtacggcctcgttcatcgccactggcctgattgccctaaccggttcatccatcgccccggcctggtacatggtgggtgttgcggccatcgccttggtcgcgatgattctttcccatgaaaacaccgacaaggatctgaatcacatctgatctcctcagctccggctcctttcccgagggagccgggcgtattcattgaccatccaatccaccaccaacccaaaggagtactgcaatgggtagcaaccgccgtatggaccacatgacctggccggaattcaaggaggtgaagactcatcccgtcatcgtgccgatcggttcgaccgaacagcacggccagcatctgcccatcggtaccgacgcggtactcgccacgcgggtcgccgaagatctggcggaacgcatcgacggcaccgtgctgcccaccctgagctacggatacaagtccaagccgctctccggtggcgggccgctgttcccgggtactatcgacatgaacggcgtgacagtgatcacccaaatgcacgacgtgctgagcgaactcatcgctgatggcttcaccaagatcgtcgtcatgaacgcgcattttgaaaacgaggcgttcatcgtcgaggccatcgacctggtcacccgcgaaaccgggggagtggccaccatcgtggaaaccaattggtgggacccggttccgcagtcggttatcgacaaggtgttcgatggattggtgttccccggctgggcattggagcatgcggccgtcaccgaaacttcgttgatgctccactacgcgccggaactggtgcacatggaccgtatggtcgaggaagccggtgccacggcgaaatcctatgtacgctacccggtgcgtcaaggtgacgttcccgctcacggcggactcgccaatccggccggctcaagcgccgaacgcggccgcctgattgccgaggcgtgcgtggatgcggtagctgagatctgcgtcgaggaatttgccgagtaatctccccttgccgacgcattcgtagtgacacgggttgcaaaggcctgaccctgatagtacggggtcaggcctttcccatcccaagacgccgctaagaattcacctgagagtcgccttcctaggcatggccgttcaatcgacgatcctaacgtgactggtgtgagcaggaatatgaagaaccggcggtgggccggcaagcgatcggggatcgcttttggtgcagtagcgcttatccttacggctctggtggttccttatgcttgtgcgggaaccacgggagccgttcctttttccggcgataatccatcttccggcacccgtacggtgaccatcgccgacatcactgattttcacgggcatatcgaacgtggtgcggacaacgccaccgccttcaccgtggccgacagccataatcccggcaatatgatcccggtatcgaccggcgatttggtgggaggttccccgtatgagtcggcggtggagaaggaccaacccacgctggacatggccaaagcgtggggattgacgatttcggcggtaggcaaccatgagttcgaccgcggtgtcgccgatttcaacaatcgcatcgctgatcccagcaatggcatcgactggctgtgcgccaacacgtctgccgccagtaagtcgcctgacggactgctgagccatgtacgtgactctacgattcgaacggtgaacggcaagcggatcggtttcgtgggcgcccttactgatgcgctcggctcggtagccactccgcagattacgcgtgatgccgatcttgacgaacgggcggtggacgcgatcaatcgcgtggcccgtgaactcaaacgctccggaaaggtggatgcggtggtggccttgctgcacgccgatgcctcagccgccgccgatattgggcgagatgttgatgtggtatacaccggccacaatcatgcgatcaagcgtggtacgaccgctggtggcgcgcctatttacgaggcgggcagcttcgggcggaatatggccgtgcaggatttgatcatcaccggtgccgggcgtcgcgccacggtgcgagtggccgatgtggacctcggcaatggcaccagccatacggcggttgacggcgtgctgggcgtggaagggcttaatgcgcatccggcgcaagccgcttggatgtctgccggtgctgaggcgaacgatgaggtatcgcgcgctcagcatatttaccaggcggcggcaacatattcgaatcatgccggcaacgcggtgattggcaccttggcctccggcgtgaatttcgacaaacaaggttcggataagcacgggaatacggtcggtgtgctggtggcggacgcgaaccgcgagtcaatcatgaagcatgtgtatgccggaaatcgtttgccggtaatcggattttcgaataatggcagtctgcggactccacggcttgatatgaatggcgatggcaaagtcaccgtgcgcgaggtggatagtctcatggccttgcagttcaaggccgcgcatgagacgctcaccgggcgcgatgtgaagagagtgctcgccgagcaattccaccgtgacgatgggcgactggagcggcgctggctcggcatctcctcgaacgtgacgtatcggtatgccgaatgcggtacgaccggtgggagcggcaatgccgatgccgccgctgatactgatgccgccgctgatactgatgccgccgctgataccaacgctgacgctgacgagtgtgctgccgacgaacatgcggcggttcgtatcgtgaacctcgccgttgacggtcgaccgattgcggacgatgacctggtgattatcgcatccaattcatatctgcttcagggcggcgacagttaccccgccttccgtgccggaaccaattacggcgagctgaatatgccatacagccagccgttgcatgaatatctggccgcacatcaagggctcacggcaattgttgcagcaccggtagggactcaggcgtaagacaccaattgctgggtgactgaggaactatggggtggagttatgagtatagggcagaagaaaacggcataaatatgacgaagctcccctcgctgaggggagctgtcgccgtaggcgactgaggggagcttgcggtataaccgtaaactcccctcagtcagccttgctgccggcttccctcagaggggaacctggcacgagacccttacttgatggcgttcagccactgctccttggtggccttctcggcttcgagcttggccttcttcttcgggtcggattcggccgcgatcttggcgtcgagctcggcgagctgggcgttgagctgctcctcgaagctggacttgcgggcgtcggcctccgggtcggtctgcttccaagcggcatcctcgatggccttgatctgcttgtcaacggcgtcgagacggttctcgatgcggcgcatatcgtcacgcggcacgtaaccgatctgatcccactcttcctgaatcttggccagctcctggcgggccttcttggcctcggcgtcggtcttcaccggcaccagagcctcggccttgaccagcagagcctccttggcagccagattctccttctcggaggagttgatctgatcgcgatcagcctgacgagcgttgaagaaggtgtcggcggcttcgcggaacttggcccacagctcgtcgtcctcgttacggccagcgcggccggccttcttccaacggtccatcagatcgttgaacttgcgggaagtttcaccccaagcggtggaatccttgagctcattggcctcggcgataatcgcttccttggcttccttggcggctgtacgctcgttgtcgcgagcctgagcccacttgcggcgagcctggttgaaggtggtgcgggcggcggagaagcgcttccacagcgcctcggcctccggcttgtcgatgcgcacggtggtgcgctggtggttctgccactcgtcgaacaggttgcggaacttgtcggcggtggagcgccagttggtgttgtcgcccagggaggccgccagagcttcggccttctcgacgatggtggtgcgctcggcgacggccttggcctgagcggccttgcgcgcttcggcgatctcggccttcttggcctcgccggcggccttcagttccacgtaacgggccttgagggccgcgaggtcgcccaccaccgccggttcggcggtttcttcgcccagcagcttcacggactcgtcgatttcacgggccttgatgttcggggaagccagacgggtggccagcagatcgagcttggccttgagatccaggaaacgacgggcgtacagtgccaacgcctcttccttggagacatccgggaactggcctacctcgcgctcggcgtcgccatccttgacgaagacggtgccgttgtcatccacgcggccgaaggcctcggcggccttgacatcagcctcggaataggtggcggtggcggcggccggggcggcagcgcgcggcttggccgacggagtcttcttggcgaaggcggcgggggagggcgcgtgcggtttcggcatggaagcgggggacggagtcggcgccggcgtggccgcgctggcttcgggtgcgggtgtcgttgcctgctcttcgggcgc

SEQ ID NO: 2042 - DNA, 18046 bp, Unknown
  R17_18m  MAG No. k141_44611
caggccaccgcctcgttggtgttcctggttaacgtgccgatggtggtgggctatatgccgtattacaagtggcagttcgcagcattgcgcaagctgtctggctcgatgttcgcgctgttgccgaacgtgggcgaacagttggaaaccgtgatgcgattgagttcgacagcctgctatggcggggccggattcggcgaaggcggcaagggcgcggctccagcaatcgagaaaatcaacgatgttgtggagcagattgcggtggatatcgtcagggaactcaaacgcgaacacctgaccacgtccggcgagaccttcctcgaatggcagcgcccgtatgtcgaggaccacatcgtctccgatgatccggtgcttaaaagtttgtagattcaagctccctctgtcacggcttcgccgtgccatctccctcatcagagggagatattagtgaaaggaacgtcgatgaccaacgaactgactgatgatgaactgcgcgaggctattgtgcgccatgaatgggatcagttccagcgcaccaacaatgagggtggacgcgcggcatgccaaggcaactggccggtgttccaccagatgcggctggcccagttcctcacatgggagcggccattactcaccagctatgccgctgatcttgacgcggccgaccacgtgggccgcaacctcgtgaccgaaaaatacggccgcatgatggcctccaccgcgccggaagatttcacgaagaacatagagccgtatattccgcgtccctctgaagagcgcgtggcccgtcaggaacaggtcatcgcccagcaggtcgcctgggccaaggatttccgcgagcgctaccccaagctcggcgaggcgatgcgcgtactcaccaccaccgaagacacaccatctgccacctcattcgaaacctatctgcgcggcgagcttggtacgtattccgaacggaccttccagctctacgaggtgatgattagcgagcgcgccgcagccagcccgcaacgcaatatcactgaggaaaccttgttgcacacagtccagctcggcggtttcgacactttggatgaggctgaagccgctcagcgctgacgacagtgcctccacgccgtcacgccccatccaccttcccgaatttgtgacgctcacggcgactcagtggcacatattcgggaaggagccggtaacgaccgtgaatatcacagactgaacaacccccagaaagacaatatcgtcaatgtgacaagtgcagccagtgtcaccatcacgcaaatgacacgacgcacgccgataatgctggcgcgataccgccacatacgttccagttcccacgcgaacagcacgaccaacagcacggtcagcacctgcaatgccctccacccaagggaaaacaactgcggttgaggcataaccaatacagccgatacgcctacggcgctcatatagccatacaacagcacggtaatcaccatcaccgctgtgccgataccggcagataagccggcaatgccgtgcaacgtacgctgttgggcggctcccagcccactcggcgtcgcatgcatggcccgcacagtcgccacactacgtcgcccggccagcaacgtctgtagccaagaaaacacagtcaagccaatacccaatatcgccgccatcacgatcagcacgggccctgccaccatcagaccggccagcacgccgagcgagccgacgataccggatctggtacgttgcggcgcggcgaagcgctggtgaggtgtcgcaccggcgacttggggcgttgcccatccatcggctttggttcccgcagtcacaccgttcacccaattttccagcgcttgcgtatagccttcggccaatggcaggttcggggtgaataagccctcaccagcccgcatctgatggttgccggcaaaatagcgtacggtgacgttctcgttgccggacttgttggccgtggcgatgatccgctgcgccccctgttcgatgggcatggccgtatcgtaggtgccgtagttcaccagcaccggcatggtgagggatttcagataccggtcggcatcaaagtcggcataggccagatcgaatggcgcgtagtccagcgacatcaatttggccatgtctttgaccacgggcttgggcgcgccggcctcatgcgtataggcgctgacagccatggccatttgctcacgtccattgaacaccggtgcggatgtaagtatggcaaaggcaatgtcttgccgtttcgaggttagaatcgtggcgatccaggtgccttcggattcggcgtagatgccggttttggcggggtccacgccgcttatgccacgcagcacgtcgagcgaacgcccgtattcgcgagcaaaacgcgggtagtcgcgatgcagcacggtgtagttgtcgttgcgcttggccggcaccaaggtcacgatgccggcagaggccatggcgttggcgatatcgccgaaatcctcggcaccgctggtaccggacccgtgaatgaacagacaagccgggcgtggcccgggagcgtcgaccggttcacgtagtacggcgggtagcgtgacgccgtcgccggtcttgatggatagtcgggtttcacgcgtacgatatcgcccctcgtggggaatgttcgcatgggcaggggtgatggtggtgtcggcagaagcgatagcgatgtgcttggtgtagggccgtgtgttccattgcggcatcatcgcccagccaagtgtggcgaataccagcgtcatcgccatcgcggtggcgatgacgctcgctacccgccgcgccgaaatccgtttcatagttactatgcctcccccatcagcatagaacggtcggctcttatcggtcggctcccgtcataatgtgcttctactgggaccgtaatgcaatggttgtaacgctattttctcttcttgacggcaccgactatggcccatacaacggccactattaccagaataagtcccactacggcgcagataatagccgtcagcaattgcggattcggcgagaacagcgaaatcatccgatccggagatatgcacccgaaaaccagcgcgatcacgccgataatcacgcctaatagtccgaataccacagtaggcgcgctggtgctctgtttctggatgttcttggcactcttgacatccttagcattctggacgttcttggcgctccccccaggctggcatggtttgccggcggtctgagactgctcataggaaggttgcgctgaagatgctgcgtacatcggtacatcatcggcagatggaatcggcccgccatccccctccacggcatcggcaactgtttccagggcaatccgatctgtggttggttcgatgggcgatggagaggcagctgttgcctgcgtatccacatccgagaccggcgcatccgcatgatcgtcggggacgggtagcacagccgttttgtcatcatccgctgcggatggcagcaccgtggtatcggttcggtcatcgacggtcaccatggttgtggtctcggtggtctcgtcggtttcggaaggtatggccgtggtcggtgtcgcatcctcgatggaggcgaattccttggtttcatcagtcatgattccatctcctggttgtaacggcttgatcattccgattgcccggttgtgttcttgcttgtgctgttgccgtcgtatatatcggcaagcggctggaacgtggagcctttccaatcggaggcgtacaccacgttgacacgtgcttccactgcatagggaatattgatttttaattctgggccgttgtccggcatggcggatcccttatccaaccattcgtaatcaggcccattcatgggattggtggcgctttcagctccgaagaaaacaaagcttagacccatgtagttgttgtataccatctcgtatttgccgccgacgtcactcgaagtgaagtaggagtcggcggtgccgaaggcgtaagtgcaggaatccggcagaacgatatgcacttgcgcctgtgttgcggctatggtgatggtaccgaccggacaattactgatggaggttttgccatccagcatcttcaccgtgtgcggtccatgtgtcttgtcccaatcggaccaatcaatgattgcctgatcggtgttgtagttttcaccgttgaacgccacaccttgctgcaatgtttcgaacgtggcatcgctggcatcggcaacgaagatgccatccttttgcacatcgttcatgccgtcgctgtttctcgcactgacagattggctcagtgaaacaacagtattgatgccgctggcaccaagatcacggtagtacacgccatacgtgcctgaaacgatggtcatgcagagcgcgcatccaccggcaaccagtccgagaggaatcagaccaccggtacgccgccctctgaatccgagaatgatgaccaccagccccatcactatgcatactgcggcaatccagatggtgctcagacgcataatgccgataatgcccatgtcgtttacccaaatcagtcccatcagaccggcaaaggagaggaaggtaaggcccagtatgctcaagaccacgattgggcccgccggcttgcggcgcttggactcggtgggggcataggccgtcgcattcatacggtcgggggcaaacggcccgttgggtactgtgccgggcatcacgccgggcaccgcgccgggcatcacgctgggcatcgactgatagacaggctgtgaaacaggttgtgaaacactaggcgcggttcgtgaaacagattgtgaaacaggttgcggagctgaatacaaaggagatagagggaccggttgcgcggctggatatgaggcaggctgtggagctggatacgacacaggctgtgaaaccggtcgcggcgcagatgccccgaatccgtacccttcctgctggcgaatgccgcttttggccaacaaccatagcgctaaggcggcgagcgcaatacaaacccaccccgcacctggaatcacgattgccacggctaggaacaggaagcatccaagacaattccagtcccattggccggcaatgaggtcctcggccaagatgtgcccatcgcgtacatccggcatcagaaaccagccgagtgcgtacagagctgcgccgaagccgaagaacaatgtacatacaatcaccaacgcacgtactaatgtggggctccagccaagccgtaaagcgatgccgctgcatacgccaccgatccaccggtcgtcgccgcgaaccagtccactggatcgcacccaagtgaagaagcgtcgcgatgtcttgtttttttgcggaccaggctgcggctgtggctgatacggattcgcgtttggattgctcatgattccattacaccgcccgaccactgccacaacgctcggggaacaccctgattgttccctgaacaccgggtaaaaccccggccgcaacgccctgagcgcggcacaataggagtatgacgtcatctcccgaaccattgctgcccgcgcgcatgccgctgatgcgcccccggcagggccgctggctcaccggcgtgtgcaagggcatcgccctgcacttgggcatcggcgtgacatgggttcggattgcgttcatcgctctgaccttcctctacggcgcaggcatcatcgcttatgtattcctgtgggtgttcatgcccgccggagacccggtggcggctgcggctcgcacagtgcccgttgatcaggcgccgcttgcgcgaggcaatcagccacttgccgctcatgacgacgaatcggctgccgcaccggaatcattgtccgaggccatccaacgtgctccgaaaccggccgttgtggcattggccggtttcgcgttgatggccaccggactgctgctcaccagcaccggtgcggatgcccagattgtgcttccgctgctggtagggttgggcggcatcgcactggcatggatgaatcttagtccgcgaggcacgcagctgttgtctatgttgggcggcatcgcactgattttcatgggatgggcattgtatgtgcataatgtcagcattcccgggtggggcacctctcctcgacgcattgttgccagcggattcgtgatgatcgtcggtatcgtggtggcggtgatgccgtgggcgaacgcgatgctgcaacgactcacccacgagcaggcattgaaggagcgcgaagaggagcgcgcggacatgaccgcccatctgcatgatggcgtgctgcaaacgttggcgctgattcagctgcactccgaggaaccgaccaccgtattcgccctggcgcgtagccaagagcgcgagctgcgcgaatggctgtatcaggaacgttccacatcggatcgttcggtgggagccggattgaagcagatcgccgccgaggtggaggacgagcacggcaagccgattgaggtggtcaccgtgggcgacgcgcggccgagcgcccagaccgatgcgctgctggacgccacccgtcaggcgttggtcaatgcggtcacgcatggcggcgagccggtgtctttgtattgcgaggccagcgacacgatggttgaagtgttcgtgcgcgaccatggcgaaggcttcgatatggacgccattccgcccgaccggctgggcatccgcgaatcgattatcggccgcgtcaaacggcgcggcggtacagtggagatagtgtccagggccggctggggcaccgaggtcagaatgcatatgccgatcgcgctgaaagcggcgcagggagaacatcgatgagcgagaacgagacagccaagattcgtgtggccgtggtcgatgaccatgagatgttccgtgcgggcgtaatcgccacgttgcgcgattccttcgatatcgtcggccaagcggcggacgtgcccggttcggtggcgatgatcgcacagaccaagccgcaggtggtgttgctggatgtgcacgtgcccggcggtgaaggtggcggcggtgccgagatcctcgccaaatcgcggccctactcccccactaccgtgtttctggcattgtcggtttcggatgcgccgcaggatgtgggggcggtgattcgcgccggcgcccagggctatgtgaccaagacgattaccggcgctgatttgatttcatccatcaagcaggtgcatgagggctatgccgtgttctcgccaaaactggccggttttgtgctttcggcctttcagggtgtgccggcggcggggtctgatggcggcgctgatggtgcggcacgggctcatgatgaggagctggaccggctgtccgcccgcgagcaggaggtcatgcggctgatcgcgcgtggttacacgtataaagaggtggcggccgaactgttcatttcgatcaagacggtcgaaacgcacgtgagctcggtgctgcgaaagcttcagctttcgaatcgcaccgagctcacccgctgggccgccgataggcgcattgtgtgataaacgacagatgagctccctcatcagagggagctcatctgctcatatcactcggcgtcgcggaaaccgttggggttcttggtctgccagttgagggaggaggcggccatgtcgtcgatggtcagctcggccttccagccaagctccttctccgccttggaagcgtcggcgtagcaggcggcgatgtcaccggggcgacgcggcttgatcgtgtacggaatcggatgaccggcggccttctcgtaagccttgatgacctcaagcacggagtagccgtggccggtgcccaggttgtagacgaacacgccttccttgtcgatgtggtcaatgacggccacgtgacccttggccaggtcgaccacgtggatgtagtcacgcacaccagtgccgtcgggcgtgtcgtagtcgtcgccgtagacctggacttccttgagctcgccgaccgcgaccttggccacgtacggggtgaggttcgccggaatacccttcggatcttcgcccagcaggccggactcgtgtgcgccgaccgggttgaagtagcgcagcagcacgatggtccaggacggatcggccacatgtacgtcgcgcagaatctgctcctggaacagcttggaggtgccgtacgggttggtggtgccgccggtcggcgtctcctcggtaatcggcagttccttcggcgtgccgtacacggtggcggaggaggagaagatgatcttcttgacgttgtgcttcttcatcaccttgagcagcacaagcgtggagtacaggttgttgtcgtagtattcgatcggcttggccacggactcgcccacggccttgagaccggcgaagtgaatgacccaatcgatgttgttttcggtgaagacgcgttccataagcgcctcatcgcgcacgtcaccgtcgtaacgcttgaccggcttgccggtgatctgctcgacgcgctcaagcgccacgggagacgagttgccgtagttatctacggaaataacgtcgtagcccttgtcgagcagttcgatgtcggtgtgggtggcgatgaatccagcaccgcccgtaaccagaacagtagtcatatctcctcctttggaaggacttgccttcggttttccttcagtattgagcttacttcacttgacctgtttcacctagcggcaaaaccaagactttcgaggaatgtttgcgtggtggctttctgcttgaagacggccgtgttgccgaggatgcggtagcagacgctgccgagctcgtcacgtacggcttggtggatggcctcgcggtcgcggtttccggccaatgtttcagcgagttcgccccattcgagactgaattcgctgacttcatcgggcaaatcgcggccttcggcgagcgcctcctcgacgatgccgagctggtcgacgagccgtccgggcaggatgaacaggccttgggcttcgatcagtccaatcggctcctgcttgaccggccagtattcggggtgtgcatggaaaataccttccgggtactcgtcgctgatcgcattgttgcggaagatgagactcatctcatagccacgttcggtgatgatcgcgctgggcgagagggcggattggcggttgccgtccgcgtcatggctggcgatgccgttcgccgcgtcgtcataaccgacccatgcctcgcggatgatgtcggatacgtcgatgatgctctggcggtttttcgacaccacacgcacggcggtaccgggccagtcgaggatttcgaccacggcgtccggatagtcggcgagcgtgaaggcggcccaagtggcggccttgtgcatcggcagcagttcgccgccgccctggtagtggtcgtgggcgagcaccgagccgccgatgcgaggcagcgcggcgttgcatccgaggaagtatccggggaagcggtccacgaagtcgagcagatggccgaaggtgtcgcggtccacatgcatcggcgtgtggtcagtgttcacgcagatgccgtgctggtcgaagtagccgtagggcgagaactgccagaaccatgactcaccgccgagcgtgaccggcagggtgcgcagcgtgcgcttgtcacgtccggcgaagccctcgttctcatggcagatcgtgcacttcgggtagccgccggacacggcgttgccggccgccgccttcttcatgttcttgaattcgggtttggcgaggttgatggtcaccgtcagcccgtgcgagtcgaagcgcgggttccggtcgagctgggcacgcttgacataattgttggccacacagtagtcgtagaaccattgcatggcggccatgccgccgtccctgtgctcgatgagcaggaaccggtcgtcgagatcggcggggttggcggagaggatgcccatgatggtgtcggcgtaggccgggccttcctccggatcgaagaggccggcggttgtggcggcggcgcggaaggcggcgagtagggggtcgggggtcttttcgtcagagggggcctggcttcggctgccgacaatgtcttggactgcgtctgacactgacgccgccgacgttgtggttttgggtccggggtaggaatccaggtggaagagggcgaagatttggttgcgggtccagtctgcgttgcgtggatcgaggtcgagatgatccaaggcgtaatcgactagggcgtcgatgctggcgtatacctcggtcagctgatcgctcattgctcggcccccatcatgctggttcgggtatggttcgactgacggctcacttggcagcctccatgatgtcggctacgatggcgtgggtttcactggccttctgctccatctcctgcacgagtttgatctgggtgcgggtgcgcaccagattgtgctcggggtacttggtggcaaagtagatatcgccttccaagtagtcggcgagaaagcgcatgccgcattccatggtgagcaggttgccgctgaacggcagcagttcggcctcgcgcgcggtgatgctgccacgtagttcgcccacgaatccttccgtgtaggcacggaacagctcggtgctgaaatgcaccttgctgaggtccttttcgtcttccagagcagtggacgcaccaaagcgtatggaatcgccgaagtcgaacagcatggagccgggcatgatggtgtcgagatcgatgatcgcacgcgccttgccggtggtggcgtccatgaggatgttgttgagcttggtgtcgttgtgggtcacgcgcaacggaatcgaaccgtccctgagcccatccatcacgacggcatactggtcggcgtggctcagatagaagtcgatttccggctggcatgcggcggcgcggccgagcttgtccgcggcgagggcggccttgaagtcctcgaaacgatgcggggtgtcgtggaagcgggcgatggtttcggtcagctggctggcgtcgaattcggacaggaagttctggaagtcgccgaatgcgctgccggcctcgcggaacacgtccgggttcggcacgaggttgtacgacacggtgtgttcgatgaacttgtagacgcgccatgcgccgccatcgatctcggcccaggtggcgccggaggtggtgggcacaatgtccagcgtctctttgccctgagccttgagagtggaggtgaccagttcgacattgcgcatcagattcaccgtatcggggaagatgctggtgttcatctgttggaggatgtagcgggggccgtccgtggtcaccagataggtggtgttgatatggccgtctccgtaaggttcgatgccggtcacggcaccttccagcgcaaaatgcgaggcgatgccgaataaaacttcattgctttcggtcatgatgggtccgttctccaaaacgcgggaatcaggcttcacgccatgcgatgccgctgtcgggcaggtcgaagtcctcggtggtgccgtcggccagagtcaccgtggtcttctgcggctgatcggtgttgttgattacgcagtacaacccttgctcggggaagtgcgccacctcgcactccgggttggacgagctccaagccgcatacttgtcttcgttgtgggaggcgtagaacagcacgcgttccagcagtcgggcgttggccgccgaatagggcagaccggagatgtacacaccgcggccttcgccataatcattggtcgcgagctgcacctgcccgccgtccgcgcgcagcagggtcacgttttcattgaccggatacgtgttgagcacgggttcgccgaagtcgatgccgcccaacggcttgatggactggccaccgccgcaaccgctcagcgggatgcggtagccggcctgttcccaagcctcgcgggccgccgggtcgaccggcacatcggcggtgatgaagtggtccggcaccaccggtgggaagtacttgtccacggagagggtctgatagcgctcctcgtccacgccaatcacgtcggccagctggaagaaccggcccgcttggaagcgcggtgccgagctcggctcgcccacgcccacgaacgcgccgccaccacgcacccaggcgcgcacggtttccacgagcttcgggttggtccacacgtcgccgccggtgaatgcggtgtcgaccgggccgccgttgatgattacgtcgatatcactatcgatgccatgcgcgagtacgtcgtcgaagctgatgaaccgcacgttcacgcgcatgccggacagggattccagaatgccgtagtaggagtaggtctgcttgttgggcagggcgtgtgccacggtgaacgccatccaggaacgcatcttgccccaggaattcagaatcgccacgttgagctcgccttcggcggccaccccaccggtgcggtcgtggatgtcgcggaattcgtcggcgatatgggtcaccgtgtccacgaacttcgggaacttggcggccaaggagaggtagccaccgtagcccatacggccgatcggcgaacgcaggatcgcgcggcgggccttacgccagttgtcgaggccttcgatgctcgggtcgttaccctcgtagaacgtgtcggggaagaagtacggcaggaagcgtccttccgtgtatttgacgcccggaatgtccgcgatcatgcgggtggtggtgccgtctccgatggagccgacgaccgcatccaaacccagcttttcgaacccgtccttatacggttcggtaccgatccactggtcgccaaggaacatcatggcttccttgcctgccgcgtgcgacatgtcggcaagccgcttgacgttctcgcgcacgaatccggagaggaagtcaatccagtcgcgttgcgacttgcggggcacgcgccacgcggagttgtaggcaccgccatccacgaaatcctccggacgcagacggtaaccgtactccttctcgaaatcgtccaatgcgcgcgggctcacggtgcaggcgcaaccgaaccagtcgaccaccttttcgcgacgcttggcatcgaacaggagcgtgaactggtagaagaacgtggtgaaacgcaccacatccacctgcgggctgtccttcagccactgctcgaacgtatcgaacacgaacttgcgggtggccggatggtagatgtcgaacggaatctcgtgttccttgtctccccaatcattggtcaggtggttgtacatctcgaccgggtcccagatgatgtaggccaggaaactcaccgtgtattcgtgcatcggcacggcagcggtcacgtgcacggtgtcctcgcccgggtcgagcgtccagccggacgggtccacgacctcgcccgtggtgcggtccacgacttcccagtacttatgagggtcggcgtcacggttaggcttgagctgttcctcgaagaaaccgtccatcagcggcacatccaccgcgttggactcggccaggatacgggcggtcagcaggtagacctgcggggtctcgtccatgtgcagggtgatccactcgttgtgggcgcgggtcgggaagtaggcgctgtagattttcttgccaagagcgagcactgcctcgtccagatgcgtgccgtcggagttgcggatggcgtccgcaccccacaattcggcgagttccttggtcttttcggcaaaattctcttcactgggcagcgtgaagcggccggtgctggtcatgagtgctcctttgtggggttggtcatcaaaaaactacaaagcgacgaattcgtcgcatacaaaatgaccggcgtcatcgcgggccctgggaccctgactgcgtagatccttgacgcttacggtgacgccggacgattggaatcgtgtcactgaatatgggagggacgttgcccggcaccggaaggagtgacacgacatgccgggcagcggattggttagcccttgacggcaccggcggcgaggccggactgccagtagcgctggaggccgaggaacagcacgatcacgggcagcacgccgagcaacgcacccatcatcagggcgccgcgatcggtgaacgtggccagcgagaccatgccgtacagaccgagggtcacgggcttcaaggtgtcggaagacaccatcatcaacggcagcaggaagttgttccacgtggccacgaacaggaacaggaaaatcgtcaccatggccggggccaggagcctcagcacgatggtgaagaagatcctcgcctcgctcgcgccgtcgatgcgggcggcttcaagcagttcgtccggcaccgaactctgtgcgtacgtgcggcccaggaagaagccgaacggcgaaacgcagcacgggatgatgatcgagagcatagtgttggtcaggtgcaacgtgtggaagatcgagtacatcgggatggtcagcagggcggacggcatgagcatgcaggccataatgatgccgatggccgcgttcttgccgcggaagttgaattttgcggtggcgtagccagccatcacagacacgatggtgccgatcaatgccgagacgcccgagtagatcagggagttcagcacccagcgccagaagttgccacgagtccagccaagcagcttggaatagttagtggcgatggcattgggcagctggtcaagcggcacagcaaaccacatgccgttgctaccggtcatctgggccggcgtcttggtggacgcgatgatggcccagtaaatcgggaacaggaagtagatcaacaccagtaccagcagcaccacggtgagggtcttcacggccgcggacggtcgcatggagcgaggcaaatcgtgttgcgcagcctgacgctgcttttcgagcttgcgctcggcctttttgcgggcgcgttcttcaacggttgcggagctcattactcgttcaccttcctttcggccaaggtgtacagcacggcaagcacacctgcgatcagagccatgacaatggcgatggccgaggccggaccgtcaccagacggggtaatggtgccctgagaagtgttcatggccatcatcatcggtgtatacgacttggaaatacccggatcagccgtagacatgatctgcggttcgttgaacagctgaatggtgccgacgatggaaagcagcatggccagcagggccgcgccacgcacgttcggcagcttgatcttcgtggcaatctgccaaccattggcgccgtcgatacgggcggcctcatagaggtcatgcgggatggcctgcagtgcggcaaggaaaatcagcatgttgtagccggtgaaggtccatgtggtgatgttggccatcgagccgagcacgatgttcttgttgaagaagtccacattgacgccgatggcggcaagtcccttgacgatcggcgagatttggccgttgtacaggtagacccagataatcgaggccacgacgccggggatggcgtagggcaggaagtagcccagacggaaaccggtgacatgcttgaccacgaacgagtcgatgacgatggccaacgccagtgcggcgatgatcatgatcggcacctgaatcagggtgtagagcagcaccctgccgacgccggaccagaagttgccggaagtaatagcatactggaagttctggaatcctacgaatttattgaccagctcgccaccgccgtatgcgccaccgccctcggtgacctgacggaagaagctggaatagatggcccagatgatgggcaagatgaacacgaaagtgaacaggacggcgaacggtgccatgaacgcccagccggtgcggttctcgcgcttctgagcgccggaccgcttcggcttggcggcggcacgcctaggtgctttgcccttcgcctgagtagtggatgcagtcataatacaaaacctgtcttcgcaaagaacagtaaaacaaatgacaagggccacagcgcccctgcagcaatacccccaaacaatacggaaggccggagtatgtgccccggcctttcgctatggtgatgcgaggcatcggaggtcttggacggccggctatttcaagccggcccgttgacaagacctagtgaggtcactccttgacggacagaccgaggttcttcagcgtatccaccgaggtcttctgagcggtgtcgaacacatccgaaaccttggcagaaccatcggcagccttggcggcggtctgtttcattgcagcgccgactgcggagaagccaggcatgtaggtgaagtcacccatgttgtcgttcgcggtcttgaactcagccatgacatcctgtccgctgaagtagtcggaccacttctgcggggtcttggcatccgcggtggtggcggccacgacaaggccctgggagacaaggtcatcaacctgggtgttgaaccagtcaaggaactccatggcttcggccgggtgcttggaacccttgagcacggccacaccggaaccaccatcggcgccggtcttggtgccattgccgaaccagtcaccgagctgggtgaccttccactcaccagcaccagtgccaccggcggaatcgatgaacagtggggcttcccaagcggcggccacggtgccgatcagctgaccggactggatggagttatcaaacgatgcatcccaacgcgggttggtgagggcggccttgttgtcgatcagctgctggtagacatcggccacggccttggagcccttagtctgggtgttgacaacccaggagttgccgtcgaccttgtaccacggaccggaagcgccggcctggccggacatcatcatcatggcctcatcaggctggaaggtcatgatgtacttgccctgggcagcggtcttcttggcggtctcgatgagctcgtcagcggtcttcggcacggtgatgccgagcttctcaaattcagcggcgttgtagaagtaagtcagcgggccggtgtcctgcggcagaccgtaggtcttgccgcccacctgcatcagcgcgaacgggccggaagcgaaatcgtccttgtacttggcggcctcatcggtgacatcctgcagaaggcccttggtgaagacctcaggaacctcggagtaaccgacctgagccagatccggcgcattgccagccttgacgtcggtctcgagcttcttgatcatgtcggcggcattgccatcgaacttggtggccttgacctgaatgttcgggtgctccttgttccacttggccacaatgtcgttgaccaaggtcatgccttcggaatcgggcagacgatgcatataggtgatgttgaccacaccgccatcgctgccggacttcgtgtcgccggcagtgtcgctgccgccgcaaccggccaaaccaatacccattgctgctaccgcggcaagagcagccacgatgcgcttgttgtgcgataccatatctctactccttcctagtgaaatcatcacctcagcgtgatgactgattgctaatttaggcctttgctcttttattgtcaacttagctaacaattaccgcgcgtcccgttgaggtgagtggcattaaaccgattcgatgctcgattgtgcgggtttgttcatttcattaactccccttacaaagcaacgtacttttggtccaccggtagacctaatgagatattggatagcggcaacaatccaagacgtcagcttgcaatcgtccaccacaaattgcaagcacttgccaacattatcggttttcaggttgccggcgcgatacccgactagggggggcaccgcgccttaatgagacgctacacgagcagtctcagcaactggtagagctgccacaggctacgcacgttgaagcgcgtgccgtcaaccgtggcgttcgcctcgccatcgcccacatggacgatcacggtgcgcccgttcacggtcagattaccgtgcatcgtgatatgattcatcttgcaaccttgttgattaaaggcgcaagccggtaatcaacgcaaaggcccgatgccgcaaacgtcgggccttttcttatcggctcacgccgattggcccgtcatatcaacggggacaccgcatgttacggcatcacaaaccaatatatcagcaccccggtggcgatcaagaagacaggttccagaaaaagaaaaagagcctgggcatgttgcccaggcctcggttcgcggacagggcgagattcgaactcgcggagggttgcccctcaacggttttcaagaccgtctctttaggccgctcagacacctgtcctgatgcgcgttcacacgcgcaagtattcattatacagaagggagggatgttgata

SEQ ID NO: 2043 - DNA, 12735 bp, Unknown
  R17_18m  MAG No. k141_44849
cgcaaatcgccggcagcgaacatcgccccggcattgacgggaccaacgttgtcagcaggaccaacggagcgaacgccgccccggaaccaacggaaccaacggaaccaactgaatcgccgtcacttgatgatgggcttctgggatgcggaaacatcaatctgatgtttgccggcaaagccagccgtgccagcggtgatgttcttgtcgatttcctcgacttccgccagcttcagcttcagttgcgaggagtctccccaaatgattacgcggtcaccgtcgttaagcgtggtggtcaccgaatcctgcgtctcagcggtgaccttggtaatggacttacgcatcgattccggcaatgcgcccagaatcgccagcgcctccttcaccgaacggttcttgagactggcgtctatatccttgacctcgatcaccgggatgccatccacgttggcgttcttcaccgagttcagcacacgcgcctgggaatccaccgcggtcagggtatcgcctcttttcagcatggccgcaggccgttgcgccttgacttccacgctcatcgacttggggaactgtttggagaccttggcctcgctgacgccgggaatggacttgagttgctctgtgacctcatgggtggagaccaggaacaacgactttccagcctgcttatcggcgatggcatggatggtctgcgcgctcacccattcgttggcaccggatacgccgatctcgctggtttccagacgaaacgccgacgagaagagcagcagccacgttagccccgtcactacagccacgctgacgacagcaatcaacacgcgtaacgcaacgacacgtacgttcgcacgcttgcgttctttggcgcgttcggtgaaattcaccactttcgggcgtgatacgactcctagggagccggtggtctggtgcagcgtttcggcaacgtaatcctcgctgtgcagccgtcgtgcatcgacgaaggcaccggcctggcccttggctaccgtcacatcgtcgatgatctccggctcgttgatctcatgcccggaagacacggaccggggagcgcgagacttcgacgagtgacccgtgtttccgcgtgaaccgatggtgcgcggcttgcggggacttccggacgaacgacgtgagccgttgtcattgcccccggatctgaccgtgcgcccggacatcactcgcagctttcccgatgggcctcaagtgcggtgagcagcacctgatccatgtcagtgatgtcgcccgcgcccacggtgaagatcacgtcgccgtggtgggcgcgcatggccatcatcttggcggccaggcacatatcctcgaccggctgaatccacgtgcctgcggaagcgtccttgagtccctcagccgcgtccacgatggtggaggggctgatgtccgggaaatcggtctgcttttcacgggccgggaagatgccggtgataatgacgtcatcggctttggccaaggattcggcgaactggtgcgcgaagaacttggtgcgggagaacaggtgtggctggaagatcacacgaatggtcgaatcggggtaccggcgtcgggccgcatccagcagggccgcgatttcggtgggatggtgggcgtaatcgtccactacagtgacctgcttgaccgtgccgcgcacctggaagcggcgtgccgcaccgaggaatgtgccggccgccttggccgcgtctgcggggctcacgcccagcagcacggcagcgctgatggcggcggccgcattgcgcgcattgtgcacgccaggaaccttcagggcaacgctctgagacaccggctcccccgccgtcaccgcggccggcagatgcagggtgagctgttcgacgccgctgcctgcggtctcgctttccgaagcgatccagacatacgcggcaccgcccaaatcgggcagggattcacgcgcggtagtgccgtaggcaacggtatgggatttcacgtcggcgggcatggcctccagcacggcaagtccgtcggggtcgtcgatgctgatgatcacgtgaccggtggcccggccggcgtgggcaacgaacgcggcacggtagtgggcttcgtcgccgtaatggtcgagatgatcggcttcacagttggtgataatggcgatggtcggatggtatttggcgaagctgccgtccgattcgtcggcttcggccaccagaatatcgcctttgcccgcgtgtccaccgtccagcgtggtgccgtccgggccttggataaagccgccgatggcgtagcttggatcagcaccggcgttcaccagaatgtgggacagcatggagctggtggtggttttgccatgcgctccggccacggtgacggctcgtttgccgttcatgagcagagcgaggatgtcactgcgatgcacaatgcgcttgtctgccgcgtgcgctgcgacgatttccggattgtccggtttgatggcgctggagtagaccacggtctcggcctgggcgacattttcggctcgctgcccgaattcaacggtgatgcccagcgtttcaagtcggtcggttttggcgctgtgtgcgcgatcggagccgtccaccgcgactccttcggcgtgcagcatttcggccagaacgctcataccggcgccgccgataccgatgaaatgggtggcgccgagatccgcggggcgggccgcagcatcgaacgaggcatacgtggggtcaagcacgatgggctgatcttgagacaattcaaaactcctttggggattccagcaccctatattatgaccgtatctcgtgttgcgggacgggattggtctgtatcgcgcacgggatgatatctgaatactatttggatggttcggctaattgcagaacgtgccgggccatgatttcggcagcgtttctgatgccgtattcccatgccttgcggccgaattcggcaagtcgttcgtgatcggcgagcagatcgggcacatgctcatgcacccactgcggggtcaggtccttgtctgcgaccagaaggccgccgccggcgttcaccactggctcggcattgaaacgctgctcgccgttgccgattggcagcggcacgtaaatggccggcagacccagtgcagccagctcggataccgatccggctccggcgcggcaaatcaccaagtcggcacaggcgaaggccagatcgattcgttccagatattcggcggtatggtagtcaccttgtccggccgattcggggccgatgccggtaagcacgtccgcgccggccgaggccgtgaccagttcgcgtacttcgctgattttgcctcgcccggtcaagtggatgatttgtgcgtgggccaacaggtctgcggcggaggaggcgatggcgcggttcaggctttgcgctcccagcgatccgccagtgaccagcaccagcggacggttcggatcgacgccaagctgcgcggccgattcacggcgtacggcggcacgatcgtcaccgatgcgtttggtcagggaggcgatggtcgggcgcaacggcagaccgacacgctcgacgtcggctccggcacgcggtttgagaccggtgccttcgtacacggtaccgatgaaatcggcccaacgagcgcccagtttattggccataccggcacgcgcattctgctcatggatggcaatcggaatgcccatcttgtgtgcggtggcatagacgggggcggaagcatacccgccgaatccggctacgacatctgcatgccgcgtttcaagaatggagcgcaccttggcggtttctcgcttccattttgccgggaagcgaagcatgtacaggtcagggcggcgcgggaacggcactttttcgatagtgtcgagctcgtagccggcctcaggcaccaaatccttctccaaacccaccgcagtgccgatgacggtgacctgtgccgtgggttcgatgtcgcgaatcgctccggcgaccgcgagcagcggattgacatgtccggcggtaccgccgccagcaagaacgatatgtggtgtgccttgattcatgattaccgagtctacttacgcgctctgacgcgactgttttatctgcggttgagaacgcataagtcccacaaccagtccggccgccgtcaagcacatgatcattgatgagccacctgcggagacgaacggcataggcacgcccaataccgggaacacacccacgaccacgccgatgttgaccatggcctggcccacgatccaaatggtgacgcacatcagcaccatggcaacataacgatcggtgacctgcaatgcgatgacgatcatgcaccaggcgagaatcgcgaagaacagcaatacgatggcgcaaccgacgaatccggtctcctcgccgatgatcgcgaaaatgaaatcgttatgggcggccggcaggtaattccatttctcacgcgaattgccgatgcccaatcccagaaagcctccggaggcgatggcgtacttggcgtgaatggactggtagcatacgctctgcgcgtcagcggccgagcaatcaccatatgtggccagaatacgacgcatgcggttcgggctggaaaccgccaatgcaccgaccataaccaccgcgcccaatacgccgattcccatccatttgccggggaatccgacgatcaggaaggccacgcctccgatggagaccagaatcatggccgtgccgaggtccttgccgcccatcaccagcgccacgcctatcgcatacaacaccaacggcgcggcatatgctttgattcccttcttgtggtacatcttgctgcaggcatgcaacgacgagggcagccatatgcacatcgcgaacttcatgaattcggccggctggatagtggtgaagccgaggttcagccaacctttgttgccgtagacgtcgatacccagcggagtaaaggtcagcgcctgcaacaggcaggcacccaccacaaagaacacgccggtccgtttccagaacgtcaccggcatcgtcaatgccacgaagcccagcaccaagccgatcaggcaaaacgcgccctggttcagaagctgaaggaacggcgacttgcccagtgcggccatggtgaccgtggagctggagaacaccatgatcaggccgaagcatgtcagccccaccacggccatgcggaatccgtggtagcaccatagcgggttgagcaagcttcgccaacccgtgtagtcggtgatctcgagtgcgggcctgtcaggggctctgtatgccttacgcttatgggtatcagtggaggccatgcacctcgctccacgtcttggctgcggcggcgaatcgattgcctcgatccgcataggacttgaactggtccatggaggcgcaggccggagccataagcacgatgtcgccggcggcggcatacgtgccgcaggcttcgacggcacgatccatgacggtatcgttgtcttcgggatcgatgatggtcaccgggatgtccggagcttggctggcaaacgcttcgaccatcggctgctggtctttgccgatgatgacggccgctttgatggtatgtgcctggtccttgaccaggtcctcgaatcgactgcccttggccagacctccggcaatccagatcacagacttggccgggaagctggacagcgaggcgcgtgccgcatgaccgttggtggctttggaatcgtccacgaaacgaacggagccgccctcgactgcggcctcagccacggtttcgatgcgatggccgcccggcttgaacgaggtaagcgccttcaacgcggtatctcgatcagcgccaagtcccagcaccaacgccaatgccgtcaatgcatcggccaccagatgcgggtacagtgagccgtccggctctgccagatgcgtgaaatcggtgatggcggccagtctgaccggctcccccactgcgccgccggccacgccgctcctgtccacgatccagccatcttcaatgccgatctgaccggcctggggggcctcgagcgtgaatcccaccttgcggcatccttcggcggtttgggcctcggccgctagttcgctgactttggcgtcctgcgcattgtagacgatggcgcgtttggcgttgtggaacaccttggatttgtcggcggcgtaattctcgcgcccgccatgccagtcgaggtgatcgtcggcgatattggtgatcgccgcgcagtcaagtgccagcgaatcggtgaagtgcaattggaaggagctcagttccacgcacagtacgtcgtgctgaagattggtggcgcaacgagacaggctcatgctcatgtctccggaggcgatattaccggcggtcggcgcgtcgagtccgcaggcggtgagcatttccgaggtcatctcggtggtggaggttttgccgttggtgccggtgatgccgatccatggagccggagtaccggtgcgctcgttattcacacgcagctgccatgcgaattccacctcgctcatcacggggatgccacggcgttgggcttccagcacgaacggggtgcgggggttgaacaccggggacgacatgacgtagtccacatggtcccagtccacgtcatcaaaggagcggagaccggcctcgggcttcctctcgtcgacgccaatcacgtgggcgccgcattccctcaatacctccgccaacgaggtgccggacacacccagtccagcgatcaccactgtcttatccgctacttgcattgttcctcctgatataggaattccgtgggtgagcataatcccacccagatttccgctagctgaacagcaggccggagcgggtgacccagtcgccgtagaaaatcgtcagggcgagcagcacgaagatgagttcgatcatccagaaccgcaccaccaccttggtttcggtccaacccttcagttcgaaatgatggtggatcggtgccatcttgaatacacgtttgtgggtcatcttgaagtacccgacctggatgacgtcgctcatggcttccatgacgtacagtccacccagaaccaccgccaggaattcggtgtgcgtggcgatggacagggctgcgaacaggccgcccaaggccagggacccggtatcacccatgaaaatcgatgcggggttcgagttgtaccacaggaagccgaagcaggcgacggccgcgcatacggcgatgacggtcagatcgagaggatcggacacggcataggaatagccgccatggctgccgcccttgatgtggtagctttcccagaatgcgatgatgccaaaaccggtgaaggcgatcatcgacgaacctgccgccagaccgtcaagcccatccgtcagattcactgcgttggtccatgcggtcatcaggaagttcacccagatgacgaacaggatgatggttacggcacggccggcgaagtcgaagttgaagaacggctgttcgatgaagctgatgcccgcctgcgcactggggaatcccgatttggtgggaatcaacagcgcaagtaccgcgtagatggtggcgaagatgaactggccgatgaacttgccgcccaccgataggccttcgttctgcttcttacgcaccttggcgaagtcgtcgataaagcccagcagacccatcgacagcatggcgaacagtacgagcaccgcggaccaggagggcacgtcgcccgaacgcaggtatcggtacagtgcggaggatgcccaaccgagcagaatcgcgaagttgatgaccacgccgcccaacgtgggggtgccgcgcttgaccagatgcgactgcggcccatcctggcggatgtactggccatagtgcagcttgtggaccagccgaatcagcagcggggtgccgactaaggtgacgatgagcgacaccagcattccaatgatcagagcaatcacgtgcagcttctctttcttgtcggtttcttggggtggttatcgggtcagttctttgcccagcgttcagccaaagcgctcaggcctgacgcgtgcgatcccttgagcagtaccacagcgtcggaatggttgcgcgccaagtcgatgaccagctgttcggccgcatcgatgtcgtgtacgcaatccaccgacgcggattggctctgacgggcaccgtccgccagagcctgtgccagtgcatcgagatgttggtcttgggcggaaccgaccgcgatgatcgcgtcgatgcccaattcggccgcatacgtgccgatagaggtgtgcaatgccgtctcatcggcgccgagttccagcatggcacccagcagcgccacgcggaacggatccttgccgtcatttgagttccaagccttcaacccgttcaggccggctttcatggagtcgggattggcattaaaggaatcatcgatcagtgtgaaggaagtcccctcgcgattcaccgtggacaatgccatgcgatgagggctgatggtgtgctgcgaggccagaatccgcgccaccgtttcgggtgccataccgtaacgcatcgccacggttgcggcggccaacgcgttcatcacgttgtgacgtccaggaatgcccagatgcaccggcgtatggttgccgtccgcatcgaccaacgtgaattcagcatgatcggaccggtcggcagtgacatcaatggcccgcacctcgggctcctgcgacgatcccaagccgaaccacagcacatcgccgctggccaggccggccatgggaaccacgtgttcgtcatcggcgttcagtaccgcggtgcctccgggaagcagtccctgcacgatttcgcttttcgcctgtgcgatgcgttcgcgggagccgaattctccaaggtgagcgacgccgaccttcaatacgattgccgtgttcggcggtgcgatacgggtcagtcgcgcgatttcgccgatatggctggcacccatctcagccacgaagaaccgggtgtgctcatcgacccgcaacgcagtgagcggcaggccgatctcattgttgaacgatcccaccggagccacggtcgggcctacggtggcaagcagggaggagagcagatccttggtggtggtcttgcccaccgaaccggtcaatccgatgatgtcgaagtcgccgtccagctcgcggcggcgaacgatgttgtgtcgggcgagctcgccaagggcgtcgaccgtgtctttcactacgatctgcggcaggccatcggactccacctcatggtcgacgatggccaccgtggctccctgttcagcggttttcgccacaaagtcatgcccatcgacacgctcgcctcggatggccacaaacaccgatccggggccggcctgccgcgagtcgctgaccgtattggtggctcgagactcggaatcggcgtctccgatcaatcgaccatcgacggccttggcgatctcctccacactcatcggaaccatggtgtttcaaactcctttacgattacgcttcgtcccgtatccacggacttaattgagattattggccacatgcagggcactgcgtatgttgtttttcctcacgccggcggccagcaccatggcgatggccaaggacatgtgcccgagtcggacgcggtcatacattgccggtgaatccgcagccatttcatccgattcgggtgtcgacgaggtcatggacatgtcatgttccgcaacgaatgcgtagcgtgtcttcaattcgtccaagcttgcgcttgcgttgacatcttccgtgcccagcacatccacgttcaccgattccaacgcatgctcggccaatgtgcggtcatccatggcgatgatcacggccgccacaccgtcttcggcgcacacggacagcgcgcgctgcatatcgaggatgcccagaggatagttcaggttcatggtacgtgtcatcgacgtggacccggatgcggtgattaccgccaccggattgcccagcatgtgcaggaattcggagagctgggacacgcctgcgtcaacggcctgctcatccgcaccggtcaccgcgaacaccgccatggcgttggatggtccgccggccaggccgctggccagatcgccgagtacgcgatcgtcgaaatcgccgtagagcaacggtatatcggcattggcgatctgtcctttggacgcgcgtggcagcaacgccgcataggcaccggcctgtgcggcatgcagcacatcgggttcctgctcatgcgtgcagatgaacagcgagccgggaatcacggtatccacggcatcgctgagtgaggtaatggtgacattggtggcgaagggtggatcgacttcaaaaccgtaccgttcgaccagcattcccaaggtcacccgctgggcgatggattcgctcactgcactcatgggctagcgcctttctcccctgatccttaccacgtgactggaatagcattttttcgtggactggagacaggcacctcgtatttctgcataaggaactcacaaatctgtgcggaaacagggccggccgtcagaccgccgaacacaccattcggatccttcagcaccacggtgaccgcatagcgcgggttgtccgcgggaatcaccacggaataatcggagataatggacgagagcgcgccatccgaaccctgcacctctgcggtaccggacttggcggccatgcggtaaccatcgaccttgacgaacttgttgtagctctccgccactgattccatcgcattcatcatgtccgatgcgaccttttcatccaccacgcgggtggcttcgcccttcttggtctcagtggtcttgccattggcatcggtggttgatctgatgatcgactgctgctgcttgacacccttgttcgcgatggtggccaccacgttgttgagctgcagggcgttgacggtgtagccctgaccaaacaggatggtgttgcgcgtacgcagatcccatgccgaagggctggtgagcagaccgctcgattcaccgggcaggttcagtccggtcggttgtccgatgccgaatttggtcaggtactcgtagcgttgctcatccggatagttctccccggccataatcatgccgacgttcgatgagttctgcagaataccggcgagcgtccagcgctcagtgccatggtcgaatgagtccttgtaggtctggcccttctgtgtgatgtggtccgggaccgacaattgatcgctcatcttatgcagtcccgtctgcagatagccggacatggagatgaccttgcccaccgaaccaggctcgaaggtttcggacacggcccgagacgggctcatcttcgccgcatcggtaccagcctgtacttcatcgctatcggccagtgcgagaatctccccgctctgaacatcctgcaccacggcgatcgcccacgctgcaccatacttggattcggcctccttcaaggcctttttgacataccattgcacatcacggtcaatggtcagggtgacatcgtcgccatttttggccgtcaccgattcggtcatggtgccgggaatctcttcgccgccattaccacgctggtaggtttcatggccatcggttccggtaagcgtcttgttctcgacctgctcgatgccggcgacgccatcgccgttgtcgttcacgccgccaagcagcgcgcccatgagatcgccatccgcatacagtcgttcactgctcagctcaccccagacaataccgcccaggtgcaacgcctcgatgctgcgcttgacctgcggagtcacatctttcttcagaatcacatactgcccggtaccggacagatcagcgcccagttccatggcgttcatatccaggactttggccagcagtcggcccacggccgccgctccggtagcgcccacgggtttgccgtcaatttcgtggcagtaatcacgggtgttgtcattgcaagtaatcggctcgaactcctgtgcagcctccggattggcgacgatagtataacgctccacgctttgagcgagcacggagccgttggcgtcgaggatacgcccacgtttggcgctcaacgtcacggtcagggtgcggttagccgtggccgcttgtgcggtttgacggccgccgatgagctgggtggaggccagctgaatcacgcatgccgacgccaccaacgccaatgcggcgccgatggcaatgcatttgaacgcgaaggtcttgaccttggcgaactctacgatgcgacgaatggtgttcactgggttccgcctttgttggactggtatccgcttaagtcgatggacactgatccctgctgcgggaccatgcccatgtcgctggccttgtcgggcaggttcgcgaccaattgatcgagtttggcctgatcgtcttcgatatcttgggtaagtctgttgatgttggtttcgatctgtgccgcctcaaacgagttctgcaccatctgggtacgcaacatcagcgcaccgaacaaggtgccgacgaggaagatcactgcgatggccacgtgcaccagcggtgcgcttcttgttctggtccattcgatgacccgtccgacgacattgccccgctcgtctccacgcgggttggagaccacccgcagctcaggtcgggaggaggactgatgcttggtgtgcggtcggttcgaggctggagccgcgttcgatcgaatgctacgtgcagttgccatatgctgttatcccctccttgtacgaattcgtgccgtgtttttggctctgcccggagacgcggagccttgtatcttgacgtcattcaggccctgcgcggtttgcgtaaagcgtttcctccatcgtgacggaatctcacggctgacttccaccgcccgcaaccgcaccgaagccgatctcgggttggctgcgatttcatgttcgtcggccttga

SEQ ID NO: 2044 - DNA, 41839 bp, Unknown
  R17_18m  MAG No. k141_45381
acgccataagtctcactcgcggaatcgttgactgactccgatgctgtttccaagcgtgccggcttcagcggaaatatgttctgccatggcccatctccttaactcttcccggctcacgccgtcattggtcaattacgccgaagagcttcaataaaagaaccccctacaagaaactaagcatactcccacattctgttcagccaaagcccctgtcattgtcaagaaagggaacaaggacgagcagcagatgcccaggcccggcaaaccagataccggaccggacatgacgaggcccccaacgatgccgtacagactgtacagatggcgtgcggcatactaaaccggcggcgtccagcccagctgctcgcgccagccatcaggcgggaacgggtccgtgttccacgcgccagtgcccggaacatcattgagcagtatcccccgatccgggccgaacagccaatccgcaagccccgcacggcaacgggccgcgcgaaacccgacataatccatcgcagacggatccaaccccgccacaccaccgcgcacccggtcgaacagcatatcgcgatgttcctgcaataacggcacatacttggggttcgcggcatcggacgcacggaacacggactggcagaacgtacgattgcgatccgatatgctggagctgatcatcgattcggcccacccatgcagaccgaccgtgaaccactggtccaacagccagaaagcacccagatcacgcgcgatcccatccaacggcgtggcacagggcaacttccgctcccacttcagcaatgacctgtacgtgcgccgggcacccaccggcatcaacagcgaatccggccgatcgtaacaataaatacgagacggaccatacttgaaaatatgacgcgtgggccctgacgacctctcaaagaacggcatgacaccaccatacgaccagcatcgccgcgtacataatacacatcacacgcggccggcaagaaaaccgcacaactcctgcgccaccggtagcatctgcgactccaaaccggggttcatgaaacggtcgtagatattccacctatcgcacagggacacccacagatacgcccgccccgaagcaacaatcacattggagtgcaacggatgagcggacaatacctgcaacacattctgcggcggccccaccaactgtggccgaaccgcatgccccaacaaatcgcttaccgagcaccacgcataccccctgcgaacgagccggcacaggcaacaccaccacctgcatataccgcatggcgtaattactcaaaaagccattattgtcatacacattcagcgtgaacgtcagccacggtcccttgctgtagaacctgttcacccgcatattacgcacggcttcgccacgaagcaccaccgtgcttccagcatcgacggtccgtttggcctgccaatcacgcgcatggaccgaatacgtgaccgaagaaactccgggagccggctcataacggatctcaaccagcacaggaactccgaaaccacggaaaaagcccaacacatcatcgcaatgcaaacgcacgccaccacgaacgacgcgatgacgccgttgcgataccaataccgccacgtcggccacatgcgctgcctgacacggaccatacgccagccgagcaacgaaccagccaccacgaacacgcaccagacaacaatgccgtaccggaaaaccctacccacccagaaaggaaaaccagatttatcagcattcagcagccacagcacgccgacgaacaccacggcctctagcatgtaccacggccaatccaactgccgacgaacaaccgcaccggcaacagcatccacacgatcccacatcatcaaccttctctcatcaaaaaccgcttcgtaaggcaaccatacagtcagcagtacggacaacaagccggctatcacacgtaccagcacagctcctgtgccacacaagcagcatctgcgactccagcgccaggggccatgtaccgcgaatcattgtcgcacacattgatcggcgtccacaggcaagccaggccattcgtcaccttcatgctgtcatgatttccgtggaaggccggggtgagcgctgcagaagcgcagacgatagccagtggggtctgttcgtccgtccgccatggacagtggccggccgaatacagcctcatgcctgtgggacggcacgcggatttggccggtttccgcgcggcgtcccgcaggaacgtgggatggtagagaaatcaatcgtttgacgttcgtggcgttccacactatcaaccgccagaatcgcgcaatcacgccaatccccgttacggaccataatcatcccccgggctctctgcgggacggcagacgaaaaaccgcgaaatccgcgcgtcgtcccgcacttcgcccggtccacgaacaggacaagcatcaccgatagaccgaacacacatctacagccgcgacaagaaccccaacagctagccgcccgccccggatatcgccgtccaatagtaaatcgagcccaaaacgcaaacccaaagcactgactcagataataaaactcggattttccaccacagacagcgagaaactctcccctataccaagtagcgtacgtgccaccttgctcgatagacgaacaatgagaagtatcggttaacgggcatgccgggcaggtcgatgggctctggcgcgggaacgaagacggcgtaccagcacgaatgggccggcaaacgtgatcgtatacaacacgacggcgaggaacacgctgagccatgcggtgaacatgcccaacggcatctcctctaccggagtggtctcggctatgcatgcaacgatctatcactccgatgttgtggtcagtatgcgcggcagttgttcgtcacggttgaggaaagaacgcgtttggcaacgaagtagcgtacgccggccttcctcagtgcgggtgtataccatggtgcaatgcgtcaggcagcggtccaactgtcggcgcagtatttcggcgtcctgctggcggcgggcaaatatggacgggcatgggaagcttacaccgtacgtgcgcacgccccattccttgccgatgatgacatatcgcggattgttgatgggcgcgagtagctccttcataacgccggcgaacagcacctgctcgcgccgcgaaccaccaatcagcatggcacgcaacgccgtgaatctgcgacgtgtctggcggatcgaggaagtcactcacctctttgcctaccgcgttggtttctaggcgctcaggttccgcagtcgccaaatgccagacattggccaccttatcggggtctgcggccacgctgcggttggcggccatgctgtatgcttcactgcatcagtgtaaggcatgaatcaataggttttgagccccagatcgatggtgagaatgatgccggcgattacggcggcggcgcgcatgatgtttgcgggaatcttgcgggtgatgggcggggcgatgtacccgccgatgaagcagccgatgcacagcatgatggcggccggccaatcgaccgcgccttggatgatgaataccactgaggcgctgatgttcgcgcctgtgccgatcagggttttcaatgcattgatcttgtggaatggcccgattttggcggcatcaagcatggcgagagccagggtgccggcgcccgcgccgaagtagccggagtagatggcgactgccaccacgcccagccatacccaccaggaatcctggctcatgggctgcacgagttgttccggcgggcggtgaggtgcggtaggggtggttgcgcgcttggcggcatcagtggcatcggtggcttcagtggcttcgatgtgcttgagttgcgcggtggcatccgcggcggcctgcttggcctgcatgcggccgcgcggattgatggcgatgatcagcgagctcagcaaaatcagcactggtgcggcgaattcaaagacactcgggtcgagtttgagcaacagaaacgcaccggccaccccgccgaacgcgccaatgaccacatacgtaatggagcgtaccgcttggcctttgagttctttgcgcgcgcccatcacgccaccgatgcccgtgccgaccacgccaacggtgttagaagcgtttgccaatacaggcggaatgccgaacgcgagcaaggccgggtatgagaccagtgacgatgcgcctaccgcatagcccacgaatcctgcgccgattccggccaacagaatcagtagtaatgaagttatggaaaagcccgcaatcattccccgtatccttgtcgctcatcgaccggcacattgccggccttgagcgagaatacgctgttgaggattggttgcgggttttatgttggaatgtggacgtagctcctcgcggaagcgattccctcagtcgcctgaggcgacaactcccctcgcacccgaggggagccagaaggaaatcagagcgcttcgttgtattcgcgaaccttgagggtgcggtgggaggatgccacgttttcgacgatcagacgcttcagggcgttgtcggcggcaatgtgctcgtccagccaggcgtcaccgagcttgaccagcgtggcgggatcggcgtaacccgggtacaggccgttgagcaaagcctcggccatgtgataggtcttgttggcccagacccagtccacagtctcgaagtacttggcggcgaacggctcggccagatcggggcgcggggtggcggagaagccacgggccacggcttcgagctgggagttggtcagctcgtcgttgtggagtgcctgatcccaagcccattccttggcttgcgtcgtggccatggaggcgcgggcgccgtaggcgaactcgcggttttccgtggtctccttcttggcgagctgcgcgtccacgtcgtcgttggtcatctcgttgacggaggtgagcgcttggacgatggtccacgtgaagttgttgtcgatttcgaggccttcaagacgcacggtgccgtccagcagaccgtgtgcgttggcggcgaatgcggcatcgccctcctcgccatagcccaggtaggcggtggcgagctggaactgggtgtccgagccggcttcggcggcgttggccagggtccacagctcggcggccacgtggcgcagcacatcgtcgcggcgggctggcgccacgtagtggtgggcggtggtgctcatgcaggccagcgcgtaacggaaggtggtggattcggtttccgtggccagaagacgcagggtcatgtccacgaagcgttcggccgggaattcgccgtcacgggtcatatcccagaaggcgagccaggtcacggcgcgggccagggcatcgtcgaaacgatgcaggttggcttcggcgaatgcctgggattcggcgtcgaaacgaatcttggtgtaggtcaggtcatcgtcgttgaccagcacgaatgccgggcgcggcttgcctgccgcggcctcgacgatggtggtttcgccatccacgtcgagttcgaactgctcggtgcgcacgatcttgccggtttcggcgtcttcgttgtagaagccgacggccaggcgatgcggacgcagcaccgggtgttcggccggcgcgctctgggtgagcttcaattcggcgatggtgccgtccgcgtttacggtcaggccggtggcgatcgtgttgatgccggattcctccagccacttggcgctccaggccttgagatcgcggccggaggtcttctccagttcgctcagcaggtcggccagggtggcgttggagtaggcgtggcggttcaggtagttgtggataccttcgaagaactgcgtgcggcccacgtagaatgccagctgcttcagcacggaggcgcccttggcgtaggtgatgccgtcgaagttgacgtaggtgtcgttgaggtcgttgatcggggcgacgatcgggtgcgtggtgggcagctgatcctggcgcaacgcccagctcttctcaccggagcagaaggtggcccaggcgtcatgccattcggtggcttcggcagtggccagcgtggaggtgaattcggcgaaggactcgttgagccacaggtcgttccaccacctcatggtcacatagtcgccgaaccacatgtgggccagctcgtgcagcacggtcaccacgcggcgctcggccagcgcgtcggtcaccttggactcgaacacgtaggagtcacggatggtgaccatgccgatgttctccatagcgcccgcgttgtattcgggaacgtagatctggtcgaacttggcgtacgggtagggcacgccccaggtcttggcgtagaacgcgaagcccttcttggtgatgtcgaacaggtagtcgacgtccttcgcgaaggccttggccaacgactgtcggcagtactgggccatcggcacggtgcgaccgtcttcgttcaggtattcggtgtgccattcggcgtacgggccggcgcagatggcggtcaggtaggagctcatcaccggggtcggctcgaagtcccacagacgggtgctttcgttcggcttgtcgccgagggtgccgtcgagggtttcgcgcggatcgtcctcgatggtggcaaccggcatgttggaggtgacgatccagctggcgggagcgagcaccttgaaatcgaaggtggccttcaggtcaggctggtcgaacacggcgtagacgcggcgcgcgtccggcacctcgaactgggagtacaggtagatgttgccatcggacgggtcgaccgagcggtgcaggccctcgccggtgttggagtaacggcacttggcttcgacggtgacctcgttcttctccttgaggtcggtcagttcgatgcggttgtcctggaaggccacggctgggtccagggacttgccgttgaggtcgatggatgtcacttcgtcggcaatcaggtcgaggaaggtcgacgaaccaggcttcgcgttgaagcagatgagcgacttggaaccgaagttcttcgcgccgaccgtcaggtcaaggtcgacgtgatagtgaatcggcgcttcgataacggccttacgttcttcggcttcaatacgagtgagattagaaccgggcatgacttcaattactccttacggtcgtccctggataatccggactacttggtttctacggtttcgacgtcctgggcgatgtcggccacgacgggcacgatcatcggcttgcggtgcagctggcgcgcaacccagctgccgagcgtgcggcgcatggtctgctgcagcttgtaggtgtcacgcgtgccctgcatcatctggtcgttgagctgttcgacgatctggtgacgcaccttgtcgaactcgctttcgtcctcggccacggcgttcaggtagatcttcgggccggtgacgacctcgtggttgtcggtgtcgaccaccacgaacgcggatacgaagccctcggtgccgagaatgcggcgcttttccagctcgtcatcggtcagctcgccgacggaatcgccatcgacgtacacgtaaccgcacggcacggagccgacgaccgcggccttgccgtgatacaggtcgaccacgtcgccgtcttcggccaagaccacgttctgcgggtccacgccggtcttgacggcgatcaggccgttggccaccaggtgacggttctcgccgtggatcggcatggcgcacttgggcttgacgatgttgtacatgtacagcagctcgccctcgttgcagtggccggacacatgcacggcggcgttgtcgcggttgacgaccttggcgccgagctgcacgagcttgttgatcaccttgtagacgccgtgctcattgcctggaatcagggagctggcgagaatcacggtgtcgaactcgttgatgtggatgtcgcggtggttgccgtcggcgatgcggccgagtgcggccatcggttcgccctgagaaccggtgcacatgaagacgagcttgtcgtcctgaatgtcgttggcctgcttcaggtccacgacggtgccttcggggatgtgcagatagccgaggtcggcggcgatggacatgttgcgcaccatcgaacggccgacgaacacgaccttgcggccgtacttgtgggcggcgtccaccacctgctgcacacggtgcacgtgggaggagaagctggcgacgatgatcttgcgggtggcctgggcgaacgcttggtcaagggccgggccgatggaggtctcgggcttgacgaagccgggcacctcggcgttggtggagtccatcatcagcaggtccacgcccttttcgccgatcttgccgaattcgacgaggtcggtgatgcggtggtcgagcggcagctggtcgagcttgatatcgcccgtgtcgatcagggagccggccggggtcttgacgtagacggccagggcgtccgggatggagtgggtgacgttgacgaattcgaggtcgaaggggcccaccttgagcttctcacggccggcaacctcaaccttggtggggttctggtggtgttccttgcacttggcgtccacgaaggcgagggtcagcttggagccgatcagcgggatgtccggacgcagcttgagcaggtagggcacgccgccgatgtggtcctcgtggccgtgggtgagcaccagggcgtcgaccttgtcgagacggttcttgatgtagctgaaatcgggcaggatgagatccacgcccggctgctcctcctcggggaagagcacgccgcagtcgatgagcagcaggtgaccgttgtattcgatcacgttcatgttgcggccgatttcgcccaagccgccgagcggcgtgatgcgcatggagcccttgcggtacttcggcggggcgatcagcacggcatcctgctggggtgcggtggcctgccgggtggcgttgatcttacgggacggcgtacggctgttggatccgttggcgttgcggccgcgcgcggaaccgcgacggcgagaattcgtgttcttgcttgttttcttttgttcttgtgccataacctttttgggatttctgttgtggtgcctctgctctgtcatgcaggggcggcgggctggcaacccgtatgcagcgtttcgggcttacagcagtccggcagcgcgcatgccctcttcagccttgtcaagctgagtggcgtcgggaccgatgttcggcagacgcatggtggtggaggggataacgcccttgaccttgagcgcagccttggccatgacggcctgatagccgtcgccattcaacgcgtggacaaggggggcgagctggttggcgaggcgacgggcggtggtgatatcgccgcgatcgaatgcctggacaagctgctgcatggggttggaggcgacgtgggcaatcaccgaaatgatgccgacggcgccgatggagaggaacggcaggaacaggccgtcatcgccggaataccaggcgaggccggtgcgctgctgcttctccactgcggctgcaagatcgccggtggcgtccttgacagccttgacgtgttcaagttcggccagtcggtcgtaggtttcgaccttgaccttcaagccggtacggccgggaacatcgtagacgatgatcggcttttcggcggattcgtcgacggccttgtagtggccgacgataccgtcctgcgaggggcgggaatagtaaggcatgacgacgagcaccgcgtcggcgcccgcttcctgagtctgttcgaccatacgcacggtgtgtgcggtgtcgttggagccggcgccggaaatcaccggaacgtcgacgacctccttgacggccctgaccagctcgaccttctcatccatatgggtgacgggcgattcaccggtggtgccattgaccaccagaccatccgcgccatcggcgacgaggtatttggcgagcttctgcgcggcggcgaaatcgacgctgccgtcggatttcatcggggtgaccatagccggcagaatgcggccgaaaggtgctggctcaagaaggtgcatgtcatgctcgctcatagtgttcaccgtacttcccattgtggactcttatactacgtaccttgattgttgctgaatgcgtggcattatggccggagccggtggcaatgccgtgatgcgcgtcccggcgcgcttccctgcctgaaatgcgggggcgactactggtcgactgcgggtcgattacaggtcgaggaagtggtcgaggccgatggtcaggccagccggagcgtcgccggcgagcttgcgcacggcaagcaggacgccgggcatgaagctggtgcggtcgaagctgtcggcccgaatggtcagctgctcgccggcgttgccgaagagcacttcctcgtgggcgttgaggccgcgcagacgcacggcgtgcacgtggatgccgtcgaccacctggccgcgtgagccgccatcggtttcggtggcgtccggcacgggggcgagtcctgcggccttgcgcgcttcggcgatgccgtgggcggtgtgaatggcggtgccggagggggcgtccaccttggtggggtggtgcagttcgatgacttcggcggattcgaagtatttcgcggccttggttgcaaagtagtcggccagtacggcggagatcgcgaaattaggtgcgatgaagaccttctgggtttcgggcttcgggccgttggcgatggcggatttgacctgggcgagtttctcgtcggtccaaccggtggtgccgaccaccacgtccacgccttggccgatcagggtcagcacgttgttcaggctgacggacggcacggtgaattcgacgaccacatcggtgttgtcggtggtgacctgggtcaggtcgtcgccggcatccaatgcgagcgccagctgcgtatcctcggcgttgttcaccgcttcgaccacgtgcgagcccatgcggccctttgctccgaccaccgaaaccttgatcatgtcttcttccctgtctacccgtacctgcccggcaatgtacccggaacgttttccaatcggcaatcagcctatcaccgccaagccctcacgccaatatcccgtccacagaatcgagctccctctgacaagccgaaccgtgaagtcgagctccctctgatgagccgaaccgtgaagaaaacgccggaggcgtttttaggtgagggcgaacgacagtgagcaataattcagttggctgaaagccatcatttaattgcgttcgagctggccgcgaagcggactgagggagagacccccggcgaagccgccaaccatccatcaggcgtagcccgattccgtttcacccacgccgcttggccaaggcccatccggccaacgccaatggcacggacgccagcgtgaagatgaatggcagcatcatgcccacatgagggttggaggcgtcaagcacaatgccggccacggacgagccgatcgatgtgccgaccgtgcctgcggtggttacccagctcagtccttcggtcagggattccgccggcaccagatccttgacgatgaggttgccggtggcgaacgtcggcgagacggtcaggccggcgaggatttcgaagacgcccagcaggatgagattgtccattgacagccggaagaacacgtagccgacggtcagcagcgataggaacatcaccatatgcgcccaatgggagcctttgagtcggcaagagccgaacaccagcgcgccgatgcacgagccgaccgcgaacatcgccaattgcagaccgaggaagggctcaagtcccatggatttcatggtggcggtaatggacacgtcgaaggacgtgaagctcatattgaacacgatgaacacagcgagcaacggcagtacgccggcatagagcaatacgctcttgggcttggcgccgctgcgtttgagctggcgcagggtcagctggtcggcatcttcgcttgcagcagggctgccgtcatcgtgcgcggccacggtgacctgttccacgatgaccggtggctgggtggatttcagcgagaagaatatggtgccgccgataccgcatgccacggtgggcacgaacagttgggataccggatgcacggaggtggccagccaagccgccagaatcggccccagaataaagacgatctcgtcaatggcggcttccatggcgtaggccgtgttgagcagctgttcaccatcttccacaccgcgcaacgcataggaccagcgtgttcggaccaatgcgccgaatgagaactgcgtcagacccatgatgatggccaggacgaacagcagcggaatcggcacgcgcaccaacgccgcgaaggcgaaggcgagcatggccacgatctgcacggcgagcgcaagccggcccacgcgggcttggccgaaacggtcgaaggcgcgggcgtagaacggggtgacgcagctcatggccagcacataggcggcgctcatggtgccggcgatggtccaattgtcgtagagatggttgagcgccagaacgatgccgagactcatcatggagatcggcaatcgtgccaccgcgccggacaggcagaacgccttggctccgggcagcatgaacaggcgctggtagggcgagtgggcagcggacgacttcgaaaccgcgcgagtcgtggacacaataactccttactggtgcgttgtccggcacgtgcgcccgcccacacgtgccatccgagggtagcggttccctagcaacgtcacgcggtgcgtttcaaccgcggaccggtacgtggccagtcgtcttcatcgtcggagatgccttgcgatgcataaggtctctccaccggtgaaggccgtccgatgctgtacaggtcatgagcctttgggctcagtcgttgtcagattgttcgggaatgccggagctcaactcggtaaggatttcctgtttggatttcgcgcgggcgtgaagctcgcgcaagccctcgtcgggctcactgacatagtagagagtggcgtcgatactgtccaattccacaccttcgaccgctgccagcagcagtcggtacatgtcgagctgggcaagtttgcgggtgatgtcgtctggcttggtgggccgacgaccggttttccagtcgaccacggtaaagcgtgcggtggtgctggacgggtcaagtccaccgatgaataccgcatcgagtttgccattgaccaggcccacgcccggcacgtccacgacgatggcacgctccgtccacgccgggatgcgcttggcccacgatgattcggccagtctgcgctgccacgccaccagcttggactcggtggcattgtcgctgcttatggaagtggcggatacggattgttgagccgtgggctgtgggacagcgggctgccgtgtggatggcttgcggcattgccgctcccgttcggccaaatcggccaacatggcttcccgggaaacgaatcccgcatcctgacctgtatgcggcatgcttggttcggcttcatatgccagtaccgcttcatccggcttaccggcattgatgaattgctcagcccacgcatggaactgcgtgccggcctcggccgccggagacgatatgcgcggaatcgggcggataatgctacgccagtagaggcgctcctcccgttcgttcatgccacctacgcgggcttgcaggcttgtcacgttctggcgtcctgcagccagaacgcgttgcgccttggctttgactgcctcatcaagcgactggccgctggcggcatcggccatcaaatcggcgtcgtccaccagcaattgtgcccgttgcaggagtgggccggcgtcttggtgctgctcaagtgacgaggaatctgcggcgatgacatcgatgccgcgtgacagctgttcatgcactgcgtcgctgagggtagccggccacggcaattcggcggcggcattcgtctgcgtaatctgcgtttgccacgcctcccccaccacggcgtcactgtatgccgcggcatgctctccgataaagaacccttcgggaggggcaatcgcttcgccttgcgccgagatcagcatgggcttcccggcattggcggcttgcagccgttccacacagtcctgagccgatatcgcatgttcacgggcttggagcgcgtcatgcacttcaagccagaaattggatggctgagcggcgcgagagcctttgggcaccactgacgggtcccgcccggattcgcccgtataggcgcaataggtcatcagggcatcttcccgcgcacgggtaagcgccacatacatcaatcgacgttcgtcggcatgcagccgacgcccatattcctccgcctgcgtcaaataccagccggatgcatccacttcttccacgccatcgccgaattcgcgcatggagccgaacacttcatcatcgataagctccacatcatccaaagccgccaacgatgcgatggggtcggcttccacatcggcatcatgggggaatcgcggcaaaatgccggcatcggcgcgcataggcacgggcacggcggtggggttggtgagccaggagtcggcggtctcatgatattcgggtgcggtccagtgaccttgctcggtgcctcccgtatggtgttcgtccagcacgatcttgagatggtcgccctgattgctggggaatccgccggcggtaagccccactaccgcaacggcatcccattccaaccctttggactggtgtacggtcatcagttccacatccaccggagcgtcggggagactggcggcttcatcctccactgaagccagatgatccacccatgtgatgaacccatgcaacgagggagtttgctcagcggcaatctcttgcgtgtacgtatccaccaaatccacaatcgcatccataggcatatgcgccaaagcgggattggcgcggtgctgcggattatgcagcacaccggccaatacggtgtcgatgtcaagatccaacgcttctatgccggcgcgaatcacgtcgcccagtggccgcccgacggcatcatgcacctgacggagcatcaccgcggcccgggttatggcgttgcgcccgtgtgcgctcaaccgttcaagcagttttaccaggtcgccgcgtagcaatacgtctggcaggaataccgcattggccacctgatcgcggtactcacgcaccacagccgcccattcattcgctggtgtatccggttgggcaaggccggcctgcaccaatgcttggaagcgttgttccatgttctgttcttcagcaaaacgggccaacatggtcaaatccgctgcggacatggtgaatcgtggcgtggccagcaagcgcatcagcgatcccgtatcggtgtggtcggcggccacgtgcagcaacgccatcagatcgcggatttccggacgttccagcagcgcggaatagccgaccacgaatgtggtcaatccggcctgttccaatgccgcctgatattcgggcatatgtgatttggaccgaaacagcacggcgaccggcgctttctgttcgcccggcatctgttcctgttgttcggctgcggaacggtgccgtgcgatggccgtcttgcagaaacgcactacggcgtcgatctcctgcccggccgtggcgaagcccagtactcccaatgttccttcgggggcatcaggcatggggtcgagcgatgagacatcgacctcacgcatcaatgagctggagggacgcgacggattggagcgcaacggcagcgtgagattattggcggcttcgagcactatacggctgttgcgcctggtgacggacaacgggaatggcttgtatccggcaggcaggtggaaatcttgctggaacatacggaatgcaccagggctggcaccacgccatgcgtaaatcgactggaacggatcacccaccgcgttgacggcggacctccgtgacgcatccacatggaacagtgctgccagcagagcggcctgcgtggtggaggtgtcctgatattcgtcgagcagcacatggctgtacctgcggcgcgtgcgctctccgatggaggggaagcgctcgataagctgatacgcggcaatggtgaagtcggagaattcggccatattgcgttcccgcttggcttgggcataggcctccaccagctggagcagaatatcgcgtttgcgtgtggtctccagcagcgcaccgcaatgataggcgcagcgggcgtgcaaatgttcggcacggtcatcgagcttggcttgccagctggcgtcggtatctttcttcagtcgtttgatcttggggattttcggctcgtcctcgggcatgggttcgtctgcgacggcttgctgcaatcgattgatgaatgccgaatcccattgccgtacttgattgatcgcatcatcgaagctggtgcagccggcaccgatcatggcactgccaatggcatccgacaacgccagaacacggttcgccaaactggagaaggcgccaaaatcctcactgaacgccagatccatgtgactgtcgatgacttcggtggccagttgaagcgctccagctgcgctcaatggttgcgtgttctgatcgaatccgacaagcagtccatattggcgcacgatggtctggaagaaggcgtcatacgtgaaaatggccggcttgaggaatgcccgatcagacaccgtggcggtcgtagagcccgccatatcaccggccactgcggcggagacgcgttccagcagttcgcctgcggccttgcgtgtgaaggtcaggccaaggatgcgttcaggtgccacacctcgattgataagcgcgatgatgcgttgggtcatcgtaaaggttttgccggaaccggcaccggcaaccaccagtacgtcagcatcgactggcgcatcgatgatggcggcctgttccgcactgggagtgaacgtgctcatgcttgcctcgtttcgaaaatcgtgtcgatctggcccgcacaggcagggcagacgttcttcatacggcagaatccgatatgggtgtcttgcggatgggcctcgatgatggccgacctgctggccgccgcggcatagaatacgcgggcgatcatggtcagcgaccataacgtctgcgtaccggcgagcgcggcgaattgcgcccacgcttcggcactcacaccttcgggaggagtagccggatctatggcgggtatgtcgaagaaacggttggggtctttataccagtatcgtggcgtgaacggttcggcattcaacgaaccatcagtgaacagcggcggctggaaggcaccttccggggcgtagcttctggctggtgccgcattctgcccgacatggaacagcgcgctttggctgatatgcggcattgcggcaagtgccttggcaccgcgcggcccgtcttcggggaacacgaggccaagctgatagcacacgagctgcagatcattgaaaatctgtttgaccgtgggcgttctgcctgttttgtagtcaatgaggcgaatgcattcgccgccgtctgcgagtacgcgggtttccatacggtcgatgcgcccggacagtctcacggtcagatgctcgtccatgccttccggccaccctccgaccagtgctcccatcagacggaccagcatgttccgatcgatcgggtgcatgccgggcacggcattgtatgcgtcgagtatgtcacgcacatcgaatcgtgcggcaaactcccgttcgcattcggcaccggccaatgcgccaatgctgaagttgctggagttcttgccaagatacgtttccggatcggcgtcgctgcgcacaaagtaatcggcgatgttgcgcagggcatctgccgcggactcgtccttacgggtggcctcatagcggttccgggtgtcggctatggcattcggatcggggcgtttgctctgatagatggcattaagccgtgccgtgacagcctcgatgcggcgttccgtgccggccgtggagtccaagcccagtatggccaacgtctgggcattgtgggaaagatggtccagcccttcctcgctgccttgctgtgcaaccgcatggatgagggttccgaagctggtggccacggagctggggcgaggaccggcgaaccggttctccagcatccagcacaccggacatgcccataggctgtcgaccgccgatggagacagggtgaccatgggtgcggcctgcgcatccgtcttgcctttccccgtttggataccgtcagactgtacaccgccagatgacgcgctgtcggatgaggcactgtcggatgaggcaccgccagatgacgcaccgccagatgacgcgctatccgattgggccggcgattccacgaacgcccagctctgcggatttgcggcgcgcacaccatgctccgacaggagtgtcaacgcaaccgcggcgtcctttgcggcagcctgctgcggttgagcagtggccagaaccgcgcgggcggcgctgaccaacccacgtgggtcggcgtccaatccggccagatcatattcggcggatcctgtatgcgcccccactgtggtgaaaggcgcctgttgccggttgcgcggatagtattccggcagatacccgaaaagaaagtccgaggggctcatgctgtcgttccataccgcgctgatcatgattcgccgtgcacgggtcagcgcgaccaggaaacccttcttctcgcccgacagcacagccgcgaactgcggatcatgcccggttttgtcactttcttcaagcgctcccctcagcacgagctcggcaaggtcttcaccaccgaacatggtgttgcgcccggcgaggttcggccacacgtcttgctggaccaccggtatccacgcatatccccagtggcgtccggccgcgcctgccggcgtggtcaatgtcacagcgtcttccaccggccctatgtgggccaaggaatcggcctgcacttccatgccccgaacctgtgccatgaatgacgtgatgtctcggctggcggtggaatcatcggcgaactggaacaggcgcattgccgcgtccagccggtcattggccgtgcgcccctctgccgtgttgaataatgccgcacgctgccagaccggtgccagaccggtggcgttccaggcaacagacagtgcataacgcggctgtacgcgctggcttgccggcagccgctccaagccggaagcaacgctgcccaccagatgccacaggttcgcaaaagcgcgggcctgagggtcgttgccaagcaccgcatggatggatgcgagcgcagcctgcgccggcgcggcggcatcatcaacggcaagcatcacgtacagcgcgtcaacgccaaaggccaagtcatcgtcggacggttcaccgagtatttcgacagacactggcgacggaaccactgatgaggatgtttcacgacctgtttcacgccgtgtttcatggtatgtttcacgcaatgtttcccatgccgtcgtcagagaggtcagcatggcatcatccgcggcgagatgcgccagcgactccaacgaccccatggccgattcgatcggcgcaagccttgcgggacgcccttgaccgggtctgcccccggcactcaccaacgggccgttcatcaacgtggccactctagtccttatatatgccgcgcaggaagccaacgtcatctggcattccgccattccctcggcacgcaatcgggcaagctccacaagcgcgaacaatccctgcacgaaagtctcgtccttcaaaggacgggtgaccgacgaataccgcaccggcacgccatctcggcgcagtcgttcgccgaacagccgcacggcggcattgtcgtgggtgatgaccgccatgtcgttccaccgaatatgccggtcgagatgcgcccgcttgatgcgccagaccacatcatccagctcctcacgtgaggatcggtacaggccggcggtcaccgtgccgtccgactgataattcgctgcatcgactccgcccagcatggcggtcagcttgccgggacgctcggccggaggcagcggctcgtcttccggcgagggaatcgacagcgaaatacgagacgcgatcacatcagccatcgtcatgtgcgactgatcagcgccggtactgccgccaaccagctgttcttccttggctttcagccgcccttccacggcacggcgcatcagatattccggatacgatccacggaaggtctgcaccgattcatccgagttgccgaccagcaccaacttgacgccggcattccccaactcctccaagaagcgcatgccggccagcgtggtgtcttgaacatcatccacaaccagcagccggggcaagcccaacgcctccatacgcataggccggccggaatcatccgcgtgatcggcggcgaatacctcatgcaccacacgagcgcctgccaccagcaaatacgaggcatccaaacggtattgccccggatatgccgcgctttgggctgcaatatattcacggcgcaacgcgaaagccaaacgccattgcaccgacaatcgcgcgtcctccgtcacggcgtccaaaagacgtggctcttcgtgaacgcctacaccgagctcatccaatcgggccagcatatcgcgcaactggctgataaacgcatctgaaataccgcgagtgaacctatccgcgctggtcgagccgcctgccgacgtcggagacagcgaatccgacccttgttgcgagaggcttgattgtgcggaagcggccgagccgggcatctcgccggcaccggcatcgcgtatgagtttcgcccagtcatcctgggcaaagtagacgcgtagcaaatcacaggtgccgcaatcatctcccgctacggcatggcgcagatgcacggccatgacttgacgcagcaaagcatcctgttccgcaccgttcaacaatcgaggcgacggcaatccagttcccccgcgcgaagctgatatggcccggaatgccacggcacccagcgtggtgaccggcctggcctgcacggaaaacccgagctcacgaatcacccgattgcccaatgcatcggcggccacacggccggatacggccatcaccgcctgcgtgccaccgtagcggcgcagccccgccatcaacaccgataaggcgaattcggttttgccgcttccaggcgtgccgacaatcagcctcgccgctccatcacggtcgatgccgtccagcactgttccaggttcaagtctcgtcatcatggctccagcctaaacccgaccgtcacagagggaaaaattttaccgaacccgacgaagaatcgtacccttgacggtatcctgtagaacgaatgcagggagagcgcattttccaaggagggagggaacagatggccaatattccgatgaggccgccgaagctgcccggatatgatttcgtccagatgttgggaagcggtgccaccgccacggtgtacctatataaccagcgtatgcccgcacgcccggtggcggtaaaggtcagcgccaaaacccttgacccacgggccgctgccctgttcaaccgcgaggccaacttcatggccaagctgtcatcccacccgtacattctgccggtatatggtgccggcgtcacctccgatggccatggctacattgtcatcgaatatgcgccgggcggcacctacaacagcatcatgaaggcccggtccatgacctgcgagcaggtactcgacctcggcatcaagctgtcaagcgcgctgttcaccgcgcatcgcagcaatatcatccatcacgacatcaagcccagcaacattctcatcacctcgcagggtttgcctgttctgggtgatttcggtatctccaccgatgtgtatgaccgtaccgaaaccggattctcgccgccgtgggcaccgcctgaagtgcttcagcatctgaccaatggttcggaagccgccgacatctattcactggcggccaccctgtacgccatgttcgtcggctgctcgccattccagcacgaatatcatccacgttcgcaatcggaactgatttcgctgatcgtcaatcagccattgcctcgcctcaaccgccccgacgtaccggccgatgtggaagcggtgctgcgccgggccctgaacaaggaccccgaccagcggtactactccgcgttggagttcgcacgcgccatgcagcgtgcgcaattcgcatatttcgggcatgccactcccgttaccgtggaagggatgccggcctaccccaaagacatcgagcgtcggcgccgggccacggaccagcgagatcagaccacccgttcgtcacggcgatgggtcaaaccggtgggtattaccgtcggtatacttgcggcgatcaccgcagcggcactgatattcgccttcgtggtcgttccccgcatggacagcgccaccggatcagataccaaacaggtggcgacgcccggcaccaaggatgatgacaacaaccgcaataatcaggatgacgtgattaccgataccgcgaacgcccagattccttccccggagaatctgaacggcacctatgcggcggatgggtcatccgtgacgttcacctggacgaatccagacccgcaaagcggtgatacctatgcgtgggccatagtgcagggcagcaataccgaccagagcgcgcaaaccgtcacaacgtcagatcccacggtgaccgtcaacgcgcaggaaggctcgcagacctgcattcaggtgtccattgtgcgcaagaaccgccagatgtccgtcagccccgccatcgcctgtgcggccaagccgcaagagtgatccgctcgccactgccgggcataccaccttggcattgcgtatcgcatcaggcatgcgcccggcagtggcgaattcaccaaatggacaacaggaacggcaggtattggaaccgtaaagcgttgtcattacactagcaaccagagaaaccagggttcagggagttcagatggccacatcgtcccagtcatacgatcgtcgccgacgcatcagcgcggctttgcgccgccttatgccctccggagggcatacgtggacggttcccgtaatcacgctcctgctgcttctgggacttgttgccggcgcggtgatcatgagcaccgtcacgcgccgccatgtgcaactggacgatggcaccgtgtgggtcacttcgctgaagaaccagaaggccgcacgattcaacgtaaagaacaaggaggccgacgccggcgtctcctcctccgccccacgattcgacatcgcgcagcataatggcgacaccatcctgaccgaaacgaccaaagcctccaccatcaaggcatccacggtcagcaccggtgtcaagaccgacatcaaagccaacaccaccactgtggtcggcggggataccgtagccctgatcaacgagaagaccggcaatgtgtggaccggcttgtcggaaaaccttgattccgtggcccccaccacttccgatccgaaaatgaagctgggcgagggcgggcgcatcgtagtaacccacgatggcaaggtctacggataccgtccatccgacggtatggtgctgcgtcttgacaatcccagcagcgccaaggccaaaaccctcgaatcgctgaccgacggcaagcagcagaccgttgaaagctttaccgtcatcgggagcacgccggtaatcgcaaccggcaaaaccgtcatattcaagggcggccgcgtcgatgtcgacacgaccggcaccctcacccttcaggagcctcccaccgatgacgtacagtccgattgggtggccgcggcatcaccgagaggccttgcgcttatcccgttgaggtccaatgccaaggcgaatttcatagccaacgggggcaaggcgaatccggcacgaccggtatcgtccaagggctgcgtgtactcggcttggagccagaaggccagcaactacattcgcgcctgctcccccgcggataccagcgtcaagccgcaaaccctcgaatccgtcaatactacttccgaattggtgttccgcaccaaccatcgccttgtggtgctcaacgacacggttaacggcaatgtgtggaaccctgaggattccaccaaagtcatcaaaatacagtggaacaaaatacaggccgagcagaccgagaaagaacagcagaacaacgactcggccaacaaccaccacgacttctccaagacctgttccgcacaatccggccaaatcaaagccgaggatgatgaaatcggcgcacgagccggttcggaacagattctcgacgtgctgcgcaatgacgagcagaccgattgttccgtgctgaaaatcaccaaggttggcgcaccaaacaacaaagacgtcaccatttcgccgatttacgacggccggtatctgcaactcgatgcctccgccacatccgcaggcaccgttacctttacttacgatatttccgatggccgcggccagacctcttccgccacggtgaccgtaaccctgaatgatggaggcaaccacgctcccgtacagttcgacactcctcccgagatcgatgtggagcagggagccagttataccgccaatgcgctgagcagcttcaacgatccggatggagacccgctcactctggtctccgctgtggcccagaacaccgacccggtgcaggtgtccacccgagccgacggccagcttacgttcaacaccggtgcgctggcgtcgggacgcgtgggcgtcgaggtcaccgtctccgacggcacggcgaccggcaccggcatggtgtatttctcggtcaagcccgcgaacaccttggccgcggtcatcgacccggtagcgaaaaccaccgttcccaacacggataccgtcgtcaagctgtcctcttacgtgcatggcacttccttgcagccggcacagctgactcaggtggatacgcccaacggcgcttcgacgaccaccaatgcggcggatatgtcgttgacgttcaaggccaccaatcccggcacctattatgtgccctacaccattactcaaggctcgattccggccaccggattggctcgcgtcgaggtacagcccgccaccggcgaggccgccaaaccggttgccgccaacgatgtcgccctgcttggcgcggataataccgccattgtggagccgctcaccaatgacgtcgatccgatgggcggcgtgctgtccgtcaccacggtgagcgcaccggccgactccggcatcaaggttggtctcgtcagccataagcgcgtgtatatcactgcgcgtcaggtgcccacgaaacccgtcgcccttacctacaccgtggccaacgcctccggaaccgccaagggcaccatcgtgttgcagccaccggctctgaccacctcgaattcagtgcccaaggccagcaatatcaatgcccaggtgcgcaccggcggcatcgtgtccgtggatgtgcttgaccatgtggcctactcggatggcaccacggtcaagctcaagaacaacctgcaatacgacaaggagacgttcaagggtctggccttcgtctctggagacacggtccgctaccaagcatccagcgagaccggcaacttccccatcacctatacggttgaagacaatctgggtaatgtggcttccgccaatatcaccattaccgtgcataagagcgacgcagcgagcaaggccgcgccaaccccgcatgacgccgaagcgcaggttgccgccggacagaaggtccgcatccccatcacactgaccggcatagacacggatggcgacgacgatcagctgttgggtctgggcaacaaggcacccacgctgggccgcatatccgaagtcggttccgactacttggtctatgaagcgtatccggattcgtccggcaccgacaccttctcctatgccgtggaggattggaccggtcagcgcgcacaggcgcagatccgcgtgggcgtattccaaggatcgtccgactccggcgtatacgccagggatgacgaaatcacgttgaggcccaatacggccgcaaccgtgccggtcgcgcagaacgacatctccggcgacaacaccaatctgaccgtcgacaagcatgtcgaggtccaaggtctcgacggggtgagcgtgaaagacaacatgatctccttcaccacgcccggcagcgccaccaccgcctatatcgcctacacggtcaaagacaaggccggcttgtccgatacggccaccctcacggtaaacgtggatccgaatgccgccatcgagccgcctaccgcctacgactatcgtgtgccgtccgccgccaccatcgataagaagtccgtggatgtggatgtttcccagtggatcgccaatccttccggcacagccaatgagctcaaggtcggcgtgcatccctccgccagcgctcacgctcacgtcaagggcggcgagcattcgaccaccatcaccgtcgacctgacgtcacaggcgcgagccgtgccttacacggtgaccaatacgaaatacaacatcacctccaccgcgttcatccaggtaccggcctatggtgtctttccgcccacgttgcgtcccaaggcaccggaattgaaggtcaattcgcgtgagaccattgaaatcaacatcaatgactatgttcgcgtcggtgccggcaaggaaccgtatatcgaaagcgctgattccgtcagcgccaccaaggcttccaactccgatttctacgtgaacgacaagaccctgaagttcactgcggcaaaagactacgcaggccccgcctccattacctttaccgctgtggatggcaagcagggatcggataagaccaagatcatcaattccgcagtgatcactctccagatcacggtgataggccgcgatgtgccgccgcccacgttctcgtcctccactattgatgtcgaggcgggcgcgaaccccaagaccgttgatctgacggcgctcacccatgcaccgtccggcgtgtatgacgacgagaagcaatacacgtattccggcggaagctcatcgtccgggcgaatcaccgctaacctgtcccgttccggcagcttgcaggtttccgccaccaaggatgccgctcctggcaccaccgcgtccattcccgtgcaaatcgcatacggcgcgggcaccgtgaatgccggtgtgaccgtgcgcgtagtgtcttccacccgtccgctggcacgcgtcggcgacaagacgctgaagatcaaggccggtgccagcgatgccgtgaacgtgcttaccggcgcgtacaatccgttccccgattcctcgctgaccgtcatcagctgcaaggcggatgacgccgccaaactcactatcgccggatgcgatgcctccggaaacgtcaccatcgccgtcgcatccgatccgggtgcttccacgaacaccgtgctcgtcaccgtgcaagacggcagcaagtccaaggatcgtgaagtcaccgcatcgattaccgtgtccgtgatcgacaagcccgagccgccactgctctcccccgtagccggggaaccgcaggacagcgcggtcagcctcacatggacgcccggtgccgccaatggcagcccgatcaccaactacaaggtcagttggaccggcgccgccactggagagaaggattgcggtgccgtcacctcatgccaggtcacgggtctgaagaacggcaaaacctattccttcaccgtcgccgcgcgaaatgacgtcggttggtccaaaccgtccaccaccgtcgaagccacaccggacaaggtgccgtccgctcccaccgatgtcacggtcacaggtggcaataaaaccgccaaagtgacgtggaaagcgccgagcggtgatttcagcgccgtcgacaactattcggtgaccgtcaccggtgcaggtgctccgcagaccaaggaaaccggcaacacggccaccgagctgtcgtttacgttcaacaacaacgacatttccgatggcaccgccattacggcgaccgtcaaagcccataacaaaatcaattggagtgccgagtccgcctcatcacagccaaaggacatctggggagacccggatgcgccgaccattgcgctgtcgaacgacgacaccacaggaacggcgaaagtcactctcggcaacaaccgcaatgccggctgccggcgaatttccttgggaggagacgtcaaggacaccatcgattgcagtgacggtggcgctacgttcgatatcaatgagaacgatttgaacacccgggaaatcaccgtaacggccaccgtggtgccgcagcgcgatgcttccgccggcacaggcaagagcaggtttgtcccgcagtacaatgtccagccgcccactgacgtctacaccaccggatccggcagtacatgcaccgtgcattggaccaagcaggggcatgcgcagtcctacaacgtgactgccgatggcatcgattccggtacagctactaaccggaactcactcgacttccgaatgagtccttgggccaaatgcaataccgcatcggtgcaacaggtgttcaacggcgctaccagcgatgccgccaccggaggcccgtacaatggcgctccttacacctatgagaagaaggctgtaatcaacaaaccgcaggagctgcgctggtcagacaacgctcacgtcattaacgtcaccggcggttcggttgaggtctatggcaagcaggccaccgtacaaatcatcatcaatggccaaccgttcacgtggaaccccggccagccattggacgtcaccgacttggccgtgtccgccgatggcaactacacgtggagcgtcaaagtcaccggcgggccgggatactccggtctcgacaatacggcggacggcagcagcgtcgcgggcacacgcccctctgattcctcggaggggaccgagtcgctcaaatccggtaccgatgtcaccactttggccaagaacccttggattcttggtttcggtaataccccaatatcgtcaaccaccattcacaagcagtaggagaacatccatgagcgagaacatcgacgacgcgacgcagctgtctgacagcacgcagctatccgacgccacgcacttgtccgatgccacacatctggcatcggaaccgcacactggcaccaccccgaacaccgagacggcacagcaacccgttgcattgcctaacctgccgcagcggccgtcacaagcgtcgtcagaaaagccgtctcctactactgatgccgcctccattcctgcgggcgatgacagcaccgtgctcaagccgcgcaaggacgcggcgccagccatcccgcagcaggtcggcatgccggcaaagaccagcacgcccaaagtcgcgcttccgcacttcggacgtaaatccggcaagcaggccgctactgcgaatgctgcccccgccacccagacctcccgtcaatggacgaccacaaccgccggcaagaccgcagcatccaacgccgaaaccgtggctggtcgcgggccggtagccaatcagcaggccgccgcgcaatcccagccgcaatcccagccgcagcgtcagtcgagcaaagccgcgcaagcagccgcatcggcactgcccgccagcatcaattccggactactgccccagcccacggctcaggtccgggatttccagcagtccttcaatgcgctggtcgagaatgtctccaaggtggttatcggcaagaccattcccatcaagcaatgcgtcaccgcactgatggtcggtggccatattctgcttgaagacaaccccggcaccggtaagacccagttggcccgaggcttggccaactccatttccaccggtttcaagcgtattcagttcacgcccgatctgctgccttcggatgtggtgggtgtgactttctacgatcagaagcgcggagaattcgagttccgcgagggcccgattttcgcctccatcgtgctggccgatgaaatcaaccgtgcatcgccgaagacgcagtccgcacttctggaggttatggaagagcagaaagtcaccgttgacggcgtcacccatgatgtaccgcagccgttcatcgtgatcgcaacccagaaccccatcgagcagctcggtacctataagctgcctgaggcgcagatggaccgcttccttatcaagacgtcgattggctacccgggccatgatgtgtccgtcgatatcctcaagcaggtcgatatcaccgaccgtgcgcagaccatttccccggtgctgagcggtgacgatgtcatgcggctgcgtcaggtggccaccgaaatctatgtggatgatgcgattcgtgaatacatcgtcaggctcgtcgaggcgacccgccacaacgagaagatcacagtcggctcctccatgcgtggcgctttggcgctgacccgatgcgcccgtatctgggccgcggccgatggccgtgcctacgtggtgccggatgacgtcaaggaccttgcagtggccgtgctcgcacaccgtatcacgctgactccggaagccaccttcgatggcgcgactccggaaagcctgatcgcacaggtgctcgaagacgttccctcccccaccatcggttcctgatagggcctggaaaggtatccgaccatggcatctacatccgccgcattacgccgtcgccggcgcgctgaacgcatgttcaagcgcgcggtaagacgcatcagacggttcttcgcatcctacgtctcgcccttgggctgggcggtaacgggcgcaggcatcgcatgtcttattgcgttcctgcctttgggctggtatgagctgctcgtattcggcatcgtggcgatggtgatgatgctcgcggcaatcgcgctttccctcggcaacacacgcttccacgcgtccatcgccgtatccgatcatcgcgtgaccgtgggagacaccatatccgttatcgtcggcatcgacaacaccggcaaaacgccgacaaccacggcacgcggatatctgccaatcggcgatgcgcatgaacgattcaacatccccatgctggctcccgggcaatccaagcaaaccgatgtggagttccgtacggtatcgcgcgcaatactgcccatcggaccgttgcgcatccgcaagggagacccgttcggcctggtacgtcacgaaaaggagctggccgaccgcatcaccgtattcatccaccctcgtaccgtgcgtctcgataccctgaatgccggcgtgccccgcgatctggaaggccaaccatccggccagatcgtggatgatgatctcgacttctacggattgcgcgaatacgagccgggcgacgacgtgcgtaacgtccactggctgagctccgcgaaaaccggcacgttgatgattcgccaatatgaagccacgcgccgcaccgacacctcggtgaccatcagcgtgaacccggatgagtacgtcaacggcgaggaattcgagatggcggtgtccatccactcctccatcggcgtcaaatgtctgctgcaggatcgcccgctgttctgtcacgcgggcaacgcgcacggccagccgcgcaacgccatggagttcctcgacaacgccagtgccatagagcctgatcgtgaggacaatccgaatctcgccgagggcacgctgaagcacagtcctgatgcttcgttctattttttcactgttggatcgctgaaagacatcgagcaaatcaagcgcatgaccttggccttgccccgatcggccagctgcgtggtattgcaggccagcgccggcgccaatcgcggcatcagaagattcgccaacttcacattggccaccatcggcgaactcgatgatctcccactgatcatgggggtgctcgcatgaccttcgaccagtccagtatcaccaataccaataccgctgcgtacgccggatcgagcggcacatacaccggcacttcctccggcacgtacaccggaacctccaccaccaccggctcctgggccgactccacacattcggttatctggatgaccagaggcaatgtgcttcgcggcatgggcctcagtcgccagccgtggggcaaacgaatcaccagcctcgtactcatagcggcgatgatgttgctggcgcaagccaatctcatcgacgtgtacggcggcgtggccacttgggcgatcgccgccgtaccggccaccttgctgggcgcgatcatcgctctggcgggcatgttgccggcgttgcgactgtggtggcaaatcgtgtttctggcgtttgcccaattcatcatcggtccggtggtaacgctgagttccaccacgtcccattacgtgattcccaccttgaagaccttgagttcaggttgggaaatgacgtttggctcgttcaagtacattatttccgtcgatccgcctctgggcacgcaagacggcgtgctgctggcggtatggaccatcggcctgtggcttacgttcctcaccggcgtgtttgccattaatgccaacgcatggttgtctctggtgggagtgccgccccttgcggcggccgtggccgtatgtgctctgctgggtacggacagcggctggcaacgtgccatctgcggcattgcctttgccttgctgctgattatctggctgtcttggcgtcttgaactgctggaatgggggcgctggatatccgcgctgatcatcgtcgtgctcgctgccggccttgctttcggaggcacgttgctggtgccgcaggaccgtttcgtgctgcgtgaccgctacgatccgccgttaagcccctacgattacaccagcccgctcagcggcatgcgatcctatatcaaggaccacaaaaaagacgtgttgctgaccgtccataatctgccggccggaacaccagtcaaacttgcggtgatggatcgattcgacggcacagtatggaacctgtccgattcttccgaagccacggactcctcgaattatcatcgcgtgggcaccacgatcaaggcggatgagcagggcgaatccttcactgcgaccttcaccgtcgatcagggattgaccgacacctggctgccgctggcgggagcggccactggcgtgagcttcgccaacgatgccgacaacggcaatgacacgttctactacaacacggataccgattccgccattattcccgccggcacgcgtaaaagcctcacctataccgaatccggcattatcgcccgcaagcccaccgataagcagatcagcagtgcggccgcggcccgcatcacccaaccggaagcccaggatgttcccgattcggccagcaaactggccacgtccattgccggcggacagtcctcgggcggtgccgcagccacggcgttggccgacacattgaaagactccggatggttctctcatggactcgaaggcgattatccctccgatgccggccatggcaactaccgtatcaacaagctgctggcaggcacggccatggtgggcgactccgagcaatatgcctccgccatggcactgatggctcgtgagctgggactgccctcccgtgtggtcctgggcttcctgccgaaaaacgaggatggcgaaatcaccgatgcccgcacggagaagacctcgggcaatggcaccaaaatcgaattcaccggcaacgatgtcaccgcttgggtggaaatcaaattgcagggcctgggatgggtggcgttctatccgacgcccaaggagaccaaggtgcctgatgaaaaccagaacctgacgccgccgaatccgcagacgctggtccggcaaccaccggtgccgttgaccgatccgctgcgcgatcagacgcaagccaggggccaaagctcattggccggcgccgacgccgatgattcgccgaccaacctgttctgggtgcggttctggcgagtgacccgcaaggtggccctgtacggcagcccattgtggaccctactcatcgtctgcggtctgattctgatgttcaaggccatgctgctggcgcgagcgcggcggcatggcagtccgaaagcccgtgtggcagcaggttggaatgccatacgcatgcttgccgagcaaagcggcatcacagccaagggcactcgtcgagatcaggccggtgccatcgcccgtcaactcggcacagatgaccaggctttgatccagcttggccgggaagccgactacgccacgttctcggggcaagacattgaatcgggccaagccaccacatattggacaggagtcgaccaattgcgcaaggcaatgctcgcttctttgccgcgtttcaggaggatacgtacacgactttccctgaaaagcgtggctatactgtcaaatagacacgcagccaagtcgcacacgacgcatgtcaagcgcgcgcgtaagaaggggaagacgtcatgaccacaggctccatccgtatcgcgatgaccagtgacgtgggtcttaggcgcaagaacaaccaagacaccggattcgcccaacagggcgtgttcatggtctgcgacggcatgggcggcggcaaaggcggcgagcaggcaagccagttggctgcccagcatttcgcgcagctggcttccatgccctcgcgcacccgccatgacatcgacgacaccctggcacaggctcagcacgacattctcgatttgggtgaccgtctcggcggcgtggccggtacgacctgctccggcctggttttgccccagccttacgcagatgccatcaatgcccacagcgcagctccgtttgacgacgccgactccccggatttctcggaccagacctatgtggtcaatgtcggcgattcccgaacctaccatctcagcccgctgccggatgccgatgcccccgccacggatatcatccccgtgtgggacgcctcctcgctgacccgcatcacgcgggatcattcccaacgccaggaggctatcgattccggtcagatgctgccggaagaggcggaggcgaccattccacgcaacatcatcacccaatgcctgggcgatccggacggcatagtgcccgacgtatatgttgccgatctgaccggccgtttcatcatctgttcggatggattgcacggtgaagtgtcagacgaacagattgcggccatcgccgcagcgcattccagtccgcaggaagccgtggacgccttggtggcggccgcgctcgatgcgggcggaaccgacaatatcactgtgattgtggccgatatgccactgaccgaacccgaacatcacgcgttcagcgcttttaaactggacgagggcgaggacattggcgccattgaagacgcaacactacaaacactacggaccatacgttcggcataaccgagcgaacataaggaggtaatcccatggttgattatgatgctgcggtcgctgccgtacaggatccgaacgcggacccgattctgttggcaaaaatcgcctacgagaatccggaattcggcgcaaacgtcgccgtaaatccgcgttgctaccccggcttgaagcgttggatcgccgagttcggcgatgagcgcgcccgcgagaccctggcgcaatacgggttcaccgccgaggcattcggcggcccggtccaggatcaggaagccccgtcacaggcggccctgcaggctgccgagcagcagcctgcagacgcttacgccgccgaccagtacgccgctgcccagcccgctgccgaccagtacgcagctgcccagcccgctgccgaccagtacgccgctgcccagcccgctgccgaccagtacgcagcccagcagcccgcggctcaggcggcattcgaggagcctgtggccaccaatccttatggcttcaccgccgaacaggccctgaccaccaccgaccagatgcaaatcgcccagattgcccaatacgcgcctgaactacgcgcctgcatcgcccgtaatcccaacacctatccggcactgatcgaatggctgggccagctcggcgacccggcgatcaacgccgctttggcttcccgtcagtgaaaggacggcatcatcatggccaaacttccctaccctccagcacctgaactgggttggtattctgacgatccggtggaaggcaccccggattccgcagttggcacagccgaaccgcagaatgactacgggcagcccagcaccgcggaagcggcaaccaatgccgcttttaccgcagagcccgccgccactgccgccgctgagcccactgccgctccggtagacaccacaccgcacgccgccgaaaacgacatcgaggattgggacagcaccgtgctctcctcctcgttcacttccaaggcaccgaagaagacgtacctgctgcataacgatgtcaccggccagaccattgtgatcgacaagagcacgttgctgggccgcaagccttccatggatgtgccgcagggtgccaaggcggagcgtatcgaagacccgacccgcaccacgtcccgcaaccatgccgccatcagcatcgacaccgatggcgcgctgtggatcgaggactacggctcgttgaacggcacctacatcatcaccaatggccaggagacacaagtcaccaagggcacaccgctcaagctcagcgcgcctgccacggtgcgtatcggagaccagttcttccagttctccgaacagcagtgacctctggactgtacaggccagcgataccccccccccagatatcaataaaccgcaggtaacgtaccaagcaagctgtgagaacaacttgtacccgtacggtacctgcggtttattgttgccgttggcgggcggtcagtgacggttgctcggctatgcctataccgggctgggcggtcactgaccgctgaacgcagtagttacttcttcgagtctgacttgttatcgctggatgagctcgacgaacttgacgagtccgactccgagtccgacgaatccgaatcactctcgctttgcgacgaactgttgctcagatccggtgcggggtcgcccggggcctgaccgatggtcacaatcacgtctccgctggattccgggctccacgccatccattccatagcggcatggtcgcacaccgtggaatcatcacccaatggcaattgcgtgtacttgcccacggacttgccttgcgcatcaacgatgatctgctcatccgtggtcttcacgtatatggtcttggtcagatagttgatgcccttgaaactgccgtcggtcaacaacagacgaccccactgcggcccatccaacacttccgtgggcttcagatcggacgacagcaggaacacgcgtttgctttcgttgccgttaccatccgtctgcacgtagagggtgccgtcggagaattggtcaatggccttgacgtcctcatccttgctcagtcccagcacgtcttccaacgattgccgtttgccggtcgtgctatcgatgacaaacttgccgctatacgaatcatcggtcacatacatgttcttgccgagataccgcattcggctcaaatcacaacttgagtagtccgtatcgcagtaattcaacgggaaactcatgatttccttgttgtcttcgaccgaatacaggtggtacgaattgtctcgcaccatatatgcgtcgtacaagctcacgccgctcgcggaggcattgacctgtttcgcatactggtacccgccagaatcagtggtaagcacgattttgtcttggaaggtctgcaataccttggcggtatcactgtcatgagttacgcccatcacctgcgtgtggttgatggtcgctgagcgctcgtccttgttagcggtgtatttttcatcgctatgccacgttttcttgatggccaccatgttgcgggactcggcgagcaacgagtattcgtaaccctgctcatagtcgataaggttgtcttcctcggtccgcaaatcgatgcggtcggacaattcgccggtttcaagatcgacttcgtgagcgaacagatgcacgctttccggcgtggtgtccaccgccttggtcttcaccgcgtagaacacgaatacggctggattatcgccgtatgtggcggcgacttgcggctcggagtactccttctcccccgattcgagcatggatacgtggatttccttcgattcatccagcgccggcgtccagacgccgaaggcatactcgccgctgccgtccagggaatcacttgaggatttggacgacgaatccgaatcgaccgaggaatccccatcccagcagtggatgacgttcgagaccatcgcgccgccagtccacttccagtcactggcggagttgccgtcgcatgagaaatcggtcatcgtcacttcggtggctgccggcttggcgggctcggacttggtcttctgctggtctttggttgttgtcttagtctttgtcttaggtttcgatttggtggtgctggaggtagttgttggcttggcctcggccttctgatgcgcgttacgccagaatataaagcccgtgatgccgccggctatcagcgccactaccacaataatcgctatgatgattggcacgattttacggggctttttgccgttgttgccggcaccattgccgttgttgggcacgcctgcaccagttggcatgccattgttcgaggtcgggattcctgccggaggaacggcaccggcggcaccggcatacgctccgggtaccgggctgcccggcacctggccgccgggcattggaccgttcggactggaaatgcccggttgcggaatattcgtttgaggcgcattcggccgaggtacgctcggctgcggctgcggcacacccggctgcggaatcccgcgcgatgccactaccgtagcgtccgccggtaccggggctccgcaccgcgtgcagaacatcatattgtcaggaaccgcattgccgcattgtgcacatcgtttcatggttcttctcccccgctatcagcgtcatcgcttcggttcttctctgccttctattgtaggagagatcacgaatgtgtcgtcggccagcgtgaaatcgccgccagatgccacatattcgcaaccgccgcttgccagttcgcggccacctaccgcagtgccgttggccgaatgattgtcggtgatgcaaaaacgtccatcatccagcatgtcaatcaccgcatggatacgactgacgttcgtattgccgcccatgtgaatgtccgcggttttcgatcgcccaatggtggctcgagtggcgtgcaccgttattgctttaccgtcgcgcaatcgtgtgacggtaaagcctctggacttgtccgtgtagaggcgcagcatcgtctcgccttcgctgtcgttctcatcggcgcgcagtgctgtgctgacggcgctgacagggaggatagggcgaacgacgttgctagtggcgggaacgcgagcagcatcaacgttgttgacggtgtgagcaacgtgagcggcggcagcagcgttacccgtgttagtctcggccacggcagcagtagcggtatcacccgcggcagcggcagccgccacattggatgccacaccgcgggcggaatcttcacggatatattgttcgcgaacgagattctcacgagcgggctgcgtttcctgcttgcggggaagatttacggcaatcggcattgcaggagccggctgtgtcacgggcgaggccgacgttacaggagtcggctgtgccggtgccgcgtgtgctgccggcattgcaggagccgccggcgttgcatgcgttgacggtgccgcggaagtcgtcggcattgcggcctgttgcggcgtcgtctgaagtttaggcttggagctcaatactgtggcgccaaatcgcgtggcaccgaccatggtgccgtcagacactacggtcgcgccgaattgcgtctccgaaccattatcttcatgagtcgactgcgctgactgcgcttgacgcggctgaacagtgccgggcagcaaatacgccataaaatcatgcagagcatctgcattaaccagtgaattgcgccccaggaactcggcgagcgcacgctgatagccttgcacaacggcatcctcaagccgggtccggcgtgcatcggccaatgtctgcagcaaagtggtggcggtgttgcgatcgggttccagtcccagcgccggcaccaccacgaacagcggatacccctgtgcggagatatacacgcttttggggtcccactgcacgtacgacagcggcacgcgatgctcctcgcattgctccataacggacaataccgccacgagtatgcccacatattggccgccaggcactaccgacctcaacacgccatgcatggtctcgcaatgagtcacgtcgtaatagaagaggatttccgcgccattactttcaaaccggaacggcagcatataccaatggccttcagcaagccattgtgcctgcccaagatccaacgactcgcctcgcgtggtatgtatggtcagcgtctgagcccccgtacgccgatccttaacagtcttcgctctcatagcacttaagtctagtcctgtaccaaggccaatgctttgcggagacgcaaaactcgtcaacacagtaacacaactccggctaagtaactttaccaaaaaactaaaaattggtaagataaggttaccagttttcctcaatattggtaaggtagcattaccgttttcttgaaaggcacattatggcaaatccgatcatcgccgaaaagctgcgcgattttagaatcgaagatttccacccgattgtgccgcgcgacttggatctaggtaagccactgaccccgagagtaggcaatctggtgaaggtcatcgtaggcatgcgccgcagcgggaaaagctaccgcctattccaagagatagaggccctacatacatccggtgtcagctggaaccaaatctgctatatcaattttgaagatgacaggctcggcgacatcactccaagtgtgggcgatgaagtaatcgaaaccttttgctccatgcatcccgaaagcctagacaccggcttgtacctgttttttgacgaattacaggaaatgcagaactggggcgcttggctacgtcgcatcgtagacaccacaaaagcaacgatctatgtcaccggctcttcctcgaaaatgctctcaaaagaaatttccaccgaatttcgaggccgagcattggacttcgagcttttgcctttctcattccgtgagtttgtccgcgcgcgcggtatcgccgaatcagaattgctcagccggaacgaagcagctggatattccaccaaagaacgattaatgctgtcggccgcattgatctcctacctggaagagggcggattcccagcaatcgagggactgccaacgcctcaacgtgtgaccctgctccagtcatatgtgcagcgtgtcgtatcccgcgatgtagtggaacgttatgacatcgcgcgtccaagagttgcctccgcattggcacgacgcttgcttggcagcaacggcaagccattgtctattcgcaagatagaaaacgaattgcgttcagccggactagccaccagccgtgtgctactgggagatttattggaatattttgaagacgcctatctggtgtttcgaatgaaagacttctctatgtcgctcaaagagagcaccacttccacatcaaaaatatacgccatagatcccgggctggccgcagcctcaagcatggcaagcgccagagatgatggccaacgattggaaaacgccgtttatctcgaactacgccgccgaaccgcaggttatcgtcgcgacggcatatcgtcatgccataccaaggaacatggctatgaagttgattttgtgatgggcgatgcactcgaacatgaacaatatgagctatatcaggtcacggcacgcatggatgataatcggaccatcgagagagaaacccgcgcgctctgggaactcatggccgaacaaaagctccatgaaggaaccatcatcgtcggcgatggaatcgagcgcgaataccgcaacagcaattatgtcatcaaacaagtgcccgcttggaaatggttcgttgcgcatgagccccggtaagcttcaccggccatgtcagattcctgagatggcaaccatgatggcaaggaatatgaacagagtctcgacccagatgagttcggcggaataccacatccagaacggttcgacccgcttgctggcgcattgacgggcaatcgccacttcgcttggcagcaccgcccaagccataaacagggcgaccaacaacagcacaaaagaaatgggcacccaaccgcattccaccagcactat

SEQ ID NO: 2045 - DNA, 18760 bp, Unknown
  R17_18m  MAG No. k141_45500
ccgaccgatctgcatgacggtcggaccgccggcacatgggtgtgcggggcggtgctcctgtgcggttggggcggcattgcggcggtccgtcggcgcaagcgcgcgccggaagggccaccgcgccatgccgtgcgggtgtgattggatcaaggtccggcatggcgatgccagccgttgcggacggattcggggtgcgacgcaggaggttcgcctggtccggagaaaacagtctacgcggcgggaaccgttcacgtcgaaatcacctgcacggcctggagtacccgcaattcgggaaacctgtgcaaccgtagaacgtgcgtgccggtgccgaaacgttcctcggcgtcatcggacgcagcctcggcgtgtgacggcggcgacgcgtgccgccgacaccgattgcgggcggtgacgggtgcgtgacgtgtgtgacggatggtcggatggcggggtggacggaccgagcggaaccgggcggtccgtccggaaccggctagagaccgaggaaggcgcggatgtcgccgatctcctcgtcgacgatggctgacccatgccaggatactcgcggtattcgagtcggccggtggcctcgagcacgcgacgcgcggtctgctggtccgcaggtggaatcgtgcggtcccgcgagccgtacaagagcaggaaacgggtgggggagtcgaaaccggtgaggtccgtcgactcctcgcccttgaacgacgggctcatcaggatcgccgcgtcgaacacgtgcggatgctcgagcaccatgcgatacgacatatagccgccctgggagaacccgacgaggatcttgcggcggcctgcgaacatgggggagtcgagcagggagacgacggcgtcgcccatgcgcgagcactcgcggcggcgtagacagcgtcgatgatgcggatcatctcacgctcgtcattgccgtacccatggaacatgacgaacaggcggtcgtcctgttccgatgcttgaacttggggagctccaaacgtttcatacgtattgggtgtcttaggcgttcgagatatgtcgtgtgtctcgtcggggaacgacgattcgaatcgatggtcgcaataacatgtcggctccttcctcgcggcttgtaccgcttcctcatcatcccgcgccatgcaggcgcgtggaatagaatgttcgacttacggcgtcaatacgtgttgaaggtgttgagcaatccggttcgaaacgctttctcgcatggtgacatgcgggatatgaaatcggcatagtcgacggccgtatcgggaatcgacagtccgagtttggccacgatgatgtcctcccgtgctttgacgtctccgtggaacgtcgttccttgcagcatgtgcagctccttgcgtgaggtttgcttcgcatcggggtagaggaagatgccgagtttggaatcaatccggtacatatatgccagaatctgccagtaatcttctttgtgaatattggatataggcttgtacttggcgtccgcaatgatgggatgttgtttggaacggctgatgaaatcaggatagatagggcctgtgccaccttcgaacaggtgttgttttccttctttcaatttgtttcgcggatggaagaagctatcgccaatcagggaatcgacgtattcctcccatagccaggagccgtcgaagagaatgccatgaagtcggttttcctgaccgttgaacgcgtgacgctgattgctaagaatgatgatgcataattgttgcagcatgcggtattgcgtaaaatacgcatgattgaccggatgtctgagattgtattccagaacggtgctgcggtttgcgcgacgatatgagggagtacattcgattatgtaacgtacctccttgcggatattgcctaatagcgtggaaccgtacggttgaagggctatatattccattgtgtgacgaatcagctgtgtgagaggattgtctgcagtaagctcgcgcacatcatatgcgatattgccggtgaaaggaatattagtggtgatatgccgtggaatatcaattcttccacggatgtggctgtcattgtacttgtgctgaatgtatgtccgataaatcccttgtcttaaagctccccgtaaacagtatggaaacatgaatacatggaattggaacagtctcgtcgataaatcggattgaatactcaggcttgacaggttgggaatattcagtacacgatacatcatgtattgcaggaagaaatcccctgcggatgaggcaaaacgtgaatcgatgaccaactgttcgtcttgatagccaaggtaccccatcagattccctgagcggtagcctccactgtccttttccaataccatctggcattcgtccaagtccggagaatcctgaatcgactgcgggaacaccagcagaccttcttgcgaaagccgggctatggaacgatcggacacagccgcgacgatatccttgacgggagccagcgtggttgcctcaatgcgggagttgtctttgatcgatacggtactcataccgaccgttccgctggctgcggcgaatccgaagcatcttcatatgccgctttcagcttctccatgatttctgtttcgttatacatgccgcgcacgtaatcgtgcaatagcggttgcaggaaatcacgccaaaggtcatcgaacgctttcgccgtggattcggatttggaaagattcaggaaatacgcagggccgacatggtaatccgaacccaaaccgatatcgggggaggatatggtctcattcagcttcgtcaagcggctctcggcttcctccgacaagcctccaagttcttcaagcatgtccaacccgtcttcggccttgacctcgatgaagcggaaccgtcggcgcatcgcgaaatcaaaggtgtcgacggatcgatcgatgtcgttcatcgtgccgatgatatagacattgtccggcacatacagctcatgaccgtactgggtggtcacattgccggcagggccgcgataaccagggtcgatggagaagaacagctcgccgaatatcttggagatttcacctcggttgatctcgtcgatgatgaacacgaagggtttccgaagaaccttttcggatgctcgtgaagccgacgaaggcttgtgcttttggatttcctgtagcaaggcgaatgcataggagtcctcccgctgtcgacgctttcgctcgagaatatgatgcacgtcttcaccatttgttggaggggtgctggattgcataagcgccagaaggtcttggacgcgtattcttaattcctgtttgatgccgtggggagcgtacacaagaacatgatgttcggtgacgttggttacttggaaaggcttaccagtcgagattctgaactgattgtcgtcgaaatcaagagaatcaaagtaggcgtccagacgttcccgaacggatggttccctccgttcctccttggaaagccgggactgttcgacgttgtcccgagccttgtcaaggaaacgcttgaatatgccgtcctggatggagaagccgtgagttcccgtcgcatccgtctcctcggtattggggcggatgccctccacgaaatccgtgtagtcgtagctgggatgaaattggacgaaaccgatgcgtctgcgctgttcatcatcaagcttggaccaatcgccgcgcttgccgtcgctgacgatatcggcggcgatttggcgggcaagataggttttaccggttccgggagcgccacggaagatgatgttcttggaatccaacagtgtctgcgaatacttattgttgtagacaggggacttctcatcatcgggtgaagcgtaacctttttcttcttctaccgaagcgtcagcattcgaggcttcttgggaggtcttacgacgataccgcaagatgaaggcgtcattcggtttgccgaagcgtttcagacactcctgaacgaagaatagcgtcgagaagatgttccagcagtagagatacatctgtacatccgttccgcgccaataacgcacgtattcgattgagttcttgcagccgcttctgaaacgttcctcatcggggaagatgccggtgattagcggcttatccagaccgtaccgacagatggggaaggactcgcgcttgtcgtacggcaattcgagaagcttatcttcgaatacctgacaggtcagacgtggcagtgtctgacatgagatccggcgttctcccttgttacgatttcgttcgattggttcgccgtccgcaggcttgaacttgacgtcttcgggggtatacgcacttcccatgttggcgaagaaggaagggtcggtataggaatcggtatcgggctcattcgactgaatcgagtcggccgtgatgatcatctcatatgttccatcgggttgtgtcgtcattgagcaccttgccttatagcgtctcgtgttgtcaactatcctacactgtgcggattcatggcgtgtttgtcttcataggaatcggcctgcggccgatgcggtgtttttgcggcctttggccgcggtctctccctcagtcggcttcgccgacagctccctcgtcagagggaacccgcgctgcgcgcgttttgtcggctcgctattacctgcatgatgcctacggcatcgtctcgtcagagggaacgtcctgtggccattgccggtctggtctgtaccgcatcgggaacgctccgtaccgtgtcggacggcgcgcgaggtgggggcgtgcggcgacgttgcgatgggaatcggtcagcgcgggcggcctcatgctggtgagaaaggccgtgtgcgttccggcccgaacaaaggacgatgggatgggccgagaccgatgaaccgatacggaagggactacgacatggacaatacggcgcgcagggatgcgggattgccataccactacgacgacccggccatcatggacggacagctcgcatggcagaacaaactatgggaatacaaccagaccaaacccaccgaacgggagcggcgcgccgaactgctcaaagacatgtgcgccgaagtcggcgacggcgtgcacatcgaaacgccattgcatgcgagcaacggatgccgtcgcgtacacctcggcaaagtcatctacatcaacgcgttcatgagcatggtcgacgacgcggagatatggatcggcgactacacgatgttcggaccgtccgtcaccatcgccaccgccggctacccgatcttgcccatcctgcgcgaacaccacactcttgttcctatagcccagaaatcccgcgtctctttcgttgtgacgcgggatttctgccggttgggctatcggttggattgactggtatgtttcagcgaacggctttgaccagtgcctcggtgaggtacttgccggcggccatcaccagcggcgcatagcggcgtccgggggcggcacccatgcggccggtcgggccggaaatcgagatggcggcgatgacctggccggaggcgttgcggatcggggcggaaatcgagcacacgccctcttcgcgttcgttcacggactcggaccagccgcgcttgcgtacggcggccagcttggtggcggtgaacttggcgtggcgcaatccctggtgcagacggtcggaatcctcccaagccagaagaatctgggcggcggaaccggcttccatcgacagcatggcacccaccggaatggaatcacgtaggccggaggtgcgttccacagcggcgatgcacacgcgctgatcgccttggcggcggtaaatctgcgcagactcgccagtgcgatcgagcagggtctgcaggatcgggccggcggcggtcagcagacgatcctcgcctgctgcggcggcaagttcggcgaaacgggagccgagtacgaatcggccatgctggtcgcgcagtacgaaacggtggcgttccagtgcaatagccaaacgatgtgcggtcggtcgagcgagaccggtggcggccacaagctggcccagcgtagacgggccggattccagtgcgtcaagaatctttacggttttatcaaggacgccaacgccggaatggatttccccatcgtccttggcggtggtgtcttcaaccggctcggactcggtcaagctgttgttcaatggttcttcccgggaatcagtcataataagggcgattatgccatctcacatagtgaaatggcaaattggggaagtgtctcacagggtggccatgaagttgaaagggcgttcgtggatgccgaagagacatgtctggagcggaaccgagtcatgactaggtcatgttcgagtcgggtccgagtcatattgaggccatcatttgaccgtatctcaatatccggcatgctcatggccgggcccatcgcaagcacataggctaataccacgaacaaggcgcgaacacaatacctcgcgcggaattttttggaggaatcactatgggaacgacactggccgagaaggtctgggccgatcatctggtgcgcaagggcagcgacggagctcctgatttgctgtacatcgatctgatgctcatgcatgaggtcaccagcccgcaggcgtttgagggcctgcgcttggccggccgcaagccgcgtcacgtggatcagctcattgccaccgaggatcacaacacgccgaccgttgatatcgatcgcccgaacccggatgagacgagcgcgttgcagttgacgactttggagaagaactgcaaggagttcggcgtgcgcctgcacccgctgggcgacgccgatcagggcatcgtccacgcgttcgccccgattctgggcctgacccagccgggcatgaccatcgtgtgcggtgattcgcatacgtcgacgcacggcgcgttcggcgcgctggcgttcggcatcggcacttccgaagtcgaacacgtgatggccacacagacgctgtctctgaagccgttcaagaccatggccgtcaacgtcaacggcaagctgcccgcggacgcgacggccaaggacatcattctggcgatcatcgccaagatcggcaccggcggcggccagggttacgtgatcgaataccgtggtgaggcgattcgcaacctcaccatggacgaacgtatgaccgtgtgcaacatgtccatcgaggccggtgcgcgtgccggcatgatcgcgccggacgagaccacgttcgagtacctgaagggccgtccgcacgcgccggaaggcgagctgtgggatcaggccgtggcgtactggaagacgctgaagaccgatgacgatgccgtattcgacaaggtggtggatattgacgccaccaagctcggtccatatgtgacgtggggcaccaaccccggccaaggtctgccgatcaccgcctccgtgccggagccgggcaagatcgccgacgccaccaagcgcgccgccgccgaacgtgcgattacatacatgggtttgaagccaggcatgccgatcaaggacatcgccgtggacaccgtgttcattggttcgtgcaccaacggtcgtatcgacgatttgcgccaggccgccgcgattatgaagggccaccgcaaggccgagaacatccaccgcgtgctggtggtgccggcctcctcccgcgtgcgtttgcaggcggagaaggaaggcctcgataaggtgttcaaggactttggcgccgaatggcgtaacgccggctgctcgatgtgcctgggcatgaacccggacaagctggtgccgaacgagcgctcgatttccacttcgaaccgtaacttcgagggccgccaaggcaagggctcgcgcacgcatctggcgtcgccggccgtagccgccgccaccgccatccgcggcacaatctcgtctcccgccgatctctgagtcaatacacgtgagccccctctgacgaggggctgtcagtcgaagactgactgggggagagatccccgaaaggaaaattgttatggaaaaactcaccacactgaccggcgtgggcgtgccgctgcgccgctccaacgtcgataccgaccagatcattcccgctgtgttcttgaagcgcgtgaccaagtccggcttcgatgacgccctgttctacgcatggcgccgagacccgaacttcgtgctcaacaagccggaatacgccggtaagggccagattctggtcgccggccccgaattcggcatcggctcctcccgcgagcacgccgtgtgggcgctgcacgattacggtttccgcgtggtcatcgcgccgagcttcgccgacatcttctacggcaacaccgccaagaacggcgtgctggccgcgattatgccgcaggagtccgtcgaactcctgtggaagctactggaggaagagcctggtcgtgagatgactgtctcgctggagacccgcactgtcacttgcggcgacgtgaccctgccgttcgaggtcaacgattacgtgcgttggcgtctgatgaacggctacgacgatatcgatctgacgctgcagcacgaggacgacatcgccgcctacgaaaagatgcgcgccgaaaagttccccttcaagcccaagaccatccccgccaaacactgggccgaagaaagaatcgagtccgcccgcgagcctgaggacgcagactggacagggccgttggccgatcgcggcattatttagccgcgatcggcctgctgaaagcccggtgggctttcagcaggccctgtgccgagctgcgacagcagcgaggccagcattgagcctcgccgaaaggcgagtccataattgcaggcccagggccgttggctctgtgtctgattgagattattgggtcgctcgcatcgcatcaaacaaaggtctcactggtgcccgcgccccacatccattgcgcggcgggcaggagttgcggcaatattcccttcagtgccaacaacgccatacggtcgttatccaccgcagccaccaacaccggcgtggcggcgctttcctcaacactcatgaactccgtcctagcgttcgaaatactgtgcctgaattcgtacacatttgtggacataatcacgattcatccagtaatgacggttaggttgagcatcatgaccatgaatgacatgaatccgtcgaacgattccgatacggctccggcgcaatcgctgtcagcgcaaccgttgccacctcgaccggcaccgcagtctgcggcacagtcacagacgccgatgccacagacgccacagtatgttcagcctgggccgagcatgcagccgcaatatgcgggtcagccggaggcatgggcacaaccgctacctccacaagatgtttcacggggtgttccacggattgtttcacaaggtgtttcacaacctgtgccgcaagccgcaatacctgctgtgcagcctgcacaatacgccgcgcagctcgtatacccgacatatcccgtccaacctacgtatcctgcccagccgatgtatcccacgcagccgacgtatccggcgcaatccgcctattccccatacccggcgcaacagtcggctccacagcccctcgctcatccgtactacgctcaaccagtgggctacgcgccacaaccctattccgctgcgccgcaaccattcgtgcaaacggctccggcaatgccagtcacaatgcccaacgcaatgcctgccacgatgcccgcagcaatgcccgtggtcatgccgatcgatcctcgccgtgtatggcgcacgtggcgtcgcaaggtggtcaatcgtgtaatgggactgactctcgcctatgaaggcatgatgctcttgggcgcaatggtcgccaccattatcgtcggcgtaataaccgcgagcgatttgtccggcgtgcagtgggatggcatcatcagcctgatatcggtgttcgtcgcgttcggatttctgctgctcatgcgccaccgtgacatcttcacctgcgaattctggcttggtggccagcatcgcgactcgtacggggagcccaatcagcttggccacatcagccaatatggcggcgggcgcatgcagcctctctgggcgttgatgttcatcgtgctgggcatgggcgtgcaaggcatcgttatgttggtgcaggtcgctttttccatgctgggcaccgatcttgcctctcccacgtcagacagcatcgccgaatccagcgtcaccgtaagcatgtggctgtacgttgggctggtcgctccgatttgcgaggaagtactgttccgcggcgtactgatgaaggagctcaagccgttgggcaagaacttcgccatcgtcacctcggcaatggtgttcggcctgttccatgacgacgtagtgcaaggcacattcgcgttcctctttggcctgattctgggattcgtggccatggaatactcgttggtttggtcgattgcactgcacatcttcaacaatgcgattctttccggcgccatcgatacccttgccggcaactatcttgatgacaacgcatatttgatattctcattgtcgctatctgtgatcggcgtgatcggatcgattatcatattcgtgatatacggcaaagagatgcgccaatatcaccgtacgaatcgtagtattccagacacgtactttggctgggcagctccgacgttcatcatctttgtggtagccaatgccgctttcgccattatttcgtttgtcggcgcgatgatgggttgagtgtgcgtgtgcgcatgcaggttggcttatcgttgaagcatgagtgattttgagccgttttacgatgtcagccgcagttacgaagacaactatgagcaagggccgttcggcgcgttcgccgaggcgctgaaggatggcaacggtgccgatgccgccggaaccaccagcgagggtgcctccgagggtgccttggccacctttttgggccagccggtcaacctgcctttcggcattcccgcaggcccgctgctcaacagccgtttcaccacggccgctttccacatgggtttcgatctggcgacctacaaaaccgtgcgttcgcgcgcctggggctgcaacccgttcccgaacgtgctcgccgtacaccccaagtcggcggacggttcactgacgccgggcagcgccgaactggacgaaggcgtgctggccgacaccaactatgaacagccgatttccatctccaacagcttcggtgtgccctcgcagagccctgacgtctggcagccggacatgcgcgccgccatcgaggccgccggtcccggtcaagtgctggtcccgagcttccaaggctcgcgtgtggagggcatgagcgaggaggaatacatcgccgaccatgccactaccgcccgcctggtcaaggagaccggtgccaagctcatggtgatgaacaccagctgccccaacgagggccacaaccgcctgctatgccacaatccgctgctcgtgggccgcatcaccgaggccgtgaagcaggagatcggcgacatcccgctgatggtcaagctcgcctacatccccagcgacgacgctctggagcttatggtgcgttccaccgtgggccacggcaccgtgcagggcttcagcaccatcaatacgatttccgccaaactggtcgatgccaatggcaatcaggccctgcccggcgcgggccgcgatcgctcaggcgtgtgcggcaatgcgattcgtggcgccggcctcgacatggtcgcccgtctggccgcgatccgtgaaaagctcgggctcgatttcgcgatcaacggcgtcggcggcgtggtctcgcccgccgactaccaggcgtaccgtgacgccggcgcggactcggtgatgtccgccaccggcgcgatgtgggacgccgaactggcccacaagatcaaggccagccggtaaatcggctccaaaaacaagcaacagcctgtacgggccgtgattcccagacgattcccagacagtgcccatgttgcattgaaactgttgctgttatatgtaatcacggccgaacaagctgcataacttaacctctttcttcttctctcctttctctccccggcgcccatcacgccggggtttcttttttgcggtgggtacagccgtcttactcggccgccgccttcatggccacggcgccgacgtagtagaccggcttgtcgaagttcggctggaacaggaagtccacgttggcgagctggtcgatggtgaagccggcctgaatcgccatggaaatcacgtttgccgcgccggagatatcggccttggaacagaactggccgcccttgaccttgcgggtttccgggtcccaggtcagaatcgacgtgactggggtggtggtgagcatgaagtccgggcgataatcctcggtgagcgaggtctcgcggaccgtgagcccgcggcgttcggcaccggcgcgggtcaggccggaggcggcgagcgagagatcgtacagctgcacggcggacgtggcctgcgtgcccatgtacttcacggtcggcgtctcgatgttgcggcccaccagcaggccctggcgcaccgcgttggtggccagcggaatgtaatcgtgctggccggtggggttgtagaacacggtggcggagtcgccggcggcgtacacgcccggcgcggacgcctgcatgtagtcgtcgaccacgatcgcgccgttcggcagcatgtccaccttgcccttgagcaggtcggtgttcggcaggaagccgacggccagaatcgccatttcggccgtgtactcgcccttttcggtgaccacagtgacggtgtcgtcgtcattgtcgcggaactcgaccaccttctggccgagtgcgagcgtgacgccgtgctcctcgaacgcggccgccacctgatcggtgatggtcttatcgaaattattggccagcgggcgatcaaggccgtcgaccagcgtggtcttgacgccggtgacgctgaactgctcggcgatttccgcgccgatatagcccgacccgatcaccactgccgacttggcggttttcgccttttccttgatggcgatggcgtgatcccagttcttgcacagcagcacatgcgggctgtcgatgccggggatcggcgggatgaccgggcgcgagccggtggtcacgaccagtttgtcgaaagcgagggtctgttcggcggggtctccggcctcgtccagcgcgcggtaggtgagggttctggcgtcgaggtccacggacgtcacgtcggtgcgcatatgcatggtcgcgccggcttcggccagagcggcaggggaggagtagaacattttcttcgggtcggatacgtggtcgcccacccacagggcgatgccgcaggagaggaaggacagcgtaccgttgcgctcgaaaacatggacggtccaatcggggtgctcggcgagaatcgaggtggtggcgaacgtgccggcgtgcgtgcagccgatgacggcgactgtggtcatgaatgctcctttgcttgtggccatggcgtctgatgccattgccctgaatcgtagcgtagaagtatggagaacaccgtggcggcaaatgtgaggaagatcacgttatcggtttgattcgacggggggtatgggatccgttgtgcacggtgatcaaagttcggctggggtgcatttcacggagtcggcacatggcttatggcaaactggacggtagcattttttgaatcttgattgattgaggagagtggcgtggctgagaatccggatgacgtgttgcatgtcgagggcggcaagcctttgaatggcacgatcaaggtgcgtggcgcgaagaacttcgtgagcaaggcgatggtcgccgcgttgctggcaccgggcaagtcggtgctgaagaacgtgccggagattcgtgacgtgcatgtggtgtccgatttgctacgtctgcacggcgtggacgtggatgtggacggtgcgaacggcattgtgaccatcgacgcctcgcgtgtgcagctggccgatgtggccgacgtggatacactgtccggttcgtcgcgcatcccgatcctgttctccggcccgctcgtgcaccgtttgggtgaagcgttcattcccgcgttgggcggctgcgcgattggcggacgtccgattgacttccatctggagacgctgcgcaagctgggcgccacggtggacaaggaacacaaggacggcatccacatcaccgcgcccaacggcctgcacggcgcgaagatccacctgccctacccgtcggtgggcgccaccgagcagactttactggcggccgtgctggccgagggcaagaccgaactgtcgggcgcggccactgagccggagatcatggatctggtgtgcgtgctgcagaagatgggcgcaatcatttctgtggacgttgatcgcaccttccgcatcgagggtgtcaaggaactgcaggggtacacgcacacgtcgctgacggatcgcatcgaggcggcgtcctgggcgtccgccgcgctcgccacgcacggtgacattttcgtcaagggtgccacccagccggagatgatcacgttcctcaacgtgttccgcaaggtgggcggcaaattcgaggtgacggacaagggcattcgtttctggcatccgggcggggacttgaagcccgtggcgatcgagacggacgtgcatcccgggttcatgaccgactggcagcagccgctcgtggtggccctgacccaggccaacggcctgtcgatcgtgcacgagaccgtgtacgagaaccgtttcggcttcaccaagccgctggtcgagatgggtgccaccatccagttgtaccgcgagtgcctgggctcgctgccgtgccgtttccggcagcgcaactacaagcattccgccgtgatcttcggaccgaccccgctgaccggacgcgacatcgacgtgccggacctgcgtggtgggttcagccatctgatcgcggccttggccgcgtcaggcccctcggacgtgcacggcatcagcctgatcgaccgaggctacgccgacttccgcggcaaactcgaagcgttgggtgccgacttcgattaatttggccgttcctcggctcccctctctgaggggagccacaatttttacaacagcccgtccgcctcaagtgcggcggccatgcggtcgaagcattcctccagtagcgggtagggcatggcgaagttcatgcgtacgcatccatgcccgacctcgccgcattcgcggccgtccgtcaacgccacattggctttcttgaagaaatagtcggccgggtcgtcaatgcccagtggcgagaaatccagccacgcgatatacgtgccctgcggctccacatagcgcaccttggcgaatctcgtgcgcatctgctcgttgaccagcgcgatattgcgctcgatgtacgccatcacgccctcgaaccatgccgcgccgccgtcataggccgcagtggtggctatggcaccgatggtggccgtctggtgctcggaccattccgcgttcctcatccatagttccagatcgtccggattggtgagaatcacctgcgcgcacttggtgccgggaatgttgaacgacttcgaggctgaagtggaggtgaaagcctgcatggccgtctgccggttgattgaggcgaatggcacatgcgtgtggccttggtagacgaacggcgcgtgaatctcatcggagaatatacgcacgtcgtacttggcggccaggtcggacaatcgcagcatttcttcgcgcgtcaataccttgccgatcgggttgtgcgggttgcacagcacgaaggcatggcagccgttcgcgaacgcctgctcaatggcgtcgaaatcgaacagccattcatcattgcgcccgctgctctcgccggcgccctcgcacagcatcggaatctcaagaacctccacgccatacaggcgcggcacgctcaggaacggcatataggccggagtcggcaccacgatggagttgccggcgcgcacaatctcgcgcaggaacacttcgaacgcctccagcacgtccggcaccggacggatgcacgtcggatccacatcccagccgtatcgacgctgccatgcggcgcacgagcgggcgacctccttcttccacgggtcgggaatgtagccgagcgcgccacgttcggtggcctcttcgatggcttcggccacgcacggcgccagaccgtaatccatctcggcgatgaatgcgccgatgcagccggggtagcgggtccatttgtccgaaccgacctgcttcagatcttcgatggtcgtcacgtcgatgtgattggcatcaaagcaagaggcaccggcggttgcgctgctcaaagtcgttgactgggaaacgttgttcatgctcataacatgtcattgttcctggtacagaagggctgctcaacggtctggctccccgaaatcgtgatggcgttcgcaagcttgcttatcgctgtccgactacttggcactcaaatatttgagtgacgtgcgctcgagctcttcgagcaatgaaccgagcgcgggacgatggtcgccggcacgagtcacgatgccgacctcgcgcgccgcaaaatcgtcggcgatgggacaggccaccagatcgccttgcagattgatatgtgtatcgagcgccggcaccagcgagacgcccatgccaacctcgaccaggttctgcgtggcccagtaatcatccgtgcagtggcggatatccggcttgaatccggcacgggtggccagtttcaccaaatttgcgcggcaggtggggcagccggcgatccaatgctcgtctttggcggcggacagcggcacgggttcgccggtctcctcgaatcgtttggcgatgtcgctggagcggcggaccaacaatcgcatcggatcgtaacccagcgactggaaggtcagatcgtcgccgatgtgcaggaagttcgggatgctgctgtaccggaacacggcggcggcatcggccttgccttgggaaatcagaccgatcgcctccggcggctccatctgaatcaggctcagctcgatgtccgtgaacatactgagcttgaccacggtacgggccgcgatagtagagcagattgacggtggggccaccaaatgcaggtgagcaaaccgatgatgccgataatcctcgacctcacgggccgcccgctccagccgatcggcgatggcctcgccgtggcgggcgagcatcgaaccggtggcggtgagttccacaccatgcgaggtgcgttgcaccagagtcgaaccgcactgtgcctccagctttttgatctgctggctgatggccggctgcgaccaacccgtggccttggccgtggcggagaacgaaccatactgttcgatctgccacaacgtgaccaatgattgggggttgagcccggccatatgcacctctttcgcgcgtcgttccattatggccgccgacaatgaccggacgcggcatggtgtcgccgtcgccggtatccttagaagaatgagccctgaagccttaagtgaactgatttccagcattgcccacaacctcgtcgccgccggccaggccggcgcgttgaccgacgagctgatcccgcccgtcggcaagctcgccgtgatgcgcccgaaggaccgcgcgcatggcgactgggcctccaacatcgccatgcagctggccaagaaggccggcatgaagccgcgcgatctggccgagccgttcgccgccgcgctcgccgaagccgacggcatcgccaaggtcgaggtggcaggccccggcttcatcaacatcacgctcgactccgcctcggccgccgccgtggtggacaccgtactcgccgccggtgccgtgaccgacaccgacaagcacctcaacaaggtcaacgaatacggccgtaatgcccatctgggcggccagaccctgaacctcgagttcgtttccgccaaccccactggtccgattcacatcggcggcacccgttgggccgcggtgggcgacgccatggcccgcgtgcttgaggccaacggcgccaaggtggtgcgcgaatactacttcaacgaccacggcgagcagatcaaccgcttcgccaagtcgctggtcgccgcttgggctgaggccaacaacctcggtgaggccggctaccagaccgaaaccccgtgcgacggctacaagggtgcctacatcaacgagatcgccgcccgtgttcaggccgaagccgagtccgacggcgtggacctgaccgcactggcccaccaggatcaaggcctgaacgacgacggcgaaccgctcggcgaggccgacaccgaagtgcgcgaggaattccgcaagcgcgctgtaccgatgatgttcgacgagattcagaagtccatgaaggacttccgcgtgaacttcgacgtctggttccatgagaacagcctgtacgccgacggcaaggtcgacgccgccatcgaagagctcaagtcccgcggcgacatcttcgacaaggacggcgccacttggtttgaatccaccaagcacggcgacgacaaggatcgtgtgatcatcaagtccaatggtgagttcgcctacttcgccgccgacatcgcctactactgggacaagcgccatcgcgccgaaaacccggctgacgtggccatctacatgcttggcgccgaccaccacggctacatcggccgcatgatggccatgtgcgcggccttcggcgacgagcccggcaagaacatgcagattctcatcggccagctggtcaacgtgatgaaggacggcaagcccgtgcgcatgtccaagcgcgccggcaacgtcgtgaccatcgacgatctggtctccgtggtcggcgtggacgccgcccgctactcgctggcccgctccgactacaaccagaacttcgacatcgacctggccctgctcgcctcgcacaccaacgacaacccggtgtactacgtgcagtacgcgcacgcccgctccaagaacgtggaccgcaacgc

SEQ ID NO: 2046 - DNA, 4470 bp, Unknown
  R17_18m  MAG No. k141_45675
actactccagctccaccgcgccggtgtagagctgatagtactcgcccttttgcgcgatcagctcgtcatgcgagccacgctcgatgatgttgccgtggtcgagcaccatgatcacgtcggagttgcgtacggtggacagacgatgggcgatgacgaagaccgtacggcccttcatcaggttatccatgccggcctgcacgacttcctcggtacgggtatcgatggaagacgtggcctcatcgagaatcagcgcgggcggatcggccaccgcggcgcgggcgatggaaatcagctggcgctgaccttgggacaggccggatccatcaccctcaagcaccgtgttgtatccctcgggcagcatacggatgaagctgtccgcattgaccagacgcgcggcctcaatgcattcctcatcagtggcgttcagacggccataacgaatgttgtccatcacggtaccggtgaacaggttcacgtcctgcaacacaatgcccaaagacctgcgcaaatcaggcttcttgatgccggccacggagatgccatcatacagaatctgaccttgctggatatcgtagaaccggttgatgaggttggtcacggtggtcttgccggcaccggtggcgccgacgagcgcgatcttctggccgggcttggcgaaccaggtgatgtcgtgcagcaccggcttgtccgggttgtagccgaaggtcacgttggtgaagcgcacgtcgccgcgcagcagcgtataacgcccatcaggcgaggtgatcgcctgctccttggccttcatcgccacctcgcaggcggaaccgcgcagcttttcggcggccttcagagacctcgtaccatcgtcgccgatctcacgcttccacgcccagtggccggtctcatggtcgacttcggtcatggtgcggccgtccggcccaagttccacgttcacgagcgtcacggtgcccttgtcttcctcgatgggttcgtccatcaacttgaagatgcgggaggcgccggcgagcgccatcatcaccatggtcagctgctgggagacctggccgatcgggttgatgaacgagcgggacaaggtcagcagggagacgagcgtgccgagggtgagcggcttgacaccggtcagaccgatgtcattgacgccggccagcgaaacggcggcaccgacgatggcgagcaggatgtagagcagatagcccatattgccgacgaccggcatggtcacattgccccaagtgttcgcctcggcggacgcctcaaagagttcctcgttcttctcatcgaaggtcttctgagtggcgtcctcatggttgaagaccttgatgaccttctggccgttgacggattcctccacgaaggcgttcacgtcgccgatccactgctgctgcttgacgaagtagcggccggaacggctcacgatcttgcgcacgatgaaatacagcagaacggtgaacacgattacgaacgcggtgaatggaatggacagccacagcatggacagcaatgccgcaatcgcggagataatcgaggagaacatctgcgggaacgactgcgagatggcctggcgcagcgtatcggtgtcgttggtgtagtggctcatgatgtcgccgtgctcgtggctgtcgaagtagcgaatcggcagcttctgctggtgggcgaacatatcgtcacgaatcttcttgagcgtgccctgttcaatggtgataatcagccactgccaagcccaggatgtcacgataccagccacatacaggcagcccatcagactgatggcgcgcagcaacggagcccagtcggggttcgattcccccaccatcggcaggatgtaggtgtcaatcagcgattggaggaacagcgcggatccggcctgcgcggcggcaccgatcaggatgcacaccacgatggcgataacgcgcaatttgtattggaagatgtagctgaagatgcgcttgatggttccggggtcggctttgcccatggcgggctcgcgattcttgaaactctggtcgttgctcatcgtgcttctccttccttggtatcggctgcattggtatcagctgcgctggtatcggccgtgggcatggtcactgtcaccgtcacggtttcggacggctcagcggtagatgactcagcagcctgtccggcagcggccagttctccggtcttagcctggttcttggtctgggattcgtaaatggaacggtattcatcacaagtggtgagcagttcctcgtgcgcaccggaggccatgatacggccggaatccatcaccagaatcatgtcggattcctgcacggaggccacgcgctgggcaatgatgattttcgtggtgtccgggatctcgttgtggaatgcggcgcggatcagcttgtccgtcttggtatcgacggcgctggtcgaatcgtcgagaatcagaatcttcggcttcttcagcagcgcacgggcgatgcacaggcgctggcgctgtccaccggacacattggtgccgccctgctcgatgtacgtgtcgtacttatcggggaattcctgaacgaatccatcggcctgcgcgagctgcgcggcatggcgaatctcctcatcggtggcgttcgggttgccccacctgaggttttcggcaatagtgccggagaacagcacgttcttctgcaacaccatggccacctgatcgcgcagcgcctcaatgtcatagtcgcgcacgtccacgccgccgaccttgagcgagccagagctcacgtcgtacagtcgcggcaccagctgtaccagagacgactttgccgaaccagtaccgccgacgatgccgatggtcatgccagaacgaatcttcaggttgatgtcgtcaagcacgggcttttcggaactgtcggagtagcggaaggtgacgtggtcgaattcgatggagccgtcggccatgtcagtcaccgggtgagccgggttctgcaccgtgctttcctcctgcagcacctggcagatacgctcggcagaagcctgagaaataatcaccatgacgaaaatcatggacagcatcatcatggccataagaatctgcatggcataggtgaccagcgaagtcagctcgccggtggacaggcccaacgccgcattattgccggaagcgacgatctgctgcgcgcccatccatgcgatgagaatcatcgaggcgtagacgcacaccatcatgatcggcatgttgaagctcatgatgcgttcggccttggtgaagtccttgaagatgcgttgggagatgcggccgaacttggagacctcgaaggattcgcggttataggacttgaccacgcggatgccctgcaggttctcgtcgaccacgttgttcaacgcatcgtaggtgtgaaacacgcgctcgaacacggggttcacgagcacgaccagaccgcacaggccgatggccagaatcgggatgcaggccaggaacaccatggaaatcgacggggagatacggaacgagaacagccaggccacgaccaccatgatcggggcacgcacacccagacgaatgatcatcatgtaggcgttctgcaggttcgtcacgtcggtggtcagtcgggtcacgatcgaaccggtggagaaccggtcgatgttggtgaagctgaagccctgcaccttctcgaactggtccttgcgcaggttcttggcgaagcccgcgccggccacggccgcgtactttccggacaggaagccggcacccagcgaaaccatcgcgcacaccagcagaatcacgccgaacttgacggtggccggcatgctgccaccggtgataccctcatcgatcagcgaagccatgatggtcggaatcaggatttccagaataccttcgaccgccacgaacaccggagccaggatgctggctttcttgtattcacgaatcgaatggcccagcgtgcgcagtacatgtttgggcttgtccggttcgacggctttgcgcgcctgcgcgattgcctctgcggtatcgctcattcgttctcctccttcgtgtcagcaacctccgctccgtcttgatcgggagccatcaccacaggtgactgagggagcgtttgatgttcaaattcgcgttgtgcgcgctcgatgttcgcacgcatgcgtgcgacgtagtcgcgcagagcggccttctctccatcggagaagccgccgaccagcaaccgttcgacccggtcaccattcaccttgagatcagcgacgatcgcgtccgccttgtcggtcaggacgatgcgcttgcagcgcgcgtcatgctccaccgattcacaggcgatcaggcccttcttctccatcagggccagcacacgcgaggcggtggaccgggtgatgcagaattatacgtaacaattcatgataaagagacccatagacaacagttgtacatacaacaatcagcgtgttgtagtatttccggctcttccgattttggcgtgtaagggcatgtgtcagaggtgggtttggatggcgtgtctgaagccg

SEQ ID NO: 2047 - DNA, 28263 bp, Unknown
  R17_18m  MAG No. k141_46286
ccagcgactgggagaccatgaagcgcgcctgcgatattctcgaccagttcggcgtcgcctaccacaagcaggtcatctccgcgcaccgcacgcccgagctcatggccgagttcgcgcacaacgcccgcgccaatggcctgaaggtcattatcgccggtgccggcggtgccgcccacctgccgggcatgatcgccgcgcagaccacactgcccgtaatcggcgtgcccgtgcgctcccacgccctgtccggctgggattcgctgctgtccatcgtgcagatgcccggcggcattccggtggccaccaccgccgtcggcaactccggtgccaccaacgccggcctgctcgccgtgcagatgctctccgccttcgagcccgaactggccgacaagcttgaggattaccgtaacgaactgaaagaaaaggtggctgaatccaatgcccagcttgtctgaggaaacaggcggtcgtgtttcgatgctgatgccgggatcgaccatcggcatcatcggcggcggccagctcggccgcatgatggctttgtccgcccgctacatgggcttccgcgtcggcgtgcttgacccgacgccgaactgcccgaccggtcaggtggccgacttccagatcaccgccgaatacgatgacaaaaccgccatccatgatctggccgtgcagtccgacgtgctcacctacgagttcgagaacgtggacgccgatgccatcgacgaggtgcgcggcatcaccgccaccccgcagggcactgacttgctgcgcgtgacccagcaccgcgtgcacgagaagcggttcatcaacgaccacggcaccgccaccgcaccgtggcgcgccgtcaacaacttcgatgagcttgacgccgcattggatgatattcattatccggccgtgctgaagaccgtgtccggcggctacgacggccacggtcagctcgtgctgcgttccgacgccgacttggagaagatccgctcccgttccgaccgtggtggcggcttcccgccgagcatcctggaaggcttcgtcgacttcgcattcgaggcttcgatcctggtctccggcaacggcaaggacttcgtcaccttccccatcgtgcgtaacgagcaccgcaacaacatcctgcacatgaccatcgcccccgccgaagtgtccgaacatgtggctcgcgaagcgcatgaactggcgattcgcttggccaagggcttcgaactggctggcacgctggccatcgaactgttcatcaccaaggacgatcaggtcatcgtcaacgagctcgccccgcgcccgcacaactccggccactacaccatcgaggcctgctcgatggaccagttcgacgcccacatccgcggcatcgccggctggcccatgcccaagcccaagctgctctcgccggccgtgatggtcaacgtactcggccagcatgtggagccgacgcgcgcgctgatcgccacccacccggagtggaatgtgcacgactacggcaaggccgaagtgcgccacgaccgcaagatgggccacatcaccgtgctcaccgacaaccctgatgccacggttgctgaccttgaggccaccggctgctgggacgacctgaaaaagaaggcgtgaccttatcgatggttgaacatatcgaacgccagaccaagcagaaggacgcgattcgcgccgccttggccgactgtgaggagttcatctccgctcaggacctgcaccgcaggctggaggacgaaggctcgaaaatcggcttggccaccgtgtaccgccagctcaacgccttggccgatgccggtgccgccgacacgatccgcctggacggccagcagctgttccgcctatgcggcgacgacggacatcaccaccacttggtgtgcaagcggtgcggcaaaaccgtggaaatcgatccgcccagcgaggcttggctgcgcaaagtggccgacggccacggcttcaccgtcgaatcccacaccctggaggtcttcggactatgccctgattgccaaaaggagcagaaagcgcagaaggctcagaaagcagtgagcgaataattgaatgggatcggcttcaaagccgatcccatttgctattccgctgctattccaccgacttcagggcgccgagcatgtcgaccgtcttcaaccgccggtagaccagcacgccgagtccgccgagcaccttgatggtcggcagttcgcggatacgttcggagacgttgagattcgtcagattgtagaggatcaccacggccagcagctcagccgcgagaatcagcacttccatgatctgatccggcaagtcgacgattgtggccacctgtttcttcgaagtcgtgttctgcacaatgcccttcgcgccgtccaactttatgagcttggcgctacgcgactccacattggaggtctcatggttcttgagcctcaccatataggcgttcgactggtactgttcgccgaacacgtgcttatagccacccgaggtcatgaacatgaaatgcccgatatgcatttcggtgatgccgtccacgcgcaccttgcgctcggtaccgctcgaatcggtgacggtaatcgtgtcgcctaccttggcgtccatcatccccgccatacgttcggagatgatcgcaccacggtcggtgagcacctgcggcttgtgcccggtgcgcgaacgcagggtgatgtagtcgccgaaattgtaggcgtcatcagtggcgatcagggtaatcgactgtttgtcgttctccttgccggccactttcgacatctcctcgtagtagatcggcgcggactcggagacggccccgcccctcatcgccttggccacttcggcgcgctgcgaataatgttttcgtcagctttggtcaggccataatcgctgatgacggttatgtcagcgagattgttctgattaaagaagtcggtgccggttatttgcatgtccgggccggtgacgaacaggcctacgagcgcaaaggagccaagcgtcatcaggctcacgatggaggcgaatcgacccttggatttggccatggtgacgcgggtgtctttccatagcatgcgcttatggaatgacccgttgcgtcggcggttgcgcttggccttgtgcgcgtggggcgttctgccgggcgcggtataggagtcgtttgctgaatttgcggcggaatcggctgcggagtcggtcgcgggcgtaaggttggtcgtttcggtgaaatcattgagatcggtcatactgcttaccgctccagatccttgatatccatcgggtgctcgttcacttcgatcgatttgacgcgcgcgtcatgcatgtggatcacacggtcggcaatcggcgcgatggcggaattgtgcgtcacaatgaccacggtcgcacccttcttacggctctgatcctgcagaatctgcagcacctgcttgccggtgttgtagtccagagcgccagtcggctcgtcgcacagcagaatcttcgggttcgtggccaccgctcgggcgatggccgcgcgccgctgtccgccgcccgaaagctgcgcggggaagttgttgatacggtcctgaagccccacgtcgataagcgcttgggtcggttcctgcgcgtctttcatgatttcggaggcgagctccacgttctccttggccgtgaggttggccaccagattgtaggactggaacacgaagccgaggcgttgcgctatgtcaagcgtgagtatgcgttcttcgacgcactgtcccgttcgggcaacgatatgcagatgtatgaccgggtcaaggatgtgttgaagcagatgctgcttgggcaggcggcccgtgtgggtgccgagctgagctacagcggcattccgcacgactatgcgctggaaattctggtctccgccgtctcatcgattatctggctatgggtccggcgcggctgcaaggaggcgcccgagcaaatctgcgccatcatcgagaaaaacaaaaccaccgcgcccgtagacatcatacggtaagcgcggtggttcgtgtcggaatctggcccccctccctgagaggagtcaatccgcaggagaaatcggaaacctaaaactcagacagccagctcggccttgagttccttgaggtcggccaggatctcatcgtggcacttctcgttggtgtcgaaggcaaggtggcagaaggcgcactcgtggccttcgcggttctcgtggcaagcgtgcaggcaagccttgcccccgcactcttcggtgtggttgtgctcgcagccggtgtcgtcgcagcagtcgccggtgaagcagcagccgcagcggccacaggcggccacgccgtgctcgtgcttggtggcgtcgaacttggccagcgtgtccttgcagacggcgaaggtgccctcttcggtaacgatctcgtaagcatgctcatcgatggtcttgatagtcattgttgttcctttcagcgtttgttcgtctgcgactgtagggcggcagacggcagcggcgaaagttggtgaaagtgattatcaggcccattgctgctattaagagcaatgagacctcatgcagttttgtgtcggtaacgggccgattgttggccgagtgtcgacgcctggtataggtggtggcggtaccaatccaaatattggtggaacgacgacgatgagcgtgtctggcgtcggtgctgcgccaagcgttggcaatctaacgatgcgagtggagcttatatcgtcgctattgcgccaaggattggaagggcaccgatgctgaaggccagtagcgtcgggactgcgccattatttgttcgagcgccgacggccagtatcgtctggcgtcgtcagtggtccatcctttggtgaggtgccgacgctgagaggcggttcgatggcatgcttcgccgcacacttggggcacaggtcgaaaatctccagttcgtgggcgatggtctggtacttcaactgcttggtggctttgtcgatccactgctcaagtccgggaatctcgatttcgatggtccgcccgcattcgtggcatacgatgtgatggtggtgatgctggtccgagcactcgcggtagagggcctcgccgttgacgtggattacgtcgagctcgccttgggaggccatcatctgcacattgcggtaggcggtggccgtgccgatgcgcgtgccgcgctcgcgcaggatgtcggtgatttcctgggccgtggcgaatcgggatagttccgccaggacctgggtgatgaggagtcggggtcgcgtcacgcgccgagtggtcgcggtttgctcgatgctcatgacgttctgcccctttctgttaacaaatgatattcattatcgttattaaagcaaatcagatgcccgcatgttgtcacatgatttgaatcaactggcagaaatcccgcgtttcaacgaggcctgcgcgggatttctgccagttttgagccctataaaggcagagcccccgcgtacctttcgttgtaacgcgggatttctgccgatatggggcgagtcatggcgcagcgcagtgctttccatttcgggagacgcgtcatttactgccagtagaagtagccggtcggggcggctgcggctttgctgaccgaccggacctgcagtataaggccttggcgctcgtggccggcggagccgtagacgccctgcttgatgacggcgtcgacggtgacccagtcgtgattgtgcggggtgccggccttgccggagctggctatgaacccgaatggggtcatgtcgagaatgcaacaggacatgaactggcgggacagctcgaactcgtccgcgccgaacgtacgcgacttgctcacaaacccggtgacctgcacatggtaaccgacgtaacgctgcggattatggtcgatctgctcgaaccatgagccgaattcgtcgtcgctgatggtcagggtcttgttcgccgtgtcgagtccgtgcagctgcgaggcgccatcaggcttgtgcgagctgcggggaatggcgatagcgcggccgccggcgtactcgtcgaagccgccgctgccgctgctgggctggaacggcacggcgatcagcagcgccggaataatcaaggcgatcaggaaccgtaaaaccgaacgctccgtggcgtggaacagtccgagccatgctgcggtcgccagcacgaacagcagtaccgcaccgatgatgagatacggcagcgaacgcggcgtggtcagcgtggtgtatgatccgcccaccgccgcataggcgatggccgcgcccagcgccgcgaaacacagcgcctccacgcggtcggggagtgtgactttgcgcttcatggctacgctcccatcaccagatgggcggcaatcgcggcgaggaagcaggccgccgccacggtcgcgatgaaccggatgatgaaccgtggccggcattccgtggccagcatcagcgtgttcttgaggtcgagcatcgggccgaagaccaggaaggcaagcatggcggagaccggcagcgcgccaatcatgctggcggcgatcaccgcatcggacgtagagcacagcgaacacaggaacgccagtcccatcgccgccagaatcagtacgatggcaccagcgtcatcgagcgtgcttgaaccgttggtcaacgacgacaatgcggtgcgcatgatggaggcaatgatcgtgccgaacagcagaatcggcatcatccgcataaagtcgtcatgcgtatgccgaatgaaatgcgtgaaccgctccaatccgcgccccgtgcccccgccggcgggggctgtcggcaaagccgactgggggtggctctcaggcgaatcacccgtcgcccctgcacaatcctcgcaaatcaacgaccgcccaatcgtcagcggcctctcacgcaccgcaggggagcggagcggccacaccgcgaacgacacccccgcgactatcgccactaccatgcccaaccccatgcgggccgccaccatccatggtttgtcggtgaatgcgaaccatgtggaccatatcgccatcggattcatcaccggcactgcgcacagaaacgtcaccgcacacggcagcggcaggcgtttgcgcatcagattcgcgaacgtgggcaccaccatgcaatcgcacaccggtaggcacaggccggccgccaatgccgcggccagtccgccggccaacgatttcggtatgtggcgggccagagaatcggtgctgacgaacgtgctgaccgcggccgacatcatcgcgcccagcagcatgaacggaatcgcctgcaggataagccccgcggcaccggtgccgatacgcaccagcggaaccggaaacccacgcgactcgagcatcgcggaagccgcaatcaggaacgccaccagcggcgtgccgataatcagaaacagatagttcgccgaatggtcctgttgcgcggtgttcacctgttccgtgcgctgcgtgcgaggttctttcatgcgaatatcacctgccatatcgccgtcatattagcaccgtacgcatgatagtggtcgagataatatgcgagttccccgcataccgatggtacacatcgatatgcggggaactttgcacatggttgcctgggccgatggcgaatcggtgggccagcatctcggtggccacttcctccttgctcatggatgccgggtaatacgtgggccagttgtccatttccttgagggtttcttcctgtcgttgaagtgacgttgcacggtggcggcggtggcagaaccggccccggccttgtccgcgtagacggcgttgatggcttcggcggccttcagcacggcttccgggctgaaccacaggtgcgggttcgtagcaccatggtggtgatggcggccttcttcgccctcggcgtggtcgtgggaatgctcgtgctcgtcggtggcggtgacgcccatgaggccgcccacgttcacgatggtctggcgtttcttgtcaagctgcgccttttccgcccagccgtcgtagccggcgccgttgagcaccacgatgtctgccttggcgagcttggccagatcggatgcggtggcctcataaaacggcggttcgccccggcaggtgacggcatacggaaggaaatgggagaaagaacgtacgccgccggcctgtggagcggaccgtcgagttgttgttgcgagacttgatggattgcggaatccacgatgttggttatggcttcatatacccctttcgtacggctgcggccagattctgcggaacctgaaccacttcgccttcaggcgttctgaccgtggccagctgaggcaccttggccttccagttggctcggcgcgaatgcgtgtttgctcgggacgccttgtacttgggcagtgccatcagccttgcctcgccttccagtgggggttcttcttgttgattacatacagatggccgcgccggcggacgacataggagccatccttgcgggccaatgagcggaccgatgccttgaccttcatgtccgttcctttcttcttgtcttacggtctttgcggaatgtgcggcgaatcacttgcgcccgtaacgagcgttgaacttctgcacctgaccggcggcgtcgatcaccacattcttgccggtgtagaacgggtggctgtagctggacacctccacattgacgagcgggtaggtgttgccgtcctcccagtcgatggtcggcaggtttacggccttggccaccagtgtggacttggtgaggaagtacttgtcggcggagcggtcatagaagaccacggggccgtattcggggtggatgccctcttgcatggttatggacctttggttgtgtggtgttgtgtggtgatatggatgagaatggcgtcggacgcgcgggtggaatccggtgaattgagatggcctgagacggcctgacggccggttgtgccggcccgatcaccagctggatttcaccacgccgggcagtttgcccttgtgtgccttctcacgcagattgatacgtgacaggccgaacttgcggttgtaggcgcgcgggcggccgtcgatggaatcgcggttgcgcagacgggtggggctggcgtcgcgggggagggcctgcagcttgcgcatcgcctcggcgcgttcttcggcggtcagatgagggttgacgctgtcgcgcttgtattcggcgcggcgttcggcatacttggcgaccatgcgttcgcgctgcaattgtcggttgatcttactggttttggccatgtccggctccttgataaggctccggggcgcgggaatcgcgccggccggagctgggacgagtgcattcgttcattgggcgcatgccgcaaggttcggaagatgagttcatgaaatggtgatagaggaaaccgccggaatgccaacaaggaaacgatttcggcgggtgcttaagcctcttcctcgcctcgcgactggtgtccaatgaacgaacagatggattagcgggtctctcggaagagcacccgtttgcggactaccggatcgaacttggtgagctcaagacggtccggcgtattacgacgattcttggtggtggtgtaggtgaatccggtgccggccgtggacttcagggtgatgaccgggcggattgcggaggatttgcttgccatgagtggtgctttctatgtgtgggtgtcacgctgttatgtcacgtatgtcgcgtacgtcgcggtgccatgtgggtgatgcagctcgttagcgcggtttgttgcgcggttacgcgccggcacagtggcgggcctactgactgcccgagcatgggggtgatgccgtggccggttcagttgacgttctgatcgcggcggatgcgggcgatcgccgcctcgatgccgatgcggtcgatggtcttgatgcccttggcgctcacggtaagcgtgacgtgccgctgcaaggacggcacccagtaccgcttggactgcaggttcggggcgaaggttcggcgtgttttcctgtgcgagtgggagacgcggttgccgaccccggcgcgtgttcccagaatttgacatgttttggacatgcctgcaactatatcataatgataaccattatcaaattagaaaggctgtcatgattcatccggcattgcaatcacagggaaacgcggaggggcgcacgcccgtggtgctgctcaccggcgccgaccgcctgagcctggactccgtggcgttctcgttgatcgattccttcccgtccgtatgctcgattgcttatgacgtgcgcccgaacgaagccgtggaatccggtctcgatatcgtgcgcaacgtcgcgaagccccaggcaagcggggtggtgttcggcgagtccgattcgttcgggctcgaggggtgctgcatgagctgcacggtcaaacatgaccttgaacggacgctcggatcgctgcaagggcgggccggcgcgtttctggtctcgctgcctgtgggccttgaggccacgccggtcgcgcagtatctggccgattccttccgtctcaacgagtggggtgagtcgatgttcgtgggtgcggtggccaatgccgtaggccttgacgaattcgaagagcgattctttgacgacgaccgtttgtgcctgtacggcatgggcgaggagaacggcgtctatgacgagcgttcgaccggcgtagtggtctcccgcctgatccgtgaggcctcgtgcgtgctcgaattgccggtcattggtgccggttgcctggcacgccatttggatacagacggggagtgcgcctgccgcgacatcatccgtgcaatcgccttgcgtgatgcgctggtctgtgaggatgcccacaccgtggggctcgtcgacctggtgcaggcgtcggtctgtgccgtgatgccgttgtgacatgtgcggcaaacggcagaacccccgcgtccgaacgaaggtggcgcgggatttctgtcgtttccgaggccttaaatggcagaacccccgcgcgggtatcgttcggacgcggggatactgccgtttcgtctgccgaaaacggcgggatcccgcgttgtcatcgtcggggcgcgggatttccgccggcagcgcgggtgtgcgcgtgcaacacgccgacgtaaatgcaaatgataataattctcaatacatgttattctgtcgtgttgggggggcgggcgatgatgcagcaacagcagcatcgcccggccaaacagccgaattagagaggaaaatccaatcatgtccatcatgtccaacgccaagcgcgcgctcgccatcgcggccgccgcggcgaccctgttctcgatggccgcctgcggttccagcaatgccgccggcaacaagtccgattccagcagcgccgcgtcttccggcaagatcgaggtcgtcgcctccatcaaccagtggggttccgtggccgaagacctcggcggcagcaacgtcgaagtcaccaacatcatgaccaagaccaacgttgaggcgcacgattacgagcccaccagccaggatgttgccaagttcggcactgccaaggtggccgtggtcaacggcgccgattacgacccgtgggccaccaaggccgcccagtcgaccaaggccacgctggtcaccgccgccgaaaccgccggcatcaaggaaggcgacaacccgcacgtctggttctccgccaaggtgcgttccaacgctgccgacgccatcaccgccgcctaccagaaggccgacccgagtcacaaggacgactacgccaagctcaacaaagaatggcacgccaaggaagaccagcttgagtccaagatcaaggagacttccgccaagaccgagaacctgccgtacgccgccaccgaatccgtggcctggcacttggccgacgacctcaagatgaccgacgccaccccgaagggctacgcccaggcttccgccaacgagagcgagccgaccccggccgacatcaaggacttccaggacaccctgaagggcggctccatcaagatgctcgtcttcaacagccaggaagccaactccaccaccgaccagatcaccggtgccgccaaggacgtcaacgtgccgatcgtggagctcaccgagcagatgccgaagcagtacaccaacctgctcgactggatgagcgcactggtcgaccagttcgccgccgccgtgaagtaatgcggcggtagccggcaatccgcaacagcaataaggggaataatcaagtcagatagcgaggcgttgcctaggggagaacagaacgcttcgctatcagggaaggctccttatatatcagggtgcttcggggatgtcccgaggcaccctttgcgttagggtgaatagttaggaaacggtaagaaaaatagtggaactatggattttccaagcttcagcggcaacaatatgcccttgaaaagtcacatacggaaacaggcgaatgagcgagaacactagtagtatcaccacagtgaaaccccatttcaagctttgggtcaaaaaggccgaagccaatgaagtcacgccccagcacccccacaagcccttccccggctgggcgtacggcgtgctcttcgttatcttcgacattattgttgtgacggcgctcgaagtgggcgtttcgtccagctccacccgtgtgcaactgtccagtccgaccgtcggattcggcttcgtgagcaagatgtggaccgacggcaatttcgtattcgtactcaacgtgatacttgtcgcgttgctgtacctcatgttgctgatgctgttcaacagattctggacggcaagcatcgtgattcttgcggtcggaatcatcgtggccgccatcgaacatttcaaggtcgagatccgttacgaggccattctgcccgccgacctcggcttccttggctcgaacaccggcaatatgctcaccttcattccggccggcgcgcacgtgaccatcctcgtggcacttggcgcgttcgccgcgctgctcgccctgattctggtgctgcgccacttcgacgggcgcaaaggtcgcatgatccgtacggacaacctgagcctgaacctcacctcccgtctgattctgctgctgctgccgattctggtgttcgcgttgtactgcattcatgtgagcaccaccgattcgctggccaacaagttctcccgcgccttgggggacacgccatccatgtgggattccgtgtatgacgcgcagcgcaacggtccgctcgtggcctttacccgtcagctcaacccgaagatcatggacaagccgagcaactactccgaggagaccatgaagaaggtcgccgctcgctaccagaaggaagcggagacaatcaacgcctcccgcaccaacaacctcactgattcgacagtggtgtacgtgctgtccgaatccttctccgacccgagccgcgtgccgggactgaagaccaataaggattcgatgcccaacatccgcaagatcaaggcgggcaccacctccggactgatgctctcctccggctacggcggcggtacggccaacctcgaatacatgggactttccggtctgagcatggccaatttcgattcctccctgtccagcccgtaccagcagctggtcccgagccagcattggacccccaccatcaaccagatgtggggtgcgcccgccaactcgctcggctaccatccgtacgagtccagcatgtactcgcgcgctacgaactacaagaagttcgggttctcgcacttctacacgctgaccggtccggacgtgatcaagtatcaggacaagattgacgagtcgccgtacgtctctgataagtcttcctatgattctgcgctggaaggcatcaggtccggcaagacgaacaagttcattcagatcatcaccatgcagaaccacatgccctaccacgagtggtatgagaacaacgactacaccgctgaatccaccacgggtacgccgctgggtgatgatgaacagcagtcgattgagacctatcaaaagggtgtggagattaccgatcaggccactcaggagttcctgaacgaactggatgcgctggataagcccgtcaccgtagtgttctacggcgatcacttgccgggcatctactcgtccgccagcgaggatggcaacaactccttggccctgcacctgaccgattacttcatctggtcgaataaggcttccagctcccaaggcaataaggcaagcgatgcagcctactcttcgccgaacttcttcgtggcacaggccgccgatcacatgaacgccaaggtcagcccgtatctggcgttcctgaccgaaatgcattccaagattgccgctatggaaccgcctgtggtcaacaaggtccaaggctgggatcgtattcccgaaggccagaacatctatctcgatcaaaacggcaacccgatgtccaccgatgacttcgacaaggaaaccaagcagttgcttgccgactacaagctcatccaatacgacatcaccgccggcaaaaactacctcaaagacacagattttatgacgttgccgtaaagcagacagcccggccgaaccgtaaagcggatagctcagtgggctatccgtaggtgaggggagcggctgtgccgcgacggaaaatccggaggattttcggtctgtaggcaacgtgcgagccgacaggcgagccagcaaaacgcgggcgaagcccgtccaaaattgctgtaccgttgccatagtgctgtgagctccctctgatgagggagctgtcgaacgaagtgagactgagggagagatcccacagaccaatcactcccgccttacaataaagccatgaagcgcatcgatgtgaatcatggctggcggttccgttcaattggcaaggaccgcgatacggcagcgcggcagccagtcacgctcccgcacgatgcgatgattcacgagtcgcgcgaccctcgcgggccgcacctcgcgattcatcgaacgaggacatgacggcgtggccagctggtcatgggcgggctatgagggccgcgacgccatcgtgcatgtcaccgatgaccgccgcattgtggttgatgcaggcgggcatatcgccgtcggaccttctgccgaagctgtggatgtggaggtacaagtggactctgtggccgcacaacacgacctgcctgccaatgccgaactgctcggcgtggccagcgccaatcccatcaccgtcgatgaactcgccgacaatacctgcaccacctacttcggccgagcccaagctatttggcgaataccagccgaaacgtctggtattgcctgcagcacaaacgccctcatgccatcgtcatgacggtacgataggtacagtcgatgcccggaaaaccgacccgggcatcctgcgggaaggatgtgccatggtcaatgcggatttcgctcagttgcgtcacgcctacgaatccgggtgtacgcggccattggcttggcgacgggcgcaattggatgcgctatgccgtctggtagcggacaatcgtgatgctttcgtggctgcggccatggccgatttgggcaaacccgcggcggaaaccatactgatggagctgaatctggtggccggcgaggcgcagttcgtccgcaaccggctcggactgtgggccgcgcgccatcccaaggcgatgcattggatgctgcaacccgtcgccggctggacgatcgccgagcccaagggcgtggtactcatcatctcgccatggaattacccggtgctgttggctctggagccaatggccgacgcgctcgccgcaggcaacgccatctgcctgaagccctccgagctttcgcccaacacctcgcgcctcatcgccgaactcgtgccgcaatatcttgaccccgagtccgtgtgcgtggtcggaggcgggcccaaggaaaccggcgaactgctgaaatgtccgttcaaccatatcttctacaccggcggcgggcacgtcggcaaaatcgtcatgcgtgcggcggccgagcacctgacaccggtcacgttggaactcggcggcaaatcaccgtgcttcgtggaccgtacggtggatatcaatgtggccgcacgacgtatcgcatggggcaagttcaccaatgccggacagacctgcgtggcacccgactatgtgctcgccacgccggatgtggccgaggctctggccgagcgcatcgccgtagccatcaccgaattctatggcgaagatccgaaggcctcgcctgattttggtcgtattatcaacgatcgtcattttgaacgactgtgcaagctattgccggtcggcaccgtgccgtctgaggagccgagctcgccgctggtacaggtggcatcggcggtaggcgcggccatggatatggtcgggcggcgcttcaatgtcgtggctgccggacgcggaagcgcgggggagacagccggtggtggcaccggtagcgcgaacaatgcggcgaagccggcggccggttcgaatacggcagccgctgatagtgatgcgactgcctcggccgctgttgagccgagcgagattcacaaggtgcccggcgtattcgatccggccgggcgaatcgtttgcggaggcaaggtcgatcgcgccgcccgatatatcgcgcctaccgtgctatacggcacgtcaccggatgcgccggtaatgaaggaggagatcttcggcccgattctgccgatcctggtggttgaggatgccgagtccgcaatccgattcatcaacaagcggtcccggccgttggctgcatatgtgctctcgcgcgatcacgaggttcggctgactttcgaacgtcagaccagctccggagctttgggatattcgttgccgttgggtcacctgctgtccagccgactgccgttcggtggcgtgggcgcgtccggcatcgacgcctaccacggcaaagcaggcttcctcaccttcagccacgtcaaaaccgtggttaccaagccgcagttccccgacactctgcgcctcgtgtacccgcccttcaatgaagccaaggccaaactgttcaacatcatcgccaaattcagctagcgtgatatcgctcgctgatattgggtgatggcgttgtcatagtgacgttcgctgtcccggcagccacgtcaatcgattgattcgtgtaccgggccagatttttctgtcctggtatttgatttcgagtcattttctgcttaccgggacaaaactgacgccgaaagtatcgtccgcgtattacgaaaatggcggaatagtgcggttttgcatggaagggaattccaaatattcctatattcgaggtgttcaactgtcctggtttgcgaaaaagagccgaaatcggctaccgggacagaaaaatctggcccggtagccacgtcaatcgattgacatggccaccgggccaaaaatatgcggcagatgcgccgcttctgttacttcagggctttgaagccgatgtcgtggcggtagaacagtccgcgcagctcgagcttgtcgatgatcgcgtagaccttgtcctgagcggacttgatgtccggggcggaggtttcgacgagcaggacacggccggagttggcaatcagaccacccttgtcgtcggaggcgacgccggcatagtagacatgcgaatcctcgtcgacctcgatctcgggcacacgggcacccttgatgacgttctccgggtagccgttggaggcgatgaccacgccgagggtggcattggactcatcccagatgaattcgggggtttcgccgtcgagaatggcggagatgccggcaccgaggtcggaggtgagcttcgggagcacgacttcggtttccgggtcgccgaaacgagcgttgaattcgatgaccttcggtccgtcggcggtggcgatcaggccggcgtacaggatgccggtgaacggcgtgccttcctcggccatgccttcgacggtggggcgcacgattttctcgatggcctcgtcgaccacggactgcggaatctgcggcaccgggctgtaggcacccatgccaccggtgttcgggccttcgtcgccatcgtgggcgcgcttgtgatcctgggagatcggcatcggccagaaatcagtgccgttgacgaagctcatcagggagaattcctggccgtcaaggaagtcctcgataacgaccttggcaccggcggagccgaagcgatgatcgatgaagatgtcttcaagcgcacgctgggcggtgtgctcgtccatggccacggtcacgcccttgccggcggccagaccatcggccttgatgacgatcggcgcgccatgctcgtgtacgtaagcctgagccatgtccaagtctccgaacgtctgatatttggcggtcggaatgttgtgacggtccatgagctgcttggcgaagtccttggaaccctcgatctgggcggcggccttggacgggccgaacgccttgatgccggcggcggcgaaatcgtccacgatgccttcgatgagcgggacttccgggcccacgaacacccagtcgtagccgttgtccttcacgaattcgatgagcgcggcatgattcgactggctcagctgtgtggtgcggatgccatccttgagcatgcccgggttgccgggcgccacggtgacttcgtcgacgctcggcgatttgagtagcgtgtaggcaatggtatgctcacgcgcaccggagccgatgaccaatactttctgacccatgtttttccttcctaaagtctttggctcccctctttgaggggagccggtatctggagctacttcagtacgatttgcgtgtcggtggtgtcggtggtgatctggccgagcacgtaggcgggttcgttgttgtcggcgagcagcttcagcgcctcgtccttgcgggcggggtcgatggccagcaccatgccgatgcccatgttgaagatgttgtacatctccttgtgatcgatgttgccggccttctcaagcacgtcgaagatcgggagcacaggccaggtgccaagctcgatctcggcggccagaccgtccggaatcatgcgcgggatgttctcgatgaagccaccaccggtgatgtgggccacgcccttgaccacgcccgccttgaacagcggggagagggccttgacgtagatcttggtgggggtgagcagcacgtcgccgagctttgcgccgcccagctcggcgagctcagtgtccacggtatagccagcctgctcgaacagggccttgcgcaccagggagaagccgttggagtgcacgccggtggaaggcagaccgataagcacgtcgccctcagtgatggtggaaccgtccacaatggcggacttttcggcaacgccgaccgagaaaccggccagatcgtactcgtcctcgtcgtacatgcccggcatttcagcggtctcaccgccgaccagtgcggaaccggcctgcacgcagccgtcggccacaccggccacgacctgctcaagcagggccgggtcgttcttgccgcaagcgatgtagtcaaggaagaacagcggctcggcaccctgggcggcgatgtcgttgacgcacatggccacgcagtcgatgccgatggtgtcgtgcttgttggccagcttggcgaccatgagcttggtgcctacgccgtcggtgccggagatgaggactggctccttgtagcccagggaggctaggtcgaacaggccgccgaagccgccgatgccgccgaccacgccgggacggttcgtgcgggccacgtgcgacttgatgcgcttgacgacttcgtacccggcttcgacgctcacgccggcgttctcatatgcttttggcatttggtggggcctttctgttctattttcaagctcccttgccggggagccacctgcaaaaagcggattttcgtttgtactaagctccccttgtcaggggagctgtcagcgaagctgactgaggggtagtcgtaaagaccaatgactgaggtgtagtcgaaggaccggccgaacctactgcacgtccggctgcacggtgttgtactcgttgccgatgtacttgctcttgtacagcgcgaattcaggcagacgcacacggtcctcgggcgtgagggacttcaggaagtcggcctcgtagtcgtcgagcgcagtggggtagtcgccgttgaagtaggcgacgcacaggccaccgtatggggcgtcggcgttcagtccgatggattcgaccagaccgtcgagcgaaaggtaggccaaggaatccgcgccgatgtattcgcggatttcctccacgctcatcttggctgcgatgagttccttggtggtggagatatcaatgccatagaagcaagggtacttcagcggcggggagctgatgcgcatatgcacttcagcggcgccggcttccttgagcagctgcacgatgcgcttggacgtggtgccgcgcacgatggaatcatcgataacgataacgcgcttgcctttaaccacgctgcgcacagcagagagcttcatacgcacaccctgctcgcgcagttcctgcgtgggctgaatgaaggtgcgggccacatactggtttttgattaggcccatttcgttgggcaggcctgctgcttccgcatagccggatgcggcggacaatgaggagttcggcacgccgataaccatatcggcctccaccggggattcggcggcgagacgtgcgcccatgcgcttgcgggcggagtgcacgttgacgccatagatatcggaatccgggcgtgcgaagtagatgtattccatcgagcagatggccagctgcgtgttgttggtgtactgcacgatcttgtagccgtgatcgttgaccaccacgatttcgcccgggcgaatgttgcgcaccagctcggcgccgacgacatccagtgcgcaggtttcggaggcgagcacgtaggcgccgttcttcatcttgccgagggagagcgggcggaagccgttcgggtcgagtgcgccgatcatggcgtcttcggtcatcagcaggtaggcgaaaccgccatgcaccgtgttgagcgcttccttgagcttgtccataaaggtgcgctgcatcgaacggcgaatcaagtgcatcagcacttcggtgtcggagttcgaatggaagatggcgccttcgtcttcaagcttgcggcgcagtgacgggcagttcgtcaggttgccgttatggcacagagccacgtcgccgtcatggaagcggaagatgaacggctggatgttgtccgtggtgcccgagccggccgttgcgtaacgcacgtggccgatggcgcaattgcccttcagtcgttcgatttcgcgctcatcgccgaacacctgggtgagcaggccgagtccgcgatgaccgatgagatgaccgttatcgttggagacgatgccggcaccttcctgaccgcgatgctgcagcgcgtgcaggccaaaataggtgagtcgtgaggcgtcggggtggccccatacgccgaagatgccacattcctcatgaatgtcttcgagttcagccgacaagccaaagctcctttttcaaacaggggattaactatctgccaaccctaccaatcggcggctacatcgcgtgttgtggggtggtggaacttgttggggttcgcggacgcggtttaagcaccagatcagttgagtatgaatagtggcttaggattttggcctttcgtcgtatgaatccggtgtttgtttttcggcttcgtctcagtgcctgaaatggctgaagaactcgatggtctcgggatcctgcgactcgtccatcacctcggcgggtgtgccgttctcggcgatgacgccgtgacggagcagtacgatgcggtcggccgcgtcgtgggcgaagctcatttcgtgcgtggccatgaggattgtggtgccttgggcctttaactcggcaaccatgttgagcacttcgccgaccagcatcggatcaagagcagatgtgatctcgtcaagcagcagcagttccgggtcggtcatcagtgcgcgcgcaatcgccacgcgctgctgctggccgccagagagctgatcagggtaggcgctggctttatcgcgcatgccgatgcgttcaagcagttccatagcgcgggtttcggcgcgatccttgctccagtggtgaaccttgattgcggcaagggtcacgttcttgagcaccgacatgtgggggaagaggttgaactgctggaacaccacgccgatacgtgcgcgaatcttgtcctggtcggcacgcgggtcggtgatatcggtattgcccagccaaatctggccgtcatcgacctgttcaagcaggttgacgcatttcatcaatgtggatttgcccgaaccggaaggccccagcaaagccaccacctcatgttggtgaatgtcaaaggaaatgccacgcagcacctgcgtgtttccaaaggatttgcgcacgtcatcaagacgcagcaccgtcttgttgctcacgggggagtcactcgcctcggtgttgatattggtcatttcgctcataccgttcctccgctgagttcgcgtttacgcagacgttccgtgtaccagtcgttcagcaggatgaacggcacgctcatcaggatgaacagcaggctggcgaccacatacggcgtgaagttgtaggtgctggccacgtcgatctgtgcggcgcgcacggcatccaccgcacccagcacggaaatcaggccgacgtccttttgcatggagatgaagtcattcatcagtgcgggcgcgactttgcgcaatgcctgaggaatgacgatcagtcgggtcgtctggccggaggtcaggcccaacgagcgggccgaggctcgctgagaaggatgtacgtcgttaaaaccggcacgcagcacctcggagacgtaggcgctgtatcccattaccactgcaatggtgccgagtaccgagggatcgatacggccgaacaagcctaggccgggaatgccgaaaccgattagatacagcacgacgataataggcacgccgcgcatcacagtcgtgtagatcaatgccaggatacgcagcgggaacagaataggggagcggctggtgcgcaccaatgcgatcagcgtgcttagaatcgccacgccgaccactgcgacgagcagaacgcggatgttgagccataggccgtcaagcacatggggaaacgatttgacgaagtattcgccggagaagaaggtctccttgactcgtggccagccgggggagagcttcaggccgatgacgatgaccacaatgaacacaatggtgctgatcagactggtaatcgtcgattgaatttgctgatgaacacgatattggcgtcgtttgagctcgacctgacttacctcgtgtccgtcaggggcattgtgctgcctggtttcggttggtgctgcggtcatgtgatgaatgtcgctcgcttcctgaatgccggaatggccgggtgtcgcaggaaaatttccgcagcgcccggccaaggtgttgtgaccttatgatgtgagcctactccacttactttttcagttcggtcaggtcggtggtgtactcggccagccacttgtcctgaagcttcttgatggtgccgtcggcgttcaggtcatccactgccttggtcacggctgcagtcagcttggaatccttcggcagcacgatgcccatgccgctcttgtcttcggagtcaggcagacggccgagcaccttggcgtccttgacctgctcggactgcaccatgtacacgcattccacggtgctggtgaccagtgcgtcgatctgaccggcgtcaagtgcctgagccagtgcggcatcatcattgaacgtctggatgtcgtccttgatgttcgccttggcgtagtcgtaggcaagggtgccgaccatgacgcccacggtcgcattcttcagatcggataccttggtggcgttggcgaacttgctgtctttcttgaccacgacggactggctgtcgttgtagtagctggacgagaagtcaacggccttcttgcgctcgtcggtgatgccgaactgctggatgttgagatcccagtccttggcaccgggagcgatggcggtgtcgaatgcggtgcgggtccacaccacgtcgctcttcttgaaaccgagcttgtcggccactgcgtaggcgacggccgcctcgtagccctcaccgctttccggcttgtcgttcataacccacggctcgtaggccggctgtccggtggcgatggtcagcttgcccggcttgtacgtctgctgggtgatgtcgttcgaatcggcggaattggatgcggtggactggccggaaccgcaggctgcggtgaacgacagagccaggatgctggcggtggccgcaatggtacggacgatgtgttgcttattgaacatgggcttcctctcctcaagtgttcgtcatgcacacggttcaaagccgtgcttgatgcatgcgcgccaattgtatggctattgggttactacaaaacagcgatattctcggatgctggttatctccattgcttatggccggctagagccgcgcaatctggcgcgtaagcgaacgaatatctcatattggcgcagagcgaaatggcgttcactgttcgagtgtgaagccgtcgaatacgaatcccggactgaccacacaggagaccagcgcatcgccctggcctggcactgtgcgctgccagacgccagccggtacgaccgcatgtcccgatacggttacgtcggcctgatcggtggtgatgccggaacccagggtgattacggttcgcttggattcgtcggattccggagtctcgccgctgccgccgagttccagcttgaccgatgccgggccatgccacagccagacctcatccgcatcgaccttatgccaggcgctggcatctccctcgggcagcaggaagtaaatcagtgacgatagcggtcggcttgaggcctcatccgtgtgcggggattgccagtcacgcgtgtaccagccgccttcggggtgggcttccagtccaaggcgttccactatggaccgggcgtatggactcatgtctcgcaaagcgacgctcataatgagatctcctgttcttggcgggtttgctggtttttggcttcttgatatcaggtcaggtcaggtcagcggtgtcaccaggcgttgttgtaggcttcgcgcccggatatcaccgtggctcggttcgtgcctgcgccgtgcttcaccagtgtttccagcgtttcttcgatgccggccggagatgatgtgtcgacggggatgtcgaagaacgcgaaatcagccaatgcgcccgcgttgatctgtccaatgcggtttcggcccacgtgcatgcccatggaggcggcaccgcccagcgtcatcatacgaatcaggcgatgtgtcagatcgtcgctggcatagccttgttcgcgggccaggtcgtaaagcatcgacacgtcatcgagcagatcgagggtcggcgtgctggagagcgaatcggtgcccacgcttaccagattgccttcctcgaggtattcgcgcaccggtgcatctttgccggtgttggtaatgcgattcgatcgggggcacaaggccacgcccacgccgcgctgacgtagaatacgccgatcctcgccattggcccacacgccgtgtgcaatgtgcacatccgggccaagcgagccaagctgatcgacgaactggatggcggaggcacctttgcccacgtccttgagctgccggtagctttcccaatcgtggtcacgccagtcggacgccgaataagtggtgagcaccggcggataagtgccggcctcgagcggggtctccgccagatggatatgcagtcgcatgttcagctgacgagcaatgtctggaagatcaacgaacggttcggactccagcgtatacggagcatgcgggctgatgccgaggttcggcagctgctcctcgttcatccggcgcaactgccggatgagctcggtgcggcccttttccatccattcgtcgttgtgccagcccattacctcccaataagcgatgccgtgcatgccctgcgaagccagcgcgccggcggcgtccaaatcggtgacgatgtctgcggcggccgtcgttcccgactcgaccatctggcgagcaccgtcctcggcccactgcttccatggctgggtcttctgcgcctcggcgtacacctcgttgaatgccagttcccaggcgcggaaccgatcgtaggtgccttgcccgacctgcaccatgccgctgtactgcagatgagtgtgcgcgttgaccaatccgggggtgagcaccccatcccaatgccgttcacggatggtgccgtgagacgtcatttcctgcttcagcgcctccagcacccagcggcgtttacctacatgaaccacgcggtcgccatgtatggcaactgcgccatcgatgatgacggggcccgtcacggggatgatgagtttggcggaatacagtgtcacatcatcgataagctcggtatcgacggtcggccaggtgttgtcggtcatattctcctcgctgcgttgtgttcggcgccgtgtctatggctatcggtcggcgttctctcggtcgttttccgcgaatctggtcagtcgccaatcgtagccgttgtcctccacggcatggctggctcggtatccgcgcgccttgagcgcgctggcggcgatgcgctggtcggtcgctgcgtcaagtctgataagcgtgtgatccagtgtgcctcgatgttccagaagatatgcgacggcgctggcctgtacggcgaagctcagatccatgatctcgattggattgccgcctcccaccgtgtagttcacgccatcgccgtcggcgattagcgtgagcgttggtccgtcgggaacaatgagttgcgcggtgtccctgttgacctgtggggtgaagtcgcttacctcgtccaaggcgatttcgttggcgatgccgccgatcactgcgagcgccgcgccctcgtgcattgcgcgcatgtgctcaagtgtgactgtatgtctcacgccagtggcggacaccaccatatccgcgcaagggagtgcctcgtcaatgtcttgtgcggcgaagccgtcgaacaccgctttgagtgaagccactggatcgatatcgcagatggtgacttcggctccaagcgcgcgaatacgccgtgcgaagccttggccgaccgggccgtagccgatgacggtgacgttcttgccgtcgaatgcatgctcgccgagaatgcgctgcatggtggtcacgcatgtctccccagtgccgtgggcgttgtcgaatccggttttcagcacactgtcgttaacggctacgaccgggtaggtgagggctcccgcttcctgcatctgctggaacgcgcgtacgccactggtcgtttcctcggccactccaatgagattcgccgtgagctcggggcgttcgagcgaggcgaggcgggcgaagctggcaccatcgtcgatgatgatgttcggctgtatcttgtccagcaggcgcagggctgcctcgtgcgcctgttccgcggtccaggctcggctggattcgaccgtgattccttcccggcgcagctgttccgccactcggggatccgtggaatccgggccgcaatatactccgacgattgcgccggcggccttaagcttgcgcagcagaatcgcggtttttggctccagtatcaggcagacggcaatacgaatgcctgagaaatcgacgcgggcggtgaggtcatccatggtgtcgcgtaataccggcatgtgctgttccgcgtactccattgcctccagcccacttgccgtgcgcatgtcggcaatggaatcaatgctttgtgtgccgtcacagaggaattcctcgctatgcccgtcggtcatcgtggcatcttcgacggtcatgccccattgctgggcctgagacttgatttcggcatgcttctgcggctccggaatcgcgaggcgggctcctgccagtgatcgattcgttttctgggatcgggctgccgcccacgccgcaaaatcgctgtctgccgtaatgcttttcttcatattcccatggtacgcatgcatgccgctgctctgccgctgctctgccgctgtgcgtgtggtgtgggtgaagagcgtgcttgggcgcgttgcgtgcgtcgacttcggcagcttcgaacagacatgttgtatcgaacaaatgttcgaccgtattgatatgctggtcgggccggcggtggtaaggaggtgatggcgatgggcagcggaacggtatcgacgcaacgcgagcatacctatattgccattgatctcaagtccttctatgcctcggtggagtgcgcggcgcgcggactcgacccattgaccacgcatctggtggtggccgatgaaacccgcaccgataagacaatatgtttggcggtctcaccctcgctgaagaactatggcattcccggtcgtgcgcggctattcgaggtaaaacagcgcctgaatggagtcaacatcgagcgcgcggtccatgctcccggcggccgattaatcggggagtcctgcgatgcg

SEQ ID NO: 2048 - DNA, 5310 bp, Unknown
  R17_18m  MAG No. k141_46338
cccccccactcccatatccatatcggttccgtcggcgcatggcggctgcggccgggaagctgccgtcagagtccgaacacgcgggtgacgaaattcgtcaccgtcttccagtacaccaccggtgccgtgctggcgctcatggaatgacctgccgagggaatcagcagtttctgccggtcgatgctcgcgcaggcgtcgaagttctcgtccaaagccctggacggcacgaaatcgtccgcgccgccgtggatgaacagcatcggaatcgtggcatgcttcagctgttccacgcacgaggcttcctggaaaccgtacccggcacgccgctgcgcgatcgcccccatcgtcgtcacgatcggcttggcgaggaacttcggcaggtgaaacatcgaccgcgcgcagtcgatgaactgctggccgaccgacgcatagccgcaatcctcgaccgccgccacgacgttcctgggcaggtccggctcgccgacggtcatcatgaccgcggccgcgcccatggacttgccctgcagcaggatgcgggcgtccgcgtcgctgccgatgatcagcgatatccaccgcatcaggtcgcggcgatccagccatcccatgcccgcatagcggccttcgctgagcccgtggccgcgcagcgccggaaccagcacggtgaacccgagacgggcgaaacgatgcgcgtacttcgccatatcctgcggttgccccgaatacccgtggcagcatatcgcatacaggtggggcttcgcgccggcgcaatcgggatcgaacagccagccatgaagctggatgccgtcctccgccgagatgaccaccggctgcttggactggtcgaaccaatccgccgcctcgacctcttcggccgcgtcgaggcggggtcccttgtccgcgactttgccgtcatccccgccagatctgagcatcgagtgcttcgcctgcgcatccagcgcatacgagaacatgagattcgccagcccgtaagtggcgccggctaccacggaggccgcgattccgcctcccactactatccgtgatgtgttacgcgccattgcaagcctcccagccgattcggtgcatgtcccattgcgtccattgtagggcctcgccggggtcgatgacggcatgacgacgaaacagccgggcggatcgggcgttcgattcgtttgccgggatagacgttccatcgaatgtcccgcgcggccgtataattgtttctcgttgctttggcgagggcattccgattcgcgagaacgggtctgccgtaatcgactcggcgttgaataccacccctccttggggagttctgcggcgcgtcgtggcgtcaaatagacagaacgacaagtaacactcaaggagaaccattatggcaaacaccatcaagatcgccggtgacatccgtgacgaattcggcaagggcgctgcgcgccgcatgcgcgtggccaagctcatccccgccaccttgtacgcgggcggcgaccagcccacgttcgtgaagctcccgatgaaggagaccacgctggccctgcgccacacgaacgcgctgttctcgatctccttcggcggccagaccaagctggccgtcgtcaaggatgtgcagcgcaaccccgtcaagcgtatcgttgaacacatcgacttctacgaggtcaaggccggcgagaagatcgacgtcgaggtgccggtgttcgtcgagggcacgccgaagggtgccgccgtcgcgttcgtcgacctgcaggagctcaaggtccgcgccgatgtcaccaacctgcccgagcgcatcgtggtcaacgttgacggcctgaccgacggcaccaaggtgctgctcaaggacgtcgtgctgccggaaggcgccgagctcgacatggacgatccggagacctccgtcgtcagcgtcgaggtgcctgaggacaccaccgagtccaccgccaccgctgctgccgctccggccgctgacgccgacgccgctgctgccgctccggccgccgatgcggacgccaagtgatccgtctcgcatagcacatcggattcccgcgtgacacacgggagtgacgcttgagaaaagcccaccacaagcgtgggcttttttcataatgtgaacgagctcacgccgaatgcgtcatcggtgtgagaaagtatctctcagagccggtgccagaagcgccgactgccccatctggccgccgtgacgcaaacggcgacgttatcaaagaagtggttatgacagaaaacaatcatcacgattccgccgcgctggacaagctcaccgagccgttcaccgtgctgccgaacgacaatcccgcatccgacgcgaagcgccaggagctcatcgacaagccggcattcggtcaggtcttctccgacaacatggcccacatgagctggaccaagggcgagggttggggcgaccgtcgtatcgagccgtacgcgccgctgaagctggatccgggcgcatccgtgctgcactacgcccaggaggtcttcgaaggtctgaaggcataccgccacgccgacggctccacctggctgttccgcccggacgcgaacgccgagcgtttccagaactccgccaagcgcctgtacctgcccgagctgtccgtggacgacttcctcggctccgtggcggccctcgtcaagcgcgacgtcaactgggtgcccacccgccgcgagtacacgctgtacatgcgtccgttcatgttcgcctccgagccgttcctcggcgtgcgtgccccgcacgaggtcgactactgcgtgatcgcctccccgtccggcccgtacttcccgggcggcgtcaagccggtgagcatctgggtggaagacaagtggttccgcaccggccccggcggcaccggcttcgccaagtgcggcggcaactacgccgcctcgctgctcggcgaatacaccggcatcgacaacggctgcgagcaggtgtgcttcgtggacgccgccaccaagacctaccttgaggagctcggcggcatgaacatgatggtcgtgcacaaggacggccacgtggagaccccgtccctgaccggcaacatcctgccgggcgtgacccgccgctccttgatccagctcatgcaggatcgcggcatcgacgtggtcgagacgatgatcaagctcaccgacctgctcgacgacatcaagtccggcgaggtcaccgaggtgttcgcctgcggtaccgccgccatcatcaccccgatcggccgcttcaagtccaaggagttcgacgtgaccgtggccaacggcgaatccggcaagctcacgatcgacctgcgcgaccagctgctcggcatccagctcggcgaggtcgaagacccgcacaactggatgtggaaggtctgctgagcgcagtccagttctacgtgaagccccgcccatcggctcgatcgagcccggcggggcttttcgtatagaaccagctcccgctggcgggagctgtcgagcgtagcgagactgagggtggtgtttatatgcccataaggattgcctgcggcagctgcgttgccgtcatttgcacgcagtcatcggcaaccatgatgactggtggatggacaacaagccggcgctgaacctgttcgagaacatcgaaccgaacggcaccgttgaactggaaggacttggaacggtcaacctgtcgcacttcccatatcgcgaagaccacgcgtacggatggcccgatgacgcggtccgattccacgatcaggcgctgccgttcgacgggcgcaagctgctgtacggtcacacgcatcagctgtctgccgcgggtgcgcggccggaatcgctcaacgtcaattctgcgcggactgccgggctccggcaagtcgacatgggcgcagaactgggcgtccgaccccgccaacacgtggctgcattgcgtgatctcgctcgacgccggctgggatgtggtcgccgacgcgcagcatgcgaacccggagtatgcgaatgagctggcgcggctcgccacacggcacggggcaatctggcggatggaggatttcgacgtgcccctggacgagctgctgcgccgcaacgaggcccggccgcgcgccgaccatgtgccggaggagtacatccgctcgtcgtggaagcggttccaccacgtgatgttccgcccgctcaatcccgaaaacccgaacggcaacctgcttaaacgcatgatcgccgacccgtacgtccgggtcacaccggtgcgcggcgagagcgacgtattcgcctgcaatttcactcgagaggcgttcctcgaaggacgttggaacacacgcacgatcaacgcccgcgggctctgaagtatgacacggtggtcgcgcacggcgacacatccccgggatcgttccccgtgcgcgtggagcgcaaggagaacggcatcgacctgacctatgagcgacagacgttcaaggaacgcgacatcggatcaaggtcggcgagatcctgacccggatcggagccgattctagtttcgggtagccggcttgcggtaggctcatgtacggccggatggttgtgatgttggcgaggagtggcgcgtggagggactggcactggaaagcaatgcctttttcatgggcatcgaatatcttgcggtgttctgcagcgggctgatgggcggtctatgcgcggttcgcaagaactatgacctgttcgccatgctgatcaccgcgtggctgaccgcgttgggcggcggcatcatccgtgacgtgatgctcggctccctgccaccggtgggcatctccgaccgcgggttcgtgctgaccgcactggtgtcgggcctggccatcgccgtgatccatccggaagtggacaagctcaaatggtcgatgctgaccatcgacgccttggcggtcggcttgttcgcggtgaacggcacctcgaaggcgctcgatttgggaacctccggcatgacggcggtgttcatgggcatgttcaccgcgctgggcggcggtctggtccgggacatgctcctgaacgacgtgccgatgatcatccgcgacaagcacctgtacgcagttccttccgcggtcggatgcgtgctcaccgtgttcatgtgcaggggagtgcagtggaaggtgctggatttcacggccgaggtggtgctcgactgcacgatcgtcgtgctggtcgtggtcatgcgtctgctgtcggtcaagttcaacatcatgcttcccggcgcggtcaagcggcacaacacgtatcttcccagcgagtcgcggtatctgaaacgcccggtcatccatcccgatgcccacgatggcggcgatgacgacaaagaccagtctcgggcttgacgttttcggatccccccccccc

SEQ ID NO: 2049 - DNA, 7444 bp, Unknown
  R17_18m  MAG No. k141_46449
accgtctgcgatatctgatcaaacatcttgcccagcctgatcagcggatagatcatgaaaccggccaatactgcgaacgcgatggccgcgatcaggccagcgatctctccgactcccattgtttcctccttgcggtcacacttactcgcctaagggtagcactccttccctatttcttggcataccattgcacgcgcagggcgaaaaccgtgcgcgtggatgcatgcggctataggcgaaaggtgtcctgctgacgctttcgtttgcggcgtgccgccgtggaccgtacgtgctattcgatatgtattgcttgctatttgctacttgccgtacgaaacgatggtcacggcctcgccgaacggcttgtcggtgtcgaagtcgagcacggttaccgaaccattggccgggcgttcgttcagatcgaggtcagggccgccgaaccggtggccgaggctaagcagtgtgttgccatgcgaaatctgcagcacatcgtcgccatccttgagattcgggttgtcggcgataagacggaacgcgccttcgacgcgcgtccaatattcctcatcggattccgcatcgtggaagggatcggcttccttgagaaaatcacgcgaggcccccaacccgaacttctcgacgatttggttgtaggttttggcgccgtgaggcgctcccgcggcgtaccaggccatggccatgtcaagtccctcgtagtagccgtagaactgctcgcggaagtgcatgtccgtcacgagtgcggggcgcgggttacccgcggcttcgttgatgtcgagaattttctcggccgtctgccgggcacgcgtggtgtccgaacagtaggcggcggtgaacgtcaatcctttcagtcgctcaccggccttgacggcatcagcgacgcccgactcggtcagcggcgaattcgaccatccctgcagacggttgtatcggttgaaataggtctgtccgtgacggaccaaatgcagatgaagaatcatggttccgattatgtcaccattccggcggtttcggtgcgggctgccggaagtcataagtcataacggcataggtcactacctgagatatgcgtaatccgggtagtatacctgacgattcctgagagtacacttagggtactatgagcataacctcgaaacctgcaccatctcaatcgtctgagcctgcccatttcaggggtatcgatggactgcgcgctctggcgattcttggagtcatagcattccacacccgcccgtcgctattgcagggcggattcattggcgtgacgatgtttttcgttatcaccggttttcttgccacacgttcagtactgaacatggtggaccgcaccgggtcctttggatatggccgatatctgatccgccgcattactcgtttatggccggtgatgctggcgaccattgccgtggtgccttggctcacttggatgttcgctcccagcctgttgcagaaagtggtttccgattcgctgccgagcgccttgttcgccagcaattgggtgtacatcttccgcaaggtgccgtatttcgaggcggccggattgccttctcctctgacccatctgtggttcttgggcgtgacgatgcagttctatctgatttggccgttgctgatggtggtgctcggcaaaatcaccaagtccaaatgggtgcgctccatggcgattcttgtcatcatggctgcttccaccgccgccatggtgctgctgtttgacccggccaatacctcccgcgtgtattacggtaccgatactcgtctcgccgagctggccgccggcgcgctgttggctatctggattgcgccttcctcgcgaggtacggaagttgcggaagctggagcggcttcgcaaacagtgcagatcggacgtcaggccggcgacaagacgggcgcccgtctcactatcgtctgcaatgttcttggcaccgcggctttggcggcactgctggccggattctggttcgccaacgggtatctgtcgtacatgtaccaaggcgggtacctgattaccgcgttcatatcgttgtgcgccttggcctgtgccgtgaacaatgactcaatctggtcgcgcgtgctgggttgcgctcccctacgctatatcgggtcgcgatcgttctcgctgtacgtcatgcattatccgctgctgcagttcatgaacccggcgacacgaacgcaggcgttgccgtggtggggttgggttcttgaggccatcgtggtgttggcggcgtcggaagccttctaccagctggtcgaggcggcccgtaaatcggtgcagatgcctcgcagccaacatgccaagccgctgccgaaagccggctaccagctgcgcccgggcgcgtgggtcatgtcggttatcggattggtgaccgttgtggtgctgacgtgggcaccggtggattggaatggcatcgctcaagcgcgagccattcagctgcgccccgaactcgcggcacccgccaagccggtcaagaaaccggcgaaacccgagcccgagtcttctgccacgaatgccgcgaacggcgaaaccaataccgctgacgcgaataagaacggttcggattctcagccgcccaccatcaaaccgattgcggaaaaggtgccaaacaatcttgacatttcgaagtacgcctatgatccggcaacggaaagctgcaacgcggatatgatgatggtcggcgattcagtgacgtcgggtacttcggacgccatccaggccgcattcccgaacgcttttatcgatggcctgccaaaccgtcagatgccgcaggcggtggatgtgtatcagcaggacaccgctgccggccacagtggcagtgtggtggtgtttggcctcggcacgaacggcgtgatttcgaatgagcaggaagtgcaacagctcattgacctgaccggcggcaagccgacatacttcatcaccatccgtatgccatacccgtggcaggagaacaacaacaatacgatgctgcgtgaggccgccaagaagaacaagaacgtgggcatcatcgattggcatgggtatagcgaaggtcatagcgaatacctcaacgatgacggcattcatccgaatatgaccggtgcctatgcgtacgcgacgatgattcgtcaggcggtgtgcggccagtaatcgccctataacgcaggaaccccgcggcttctcgaaagaagcgcggggttcgagcggtatgtcctggatttgttgaccagagggcccggatcagcgggcgtagaattcgaccacgtactggatgttgacctgcaccgggatctcttcgacctccggcttacgggtcacagtggccttcagggacggcaggttcacgtcgaggtagccggggaccgcaggcaacacgtcacggtgcacgccttcggcggcgatctggaacggaaccatggtctggctcttggccttcacctgaatggtctggccgggcttgacgcggtaggacgggcggtccacgatgttgccgtcaacgaggatgtgacggtgcaccacgaactgacgggcctgggcggtggtgcgggcgaagccggcacgcagcaccaggttgtcgagacgggtctcgaggtcggtcagcatggcgttaccggtctggccggcagtacgggtggccttctcgtaagcggcgcgaagctgcttctcggagatgccgtactgagcgcgcagacgctgcttttcgcgcatacgcaccgcgtaatcggactcggtgcggcggcggtcacggccgtgctcgccaggagcgtacggacgcttttcgaagatgcgctgagccttgggggtcagtgcgatgccgagggcgcgagacagacgcacctgacggcgagaacgctgaacgttcgtcattggattaatccttctgtcgttatctgaacggaacgcttgccttgcatatgcctggcaagcgctgagccgggcctccccagcgcttcgtcgtgaacgaacacgaacgggttggttttcttgcgatcacctaccgccgacccgctgatgggctatgactccagacggtatctacctgttggcagacaccagcagaccatattacaccgaggctatggacagcactccggcgtccatgcgatacacccggtctgcgtattcgagtgcatcgggatcatgggtgaccatgagaatcgccgtgccgttgttggcttggtctctgagcagacgcattacgatgtcggtgctctcctggtcgaggtcgccggtcggctcgtcggcgacgagcaggctcggctggttcatcagcgcgcgggcgatggagacgcgccgcatttcaccgccggacagctcgcgcgggtagctgtctgccagatcggcgacaccaagctgggtgagcagcatgcgagctcgggtggcgaacaggtccggacggctcgcagccgtgtttgacggcgtgttttcccggtctgtgattggcgcaatgacatccggcatgaacaggtcggcggctgcttcatcattggtggcagcggcttgtgccacggcatcggtcgacgcaacagcgtccacctgagcaacggcatccgttgcttctgcgttttgggcaaacggcagcggctccggaaacatcgttgcgggcagaatcacgttgtcgagcacggtcaggttgccgagcagggtctggctttgggtcacgaatccgatggtgcgattcctcagcacggacagtgctttatcgcccaagtcggccacattgcgtccagccacgctcacggttcccgaggtcgggcgaatcagcccggcgaccatgttgatcagcgtgcttttgccgttgcccgaccggccgacgatggcgatgaattcgccggcatcgacggtgaggttcacgtggctgacggcgtcgaacggcgtgccgcggcggacgaactggcgggtcaggtccgtcaaggtcagcagatggtccggggagggcgtctcggttacgtgcggcgaatccggcgcagtcggcgcgttcggctgagctggcgtggtcggctggagcttggtcggctcaaccgtggtcagctgagtcggcgtagttgtctcagtcatatcactccccctctcgcagggtcaggtaggcttcgggccggccgagacgccacatggtggccagcgaaccgatgatgccgatgaccgtagagcacacaatggtcacggcaatgaatccgatcaccgcaaccgggctggcttgcagatacggcaattgaagttgtttgccgatcagcgaactgaatgggaaaatcaccaggctggccgcgccgacgccgattacgccaccgatcagaccgatgatggcggattccttcagaatgatggcattcaacatgccgcgcgtggcgcccatgatgcgcagggacgcgaattcgcgtttgcgttcgttcaccgacgaggcgaatacggcgagcagcacaatcacgcccattacccagatcaccgccacgaaaatcttgaggtaggtgacaagcgcggtcagcgaagttctggtgttggcggtgatgccgccggggtatacgtaccccaaatcggcgaaccgggagtcaagacgcttgatgttctcagccacggtctgcgcttcgtaaccccgctgcgtcttgatcatcacggtggagacggcttcgcctgcatattcggcgggcatgacctgcttggagaccttggccgaggcggcgaccatatcaggcacggtgttttggttgatgaacaccgaattgtcgaggctggtgccggtgttggcgagctgggcgacgaccggccacttatggccgtagagttcgatggtgccgtcggtggacacgttgacgtttgcgccggcaatcatctgaccgtcttcaagggggccttcgaactgggatgcgacccatggttcgatgacgaagtcagtgtccgggtcgtaaccgatgatctgcagcttttcggcacagcaggcggcggccagcgatgatatataggtctgttcggtggcctgtgcgatgccgtcggcctgcatgacctcgtcggcgatgtctttggtgaaatagaaagtgctgggattgccgctggtgagcagcgcttcagccttctgcgcggtgttttgcggcacgaccataaggtcggcgcccaggcgcttctccatactggtcattccggtgttgaggttcatggtcagcatggtgccgccgaagaacgtcagcgcgaggatggtgacgacggagagcagtgcgcaggtgcggaacggcttgcgtttgaggttttcaatcggaaggccgcgcaatgcgatatgggatggcacgatgagtccttatgttgcttatagtgcggttgcaataagcgagaccggagtccagcgttcggaatggctgggctccggccgtctgctcgatcagttgcgcttggcggcgcgagagtcgagccagatggcgatggccgcgaacacgatggtgagcacgccgagcacgatgagcgtgggcagcataaccatgcggcagtgcatcatcgcgcccttgcagatgccgatcaggaaggtgggtacggcgagtagcagcagtgcgttggctgcggcggcgatattgaggccgatgcgaatctgcggggcgacgaacaaagccacgacgccaaacacgaggatgacgacgccgatgccggtggccgcctgctgcgagtagtggcaggcacccggcatgtcatggccggtgcaggcgtgcgcaaaggtctggggcgcgatggtgatcagcgcgccgaacagaatattgggcacggatgcaaacagcttgttcttcataactactttttcctctcccctgttcccagggctcgtaggcgcaacctccgcattatgcccagatagtgatgaagaacacaagtcttgttttttgtgaatttatttggtatataactcagcccctcgtcagaggggccaatctatctacaacttctcaataggtgctacgcggagcatgaggcgtttgacgccggcggagccgaagtccacggtgattaccgaattgcggcccttgtcttgcgcgtcggtgaccttgccgagaccgtactggtcgtggctgatcatgtcgcccacggcgaagtcggcgatattcaggccattgtccttggtgagcttcgagctgggcacggcagagccggtcgaaccggatttcggtgtggtgcggcgcgtggtgaccttgccgccacgggtgccgccatatgaaccggatgaagaaccggaacgggaacgcgacccgtaagacgaccccgaacgggagcctgaagaaccataggacgaacccgaacgggagcgagacccgtaggcggacgaacccgaacgggaaccatacgaggagccggaacccgagccatacgacgacccataccgcgaccgcgacccataggacgaacccgaaccggacgaaccacgcgagccgaacgtcgacgacccaccaaacgtggcaccgccgaaatcgtcatcatcccagc

SEQ ID NO: 2050 - DNA, 4473 bp, Unknown
  R17_18m  MAG No. k141_46725
aacatgattgttctccttattttccttgtttctcttattggttcacttcgttgtggaagatcatcggaattggatggcgaagccagccacacccgatatgtgcggctgatgttggctcaattgccggacgcactcctttcctcgatgctggattccagcgatgtcctctcgtatccggtcagggatgcgcgatcaagagtgatacgggcacgggccgcattgtccgcaaacggcacctgccaggttttgccacgtaggtgcagtcgcatcgtgccgttcagagcttcgatacggatggtgagcacggctcggcccgaacggtcacggcggacgttgtcttcaaagacacgcagcctggccggctccggggtggaaggcagagacttgccgttgcgcatgaactccacggatgatgccgtgccggacaaacggtattcgccaagagacaacagcgcctgcccacggctcgtctgcccagcgaaatcaaggacgaaacggttgctgaccagcgggtatgccagttcgagtgttaccggacacacgccgctggacctcacgccgccgtcgatgacgagtcggcggtcagcatgcaattctcgaccgagatcccgcaatccggcaccccacagattcacatgttcagtggccgcatatgcgctgaacgcggcccccgttcgcaacgagaacaatcccgcccgaccgggcttatcactgatggtgcaggacgcggcgaaacggccatcaatgcggatctccagcctgcagtagcggcgctcaagccggtactcatgccaggcatgggaatcgaagtcatggaggtcggcattggtcacgcgttcggaggcaacgccgccgatcacatcgaccacgctaattacctgacggccagcatccacctcgagtttggtgaggttgttggcatcctggtaccgcaccacgataccgaatcgtgcgcccagtggggtgacgggagctttggcccagacgtcaatcacttgggttgcggacgatttgcccgacacagcgatgaatacactggattcgtcggcaacaagcgcgtgaccgtccacatcggattcggtgtgggccgcgccggaaataaccgaccatccggcgttcaggccatccgcaaaatcatcatgcacagtgccatacagcggtgcgctttgagcggcggcggtaggtcctggggtgtcgagccctccttcggcgtagtacagcgggtcgatgcgcattacgcgctgttcggtgcccacatacagctcgtcatcggcgttacggccgtggtagacgatccagtcatcaacggcattgggcgctttgactatggagttgtggcccgtgccttcgacctttgggctgcggataagcagcggatcgaagcggttctcgttgagctgtttcgtccaatcgagctgatcgatgtgggcgtcggcctgcttattcggcagctgtgcgtacgagtatccgacgaagtagtcctcatgctcgtaggcgttggccgagtaggtgatgaacgcgcggtcacggtaggcgaagtatgtggcgccttctacggtgtgccagtcgcggccatcgccgaaacggttgcgggcaaagatctcctcgtccatggtgggcacgatgagcgggcgcggtttgttctcacgcgaatacggggtcacaaggcgatcgatcatcacggaggttccgggccggtcatcgctcaggccggtgacctgattgtcggcgtaaagcaagtacaactggccgtcatcgccatagaccacttgggagtcgatggcgaaggtgttgaacagctccgctttcttttcgaacgggccgagcggatcctcgctcacggccacacgcatgatttccgtgtgggtgtcggtctcctcggccggcatattcgagaagtacatgtgaaagacgccgttgatgagaatcaccgatggggcccagaagtttctgcgtccggcttcggtgtagcagaatccatgtgaggtccagtgcaccatgtccggtgaggtggagaccagaatgccgtgctcgtcggtggcatagcagtagtagaggtcgcggtatttgagcacgaacgggtcgggcgcggtatgggacttaccgtccgcatatggaaccggattcgtataagtgcgttcggccagcggcttcaaatcgccagattcggcaagcaaggcggtggggtcagctgcgccgagctcgtcttccgcagggctgtagctggcggatacaccgttgctgatggttgcggtcattttgggtcacctcagctcttgacggcgccggcggtgatgccggactgcagccacttctggctgatcaggtagacgatgatggacggaatcgtcatcagaatcagggcggcgtattcctgggccaccatctccggcgtctggctgcgggtctccatgaagtaggtggaggccagcgtgaccggatacttggattcgtcgcggatgagcagcaacggaatcaggtattcgttccaggagtagacgaaggtcagcacgccggtggtggcgatcatcggggtggagataggcatcaagatacgagcccagatgcgcagggaaccgcagccgtccacgcgggcggcttcgatgatttcgtctggcacgccgttgaagtagttgcgccagagcaacagcatctgcagggcgttgaacgccaccaacgggatgatcatgccgaggtaggtgttggtcaggccgaatgtcttgatggtgaagaacagcggcatggtcacggaggcaatcggcacggccatgcaggcgagcagcagcacgtagatcacctgggaaccggtgaacttcatcttggcaaaggcgtagccggcgagcgaggtgatgaccaccacgatcacggcggtgaccacggagatgaaaaagctgttgaacaccacgcggaagtagtgcacgtccttattgttgatcacggacaggtagctgttccagccgcctgcctgcagggacttggtgattgccgtgtaaatcgggaaaatccagatgacgaagaagaatacgaggacggtgtacatgatgaccgtcgcactggttttacgcttcatgatgacgtcctctcgttagttgttggcacgcttgttgaaggcaagttgaatcagggagagcatcacggcgatgatgaggaccatcacgccgatggccgcggacagaccgccgttgaactgctgcacgccggccttgtacaggtaggtgttcaggaattcggtggaacggccagggccgccgcctgtggtctggatgacgatatcgaaggtcttcagcgagccgacgatgccaagcaggataagcgtgttggtggtgccggacaggttcggaatggtgatgcggaagagggtgttccagaatccgcagccgtcgatcttggcggcttcgtagatgtcatcggagatagacatcagaccggcgtagtagatgatcatcgagaagcccatccattcaaagatgttgatggcacagatcgagtagagggcgatgtgcggatcgccaagccagctttgggccaggaagtccaagtgcaggaagcgcagggcctcgttgatggcaccgacgttcggatccatgatgatgcggaagatggcggcgatgatgaccggggccatggcgatgggcatgaagaagatcgccttgaagaagctggaaccgcgcaggcgctccttgaggatcaccgcgagcagcagtccgagcccggcctggatgaccacggtgacgaccatgaagatgatgttattcatcaaggccgtccagaacacggagccgggagcgagcagcttggtgtagttcttcaggccgatgaagtccatctcactggagatgccgtcccagtcggtgaaggatgtggccacggtgaagccgatgcagtagtagatgaagacgccggagagaatgaccagcggggcgatgaacaggtaggggcgcagcttgctttgccatgagttctgcgatgcgccgctgtgcttgcgggcacgaacacgtttgccggctgccgcagccgcgttgctcacctctcccccacggctttgcgctgcccccgctgcggcgggaacggcttcctgaattgccgtcatgatgacctcccttggacctcatcttctgtttctgtaacatttcagaaactggccatagaaaatactcgggcatgctttgccggagcggaaaaccagtcaaccgacgctgctgtgcgccggtttttctagaacgtttcagatttcttcgttggcaacaattctataacgtttcagaagtttgtcaaaacagacatcaaatggttgatataaacattgcaaatacttgcgacacaccggaatgcaatgccgatacaatcggcctatttctactcaccaagacgctggcgcacgaaaccgtccagcgcggccgcatcgataccgtcatacgattcgatggacgcgaactggcccaggccggaagtatccgtgcgaatccagccagt

SEQ ID NO: 2051 - DNA, 21017 bp, Unknown
  R17_18m  MAG No. k141_47545
cttgcgctttcggcatgcgttcccccacgctggaagcatggcatcacagcagaacgattcgaagcgacattccgcccatacggcatccgccgtatcccgggcgaagcaccgtttgggcgagctgccattgcgcgcccgcctgaccatgcttgccgcggcgtgcccgatgatcgcgcaggcattgatgatggtcatactgctgttgcacgggcaatggctgttcgccgccatgatcgcaccgggcatattcgcctgtctcgtgtccctgctgctgacgctccccccacctccgggcccggagaagacccccgccccgcaacaggcaacgatcgatatcggtatcacggacgatgccgatgcccgcgccgcagacctccgtcatgcgccgtcgcagccgatagaatcgctgctgcacttcgcacgcctgccatggcgcaccattgtgggccattggcttgaaccccttgaccttgcggtgccgatcggcatgaccggaagcgagccgctgaggctcgatctgaaccgtcaggggccgcatgctctggtggccggcaccactggttccggcaaatccgtgttgctgcaaagctggtgtctggcgctcgcctcgatgaacgggcctgagcatctgaatttcgtgtttttggatttcaaaggcggttccgcgttccgcaaactcgaacggttgccgcataccgtgggcagcgtatgcgatctggatctggcgcatgccgtacgcgcgttgcgtgcgctggaagccgaactgacacgccgtgaacagctgtccgccgctgtccatgcttccgatatccgtgatatggtcaatccgccaccgcgcctgatcgtggtcattgacgaattccatgccctgaaggaccagctcccggattatgtgaatcgtctggtgcgtattgcctcgctcggcaggtcactgggcatgtatctgatcgcctgtacgcagaatccgatgggtcaggtcagtgccgatatgaaggcgaatatgtccgtcagcatttgtttacgggttcgggaccgtctgcaatcatgcgagctgcttggtgatggtcgtgccgccgacctcagtccggcaatgcccggtgcggcgttctgcaacgattccgaacaggtgacggcattccgctgtgcaacggcgcgcgatatcgatgcggtatgccgccagatcgcgttcgcatcgcggttcgtcgggagcccgccgcagccgtccctgtttaccgcgccacttccccggcacgtaaaagaccggactgtggccaatcacgcaccgcaacgcattcgatttggacttgccgacgatggcatcaacctgcgagaagcgacggtatccctcaccggtggcaatatcggtgtcatcggcccgcaggggcgcggcaaaaccacgttgctgaaaacattggctcgacacgccagcatggctgatggcttggcggtacgtgtcagttccccgcatcgccgggtatggggatcgcaatggcttcgcaacggccgctgcacgccgtatgccagctcggatgcaccaccgcctccgcatatcgtgtggttcgtcgacgacgccgatgagttgttcgacccattccgcaccgacgagcaggcgctgtctttcacacatgcgttggccgatgagtccgtcagcgtggtattcgccgtcagcacgattcgcccgatacgtataccagagcattgcaataccagaatcgtgttcccgtgcggggaacgaacgtctgaccttatggccggagtccccgctcgcctattggatacgatgagtcatatcgatgccgacaacgcgggccgggccgtgctcatcgagggcacatcggcatgtctggtgcagtgcgcttcgtgaaaacttcggttttttctcggcgaaacctcttgaaaatcaccacggttcgtggttaccttggtactggacttaaggaacaacaccagccacggggcttttaagggaggcaagcaatgagcagcgcttttgattggcgagccaaggccgcatgtcgtgacaaggatccggaactcttcttcccggtgggcaacaccggtgcagcctatcagcagattgaggaggccaaggccgtgtgccgcacctgcaaggtgattgatgcatgcctgaagtgcgctctggacaccaatcaggattacggcgtgtggggcggcttgagcgaagatgagcgtcgtgcgctgaagcgccgcgccatgcgcgcccgccgttctcaggccatgcagatgcaaatctgatgttttgattatcgcttcgtcatactaggaaaccctcccacttgggagggtttccttatttttgggcttcgcatcactcatcctgagcggccctgagcttcatatcaagcaccacgcgggtgccgcctccgcggcgcggctcccaatgcacggaaccaccgaaatcattggtcacaaaggtgttgatgatctgcgtgcccaaaccagaaccggaagaacgagccaatcctccctgttcttcggagccgagaccggaaccgtcatcctcgaccaccacattgaggttcgggccggagcggcccacggaaatcgtgatatggccatccttgcggccttcgaacccatgctccaccgaattggtgatgagctcggtcagcacgagggacagcggcgtggcatcctgagcgggcatcatgccgaacttgcccatgtagttgatatcgatgtgctggtctttcatcgtggctaggtccacggccatgcgcagcaggttggcaatcaccttgtcgaagtcgacgacctcgtcggcggtctggctcaatccctcatgcaccatggcaatggtctgcacgcggcgttgcgcctcctgcaattccttcttgacctcatccgacttggtcttacgagcctgaagcctcagcaatgcggagacggcctgcaggttgttcttgacacgatggtgaatctcggaaatcgtagcgtccttggtctgcagctcctgctcacgacggcgcagctcggtgacgtcacggcatagcagaatcgctccgatacgaccgttgttgtcatataagggcagcgagcgtatcgagacggcggaacggttggcgttgagttcggagtcgaccgcggctttgcccgccagcaccaacggcagggtttccggaacggggtcgttctccttcaacagctgtgtgccgagttcgctgaggtaatggccaggcatggtggtcagcaggccgagacgcctaaagcagctgatggcgttcggggctgcgtatcgaaccacgccgtccatggtcaggatgatgaagccgtccgccacgcgagcgatatggcgctggctcatcaccgaatccttgtaggggaactggcctcgtggaatcatctcgtacagctgtttgcccgcgttaatgctttccgactcatatcgaccgttggattctcgtgtggccatattggtctcacgcacgaccaagcccaaggtcttgccattgtgccgaaccggcgcgtacacgttgcagacggtcgccttgcccacggttctcaataccgtggagcggaacaccacgctggagagcatggcggcgtccaattcgccgaccatgtcatccggcatgacgtttcccaccacgtcttccgcccgtagcgtcatcacggtggatgggcggcattgttcggccaccacgtatttgccgtcaccgttctgtaccagcagcagcaggtcggcaaagctcagatcggcgatcacctgccaatcggcaacgagatgatgcagccactcgcggtcctcgtcgtcgaagtcggggcgcgttgcaaggatgtgtgaaaaatcagccatgcccctatcatacgcagacacgtcgccgccattgcggcaagccacacgggcaagtatgacgactattacgacatcgcatcttcaataccgcaccaatcgcgttgcacggctgcccgccgttcaggcggtcatcgcctcatacacctgagaggacaatgcggcgatctgctgctgcgcggttcccgagaccactcccgaggtcataaccaccatcacataatcccgttctgttccgtccgcggccttgccccacaccacggcggcatcattttccacgccggccagttcaccggttttattggccacctgaatgccagacggtactccggcgggtattttggcgcgtcgcgtctgcccgagcaatacgtcaagcatggagcggctggcttcggcggaaaccagtttgcctcggtacaatgcagcgaggaatctgccgcaatcggaagccgacgtccagttctcggtgccggtcccgtctgtgccggcatcggacaacacccgcaactgcttggatgagctgaagccgtatcgggcggccgtaccagtcacccgttgcatgcctgtggccatgtcgccatcgccgaccatcaataccagctgattggtggcagcgttcgagctgacggtgatcatctggttgatcagcgaggtggtatcttgcccgcccgcggccaaggtgccggcatgttgcttatcgtacacggcaagcatcacgtacagtttgatatccgaagccgccaccatgggctggccgccgacgctcacggttttgcccgtggccagatcctcgacatacaccgaccaggtgcctccattgccggccacagctgccgtgaccgccgaggacacatctgacatccgcttctcttccgccaccgtggtcaggtcgggagcaggtgccgccttgcgctccaaggtgacatgcacagggcgttgttcgtgtttcgatgacgccgttgacgacgatgccgacgctgttgccggtgagtccgatgccgaggcgacgggcgatgttttggcgtgcgatgcgccgagaccgttatgcgcgtacatccatccaccgacgccgattaccaaagcggcgatcagggcggcgatcaggatcaatcccacgacgctgcctgttgcacgcgtgtcgctactatgcttggtatgccgagccaccgtcactgccccaatgtcttgtcaacactggccagcacccggctcatcaggtccgcggccaccgactgcccctgatattgggtgacaacggccacggcggccttatgaccattggcttcgacgatggcgaagtaattccaggtgtcctggatgccttggcctcggtgggcatgcacgatcatgtcggacggaatggttacgccttcggaagcaatgtccacgttcatcaatgacgcgcctcccttggcgtccactgcggcgagcatgcgggccgcatcgcgggaggaaccgtaattctcataaccggcattgctggccgccacatcgccgaaatcgcggttgaacgaggtgcccttatacccatgcgaagatgcccacgaattgacgccgctccagccacctaccgccgcggccgccatattgccggcattgttgtccatggaacccatcatcgcgtttgcctgcgctttggcgttgtcatcgccattgtcctgggccgcaagatagaccggcagatagagaccggcagccacgaattgcttgccggactgcgacgtggtcgcgatggtggcgtcctctgaggaatcggcgtatgttccatcgatgaccatggcggagacggccacatcggaggacgagtatgaatccgcgatgtcagacaactggctggatgtgatcaccggagtggaaggcttcgacttctccgtcgagcttttcttggacgaatcgtcgctgttcttgtctttggcgctatcagacgtgttcttcttggccttggacttggcgtcagaggaatccgtcgtgccatcatcggcggaatccgacgcatcggacccggtcgactgtaccgatgtttgcgcctgcggctgagctccccacaatcccatgctatgggtgacgaacaagccgatgaccaacgccacgacgcaaatcagcgcgatgagcacaatcaccaccgctttggtgtgatcgccgccaggacgcccggcgggaggttcaggagaagcaggtgccgcagggccagcggtcatgggtcccggtgccataggccccggcaccgcggaacccggcgccgttggcggcgcgacggcgggcaacggcgccgccggctgcttcaccagcgtcagcgcgttatcgtcataggcaggggccgccggattggcctcgggctgctccaatgggcttccgcactgcgaacagaaggcatttccttgctcgttggcaaacccacactccgtgcaatacaccatcaccgaaccccttattgctgtgacgttctcatcttcggattccatagtatcgccaccattgggtgatagtgttcgtgtgagtcggtattgacaagcataaaagttacgctaacgtaggttacggcagcgtaagaagcgtatcgtcaactcgtgaaacgggggcatcaccatggcatcaacaaccgacgacgcggaaaagacgatgcatcacgacgctcataacagcgcgacgattgcagaggatgccaccatcgcatccaagcgtcaggcggctatcgaggcgcgcgaacaggcgttgcaggccaaggctgatgccgtacgggccaaggcccagttcaaggccgaggccattcgagccaaagccgaggagaaggcccggcacaagctcgccaaagcggagcaccgtgcgctgaaaatcgagggcattgcccctgcggaagtggaacgcaagattcgtctcgacgtgcacggacgaccaaagccgttgatgcgcggctggattcacgcgattgccgctcccctgtcattggcggcaggcatcgtgcttatatgcctggcacatggcgcgagtctgaagtgggcgtgtgccgtgttcatgacagcgtcgctgattctgttcaccaattcggcctgctaccatctgggcgattggagcccgcgcgtcaccgatgtgctgcggcgtatcgatcatgtcaacatcttcctgctcattgctggcacgtataccccggtttcgtttgcgctggaaccgttctggcgcaatgtgatcatcatatcgatgtgggcgtgcacggccatcgccatcgtgattcatgtgatctggatcaatgcaccacgctggctgtatacggtggtgtacatcatcttcggcatctacggcctggcttatatggtgatgttctggaattcgccgtatgcggggccagccgtggtggtgctgctgtgcgccggcggtgcctgctacatcctcggcgccatcgtctacgccttgcgcaagcccgacccttggcctcgcgtcttcggcttccatgagattttccactgcggaacggtggccggatatgcctgccatatggtggccatctacatggtgatcgtctcgctgtggcaataaacgctacgacatataagtatgcccccgcctacgggggcatactagtcacttataactcaggccagcggcttggcggccttgaccgtcacggacagctcgcggccgttcggtgcggtgtaggaaacgacgtcgcccaccttggcaccttcgatggccttgccaatcggggaatccggggtcatgatgtcgtagtcggtgccggccacgatgtcacggctgccgagcacgtaggtcatctcgttgccgttgagctcgatggtcaccacagagccctcgcccacggtgccttccggggcattctcgatgatcttggaatcgcgcagcttgacggtgagctcggtgatgcggccctcgttcttgctctgcgcctcacgggcggcctggtagccgccgttctcggacaagtcgccctcggctcgcgccacggcgatcttgtgcgcgatttcctcacgcagctcgccttcacgatgggcgagctcttccttcatcttgttgtatgcttcctgcgtcagcaggtagaccttgtcctcagccatatcgtcctcctgaaccgttgtcgatgctgaaacaattttcgttatttatgacaaaacgccggctatgaccccggcgttcgtcatgtgctgacctatggtcagcgggtggaaatgatgtcgatgacgaacaccagcgtgtcctcgccgccgatgccggcctgcgggatgccgcgggaaccgtagccgtattccggcggaatggaaaccaccagacgcgagcccacgttatggcccggcacggtctggtcccagcccttgatgacctgtcccacgccgatgccgaagctggcgggctgatgacggtcgaagctggagtcgaatggggtgtccttaccccacaccacgccgtggtagttcacggtgacggtgtcgccgcgacgcacgatcgggccgtcgccctcggtcagctccacaaccttgaggcccttcggggcttcgggcgccgggaactcgataacgggcgtggtgccgaattcggcgttcacctgaggcatctgatctgccattagtcctccttcaaagacacaatgcgccctaccttagcaccatcggcgaatcggcggtagtccttcatccctgtgcgatacgacacgctggccgtatacgtcaattccggtcatcatgctggtgaataccagacatgtcaatcagcattcgacgacattgacggcaagcccgcccttggaggtctccttgtatttggccatcatgtcttcaccggtctgcttcatggtttcgatggcctgatcgagggtcacgatgtgtgagccgtcgccgagcatggccatacgcacggcgttgatggcggtgttggcggccatggcgttgcgttcgatgcatggaatctgcaccagtccgcccaccggatcgcaagtcaggcccaagttgtgttcgatgccgatctcagcagcattctccacctgttccggcgtgccgcccatgactgcggcaagtccggccgccgccatcgaacaggccgagccgacttcgccctggcaaccgacttccgcaccggaaattgaggcgttgcgtttgaacaggtatccgatggcaccggcggtcagcagaaacgtgaccacgccctgttcattggcgttgtccacgaaatgccagtaatagtgaagcacggcgggaatgatgccggcggaaccgttggtcggagcggttacgatgcgcccgcctccggcattctcctcagagacggccaaggcgaagagatccacccatgcggcgtcggaagactcgagcacggcgtctttgcgccggctatcgcggcgcagcacatcggaattcgaagcgagacgccgatacatcttcggcgcgcggcggggtacgtcaaggccaccgggcaatgtgggctccgccgaggtgcatccgtggtccacgcaggcgcgcataacacgccagatggcatcaatatcggatcggacctggatgcctgagcgtgaagcggtttcgttggcccatacaagttcggcgatgctgagatgatgttcccggcacaacgacaccagttcggcgcatgatgagaacgggtagggtgcctcgacgccgaaatcagtggatgatgattcgtccgcgtcggcaaaggaggtgccttccggaggacgttcatgaatgccgatcatcgggtcttcgggagcgcctttgcgcacgaatccgccgccgatggaataccagacctgttcgtcgaccaagcttgcggcggcgtcgaaagcctggaatcgcatgccattggggtgcgcggccatgcgcttccattgttcgaacaccacgtcgcggtcgtagtcgaaatggatgcgtttgaggccggcgaggttcagagtatcgtccaacgcgcaggtctcgcggatgcgcatcatgtggtcggtatccacggtggccggcagattgccttcgagcccggccatcgcagcacgatcggtgccgtggccgagaccggtcagcgccagagaaccgtaaagcgtgattttgacacgtgcggtgcgatcgaccaaatggtcggccagcaacgaggaggcaaaggcatgtgccgcgaccatcgggcctacggtgtgcgaggatgaaggtccgacgccgatggtgaacatgtcaagcacactgaacatttggctccttctcccctgctggttcggcatgccggtgtcaccaggcgtcatgccatcacgatatcgtattccagcctagcgcccggaatctttcgctttgcgcgatgatggccgcgcgcgtcgtgccggcgagcgataagtcagtcagtgagatagtgcggagaacatcataaccagtacgatgataccgatgatggccaatacgatctgcaccaccatcagcccgatggtcagtcccttcttggtggcgattttgggcgcgtacgcctgtgccaacaggaaggcgatgaagccgaacaccgcgtagttgacggtcagggccatcacatcgctgttcgacaacaccacgccgttcagcggctggttcagcgtgttcatcatcgtgctcatcacgaacatgccccacacgccgtagccgattaatccgacgacgccgtacagccatggcttgagtttgtcgttggcacgcagggtcagggcttcggcacaccacaacagggcgaagccgacgatgtaggtgaacgccacggcgatcagtatcacgatagtcgcccacggcaggagtgcggccacattgccgatcatggacagatagaatcccgagcaggcgatggcaccaacggtgagtgcagtgcccgcaatgacggcttgggcaagcatggtgggcagggcgccttgttcgactcgttcgacatcggtccagcgtgaagccatgtggattcctcgtttcatcaggtacatcgtcacaacgccacatagcctaacggccttttgtttcggccttataagctctccacatagtaagctgcgagcccctctgacgaggggagctgtcggcgaagccgactgggggagagaccgcggcacagccgcaaaaaaacggcatcggccacaggccgatttcaaggtgcctccggtgggactcgaacccacaagccgaagcgatcgattttaagtcgactgcgtataccatttcgccacggaggccaacttttctattataagctatctcctgccctgagcattgcttgcgggttgctgcgcttcgtgcagccgtcgcggcatagccgctcccttcgcctacaaacagcccagtgggctgtttgtagcagccggtagcgatagcgtcgccggcgtcgcatataacgcaaacagcccaccgggctgtttgcttaacggctcagcccgctggaggcacttaccacttacgctattgagccagcaaccggcgaccataatcgagcacaatgccatccagcagcccgtgttcgctggcgacgaacgaatcgatggcttcaccatgatcggccttggcggcttcgctgacacgcgccagcacacggctccagaccacagcgccgccgccgaccacatcgatacggccggggtggatggtcttgtattcgcggcgctcggcgcgcgtcatcctaaggaacttgtcgtccacggcataggcgtcttcaaggctcaaccgatgcccgtcgaccacggtgtgatcgtattctttcaatcccatagccaaggcggtcatcgtggtcaccgtgccggacacaccgatgatggtacgggccttgcctgcgtccacggtgcggaaggcctcatcgatatgctcgtcgatgtccgcaacggcctcatcgatctgcgcctgggtcggcggatcgttggtcagatgacgttcggtcatgcgcacggaaccgatgttcatggagaatgcgccctgaacctgggtggtggacgcactgacgccgtcgccaccgatgaccagctcggtggacccgccgccgaggtcaaccaccagatagggggcgggcagatcgtcgcgattgaccacggaagtggcaccgaggaagctcaggtcggcttcttcagtgccgggaatgacttcggggcgcacgccgaggatacgttcgatctcatcctcgaactcctcacggttttccgcgtcacgagtggcggaggtggcaacgaaacgcaggccgtcgatgggatgctcggcaatcacaccggcgaattcccgagcagccgcataggcgcgttccaacgcttcgtcggcaaaacgatgggtcttgtccacatcctgaccaaggcggatcacacgcaggatgcgcggcaccacctcatgcatgccatcggcatcgacacgtgcgatcttcagtcgaatggagttcgtgccgcaatcaatgccggcgacggttacggattccttgctcattgccttctcctcgtatcccttagtgcgtatgaatgggctgttcgcggtggctcatctgttgatcaatcgtccagtgtgcaacggcagacggtcggatcgaactcgtctttgacgcgttccagcaccaaatcgccaatggggttgacgcccggccccataaccagggactgggccagcagggcatgcaggcacttgacgcgcaccggcatgccaccggccgaagtgccttcaatatgctcctcactgtcgccaagacggcctgccagttcgtgacggaatgccagatacagattatgggcctgctcatatgcggccttgagctcctcatcagcggccagcatatcgttgtattgctgcatcacgccggcggcctcgacatgggaggcagccttgacggcttccggaccggtcagatagcacgtggtggggaaagggattccgccgggcaacaccgggcgggtgattacggcaagtggcctaccgcagacgcatcgcgcccccacggcgaccatgccgcgcgggtatcggccgagctgacgctgcacctggtcgatgtcatggtcgttggcgggctcggcaagcatggtgtcgacaagggccttggccttggcggcgatatcgatggtcactgttgggttccctcccctgtgttctgttgggtgttctgatcggatggggtgttctggtctgacttatcggactgcttggatgagtcgttggatgacgagtcagaggaaccggaagtatcggatttgccggactcgctatcggtcacaggctcatcggcctttttgagcgagtaagacagttcgctgtaccatggcaggacttttttgttgctggtattggaatcttccgttttctgggattcgcgatcggagccggtcacggcttcgggatgcagcacacgcacggcctgttcgccggggaatacgaagccgaggcgttcacgggcctgggcggtgatgtaggccttgtcatcccaacgcttgatatcgttctccaactcctgcttttgggcgatcagcgaggcttcctcacgcttgaggccattgagctcggccaggttcagggcataagtgtggaaggtggagaccagctggatggtgccgagtgcgatgatgaacagggagacgaagaacgctatgggccccgccgacccttttttcctgacttgtgctttgccggttttgccaggtttgccggtacgggacgacttgctcatgtcacatgaaaatacccgccgcattcgacttgacgaacacgacgggtatcgagcttcagtggaaactcacgcctttacgggcgtttcagctcacttggccaagtacttcttgcaggccttgaaggcgctgtagccggcgtactgagcggtggagccgagctcctcctcgatctcgagcaggcggttgtacttggcaacgcgctcgccacgggccggggcaccggtcttgatctggcgggtgttcttagcaacagccaggtcggagatggtggtgtccggagtctcgccggagcggtgggaaaccatggaggtgtagccgttggcggtggccagctcgatggcgtcgagggtctcggtgacggaaccgatctggttcagcttgaccagcagggagttggcggcgccgaggtcgatggccttctgcagacgagccgggttggtgaccagcaggtcgtcgccgacgaactgcagacgatcgccgaggcgagcggtgatggcagcccagtcttcccagccttcctcattgaacgggtcctcgatggagacgatcgggtactcgttgatgaggttctcgtagtagtcgagcatgtaggcggagtcgcgctcttcaccgtcgaagcggtacttgccggtctccttgttgtagaactcggaggaggcgacatccaggcagatgccgatctgcttgccaggctcgtagccggcggcggagatggcgtccatgatgtacttgagggagtcctcgttggacttcatcttcggggcgaagccaccctcgtcgccgaggccggtgttcaggccttccttcttcagaacgttcttcagggtgtggtaaacctcaacgccagcgcgcagagcctcggagtaggtgtcgaagccgtacggggagatcatgtactcctgaatgtcggtggcgaagtcagcgtgagcgccaccgttcatgatgttcatgttcgggaccggcaggatgtggccgttggtgccgccgatgtagcggtacagcggcaggccggcggactcggcggaagcgtacagagcagccagggagacacccaggatggcgttggcgcccagcttgcccttgttcggggtgccgtcgagctcgatcatcaggtcgtccagagcgcgctggtcagcagcgtccatgccgatgaccttcggagcgatgacctcgttcacggccttgaccgcgttaagaacgcccttgccgccgtagacggacttgtcgccatcgcgacgctcccaagcctcagcttcaccggtggaggcgccggacggaaccagacccttgccctgagcgccgtcttcggtctccaggtagacctcaacggtcgggttgccacgggaatccagaatctgacgcgcgtacacgctttcaattactgccacaactactccttaaaacggttgtgtatcttgaatgacattcttaagagtagtgcgatttgtggacgttgtgaacaacacgcccaaaatttagtgttagcgctcacaatgccgatgcgccgcctgattgcaaggcagtacggacgaaatcgctcagtcgacgtccttgccattgaggtagtcgatttcactgtcggacaatttcagttcgctggctttgaacgagtcctgaatctcctgcgggtttctggccgagggaatcgtgaacagatattggtattgcgcaagttcccacgcgagcgtgacgcgctggtaggagcagtcgtgggacttcgcgacttcgcggaaccgatcgaacagatgctcgttgaacgggtcaaggaatccaccgagcggcgaccagcagacgaaagccaaaccgagtttttcgcaggtctccaacgtgtgttcggggtcgcggtgaaccggggagaactggttctggacggccacgagacgatcgcccaaaatgttgtgggcggcttcgatgtccgcgttgtcgattctggagataccgaccgctttggccacaccttcgtccacgagctgcttgagtgcgcccatctggtcttcgtacggcacctgcggatcattgcagtgcgagtagagcagatcgagcgtatcgacaccgaggcggcgggctgattccttggcattggcgatcatggtttcgggtcgggcgtcggcctgccagccgtagttgccgttgccgtcaagcgtgcgcagccagccggttttggtggctacgagcacctgatctttggggccatgccacgagtgcagagcatcgcggaccagatattcgccatagcccatatcctccggttcgccggtgccgggtgcgctgggcagataataggaccaagccgtgtccaaataacggactccggcatcgagcgcggcatggatggtctcgatcgcctgatcacggttggaggggcgcccctcgatggcgagcgccattgtgcccatgccgatgcggggaatctcatagccggcaagtgttgccgcgtgttggtttttcatcgttgtggcctccatgccaagtcatcgaggagttggttagtccagaggactacctggtcggagctcatggggccttggcccagggaaccggtgaacggggtgggtacgatgagctggtgggtgaccgggcggtattgggcgcctttgtaaatacggcccatacgcatctggatggattcgggcgggtcgatacggccgatgcgcacgcggttggattgcgcgagaatctccgaaatgccgagcttgcgggccttgaacttcagacgggccacgtcgaacagagtctcgaattcgaccggcggcttgccgtaacggtcggtaagctcctcttccagatccttcaaatcggcctcgttgcgagcggaggcgagcttgcggtacgcttccagacgcagcttgtccgaatcgatgtactcgatcggaatcgacgcttcgatgggcaggtcgatggacacggccaccggctcgacgttctcttcgggctccttgtacttctccacggcttcggacaccatgcgtacgtacaggtcgaagcccacgccctcgatatggccggactgctcgtcgcccagaaggttaccggtgccgcgcaattccaagtccttcatggccacatcgaaaccggagccgagcgccgtgttctgcgcgatggtggcgagccggtcatgggactgctcggtcatcggcttggacgggtcgtacaggaagtaagcgtacgcgcgctcgcggccgcgaccgacgcggccacgcagctgatggagctggctcaagccgaaacggtcggcatggtcgacgatcagcgtgttcgcattggagatatcgagaccggtctcgatgatcgtggtgcacacgagcacgtcgatgtcgcgatgccagaagtcgcggatgatctggtcgagctgcttctcccccatcttgccgtgggcgatgccgacgtgcgcctcgggcaccagcgtgtggatcttgtcggcgatggacgagatatcctgcacacgattgtggacatagaacacctggccgcctcgcagcagttcgcggcgtacggctgcggtggcctgcgcatcctcgtaggcgcccacataggtcagcaccggcaaccggtcttcgggcggggtggcaagcgtggacatctcgcgaatgccggtcacggccatctccagcgtacgcgggataggcgtggcagacagggacagcacgtccacgttggtgcgcagggctttcagcgtctccttgtgttccacgccgaaacgctgctcctcatcgatgatgacgagtcccagatccttgaacttgattttcgggttcagcagcttgtgcgtgccgatgaccacgtccaccgtgccggtttccagaccctcgatggtctcgttgatctctttggtggtctggaatcggctcatggccgccacattgaccgggaaaccctcgaatcgttcgctgaacgtctcgtaatgctgctggacaagcagcgtggtgggcacgagcacggccacctgcttgccgtcctgcacggccttgaaggcggcacgcagtgcgatttcggttttgccgaagcccacgtcgccgcagatgaggcggtccatcggcacgggcttctccatgtcggatttgacctcgtcgatggtggtgagctggtcggcggtttcctgataggggaaggcatcttccagttccttctgccatggggtgtccgggctgaacgcgaagcccctggcgcgctggcgggcggagtacagcttgatcaggtcgtcggcgatctcgtggacgtgtttgcgggccttggccttggtggccgcccagtcggagccgccgagcttgttgagcttgggggcttcggcaccgatgtatttgctgacctggtcgagctggtcggtggggatgaacagtttgtccgccggggcgccgcgcttggaaggcgcatattcgatgaccaggtattcgcgagtggttttgttggcgccggtgccgatggtgcgctggcgcatttcgatgaaccggccgatgccgtgctgctcgtgcaccacgtaatcgccttttttgagttccaccaagtcgatggccttgcgccggcgtttcggcgttttggccacggccacggccgaagtgcggccggtcaggtcgcgttcggtgagcagggcgattttggcggctttgtccacgaagccgtcgatggcctgagagcggatgacgtcgaaattggcgatgccggtagtgttgatcgcgcgcctgagcctggccaaggtgccggccgcagcggcggtgatggtgacgtggaagccggcgtcgagcaggccttcgatgccttgggaggccttggcctcatcccctcggaattcggccgggttctgggcgtcgagctgcacatggccggtcagcgtggtgtccacgccgaaactggtgaggcgaatcaccggatgttcggagtattcgagggagctgatggtttccgcatagtcgaggaagctggctttgtcgaagctgatgggcgcgccggcgccgtggccggaagcggccacatgccagctggcggccaggaactcgttcgcggtttttgccaagtcttcggcggaacggcgcagtttctccgggtcgctcaggaggatcacggcgtgcttgggcagcatggagcccaccggttccagatggtccacgagcgcgggcatcagggattccatgccttcgaccggaatggcgttggcgatggattcgagcatgtcctcagcattgggaatcgaaccgaccaaggctttggcgcgggcgcgcacggcgtcggtcagctgcagttcacggcatgcggtggcccagatggtcttgaggccgtcgccgtaggtacgctggtcggaggcgtggaattccttgatggtgtcaatttcgtcgccgaagaattcgacacgcaccgggtgcggtgcggtgggcgggaacacgtcgaggatgcctccgcgcaccgcgaactcgccacggtccatgaccaggtccacgcgcgtgtaggcgttttcgatcagacgtttggcggcttcgtcgaggggcaggtcctcccccacagtgaacacgagcggctcgacgtcgcccagtccttggacgaccggctggatgagcgagcggatcggcatgacgagaatgcgaatcgggccgaacatcggatcggtatcgctcggatgcttgagtctgcggaacacggccatgcggctggccacggtgtccgcgcgcgggctcagacgctcgtgcggcagggtttcccaggcttcgagctgggcgatgtcgtccgggtcgccgtcataccaggagcgcagcgagcccacggtctcttcggcttcgcggccggaggccacgaccagcacgaccggcttgccgggtttgccggtcacaccctgcccgatggcggcggccaaagccgggcgcaagccttcggaaacaccggccagaacggaattgtcgatgtcgtccgaaacctcgatgtcaccagtggcgagtctaaggaaggtcttgtcctgttccagctcagacaggatgcctaccagtgagccgttgatcaggtccgggtgcgtcgcctcaccggccattgaacttctcctgggtcttggcaagaccgcggaagatgatgtcctcggcggcgtcggcgccgtcagccaggaattcgggcagctgcttgcgctggtccggaccgaatccgcccagcacccagttcaccgtgttgtcatgcgcgttcgcaccgcgcttggagtgaccgacgcccatgcgcacacgcgcgtatttcggcgtgccgagggaacggtcaatcgacttgatgccgttgtggccccctgcggagccgcctgccttgaccttgatacgaccgaattccaagtccatgtcatcgtgaatcaccacgatatggtcgggctcgatctggtaataggcgctaatggaagccaccgcattgccggaatcattcatataagtcagcggcttggccagaaagaacttgacggtgcggccgtccaggttcatcacgcttttaccgagcatggccagacctttgtggtcggcgaagttcaccgtccaacgttcggcgagcacgtcggcggtcatgaagcccatgttgtgccgcgtgtcctcatattttttgccggggttgcccagtcccgcaatcagccagaaatccgatgccataatccactcctcgtccgtcttcctatattcccgtatgcacgttctgtacgttccgtacgtcatgcgcgcgttcgcctcgcgcactggcccatgcccggccggattcaaccgtcaagattgtactcaacgccgccgtcaagccttggaatcggcaagcagcagggcacggcattgctcggcatccatcgatcggaccgatgaatggtgaaacgcttcgacgtcacgagtcacgatgacgtcggcgtcattgtcctcggcaacggcacggatgagcccgtcctcgaagtcgggctcatcggatcggtacgacatacacgcatggcgttccataagtggacggatgtcgaacaattccatcagtccaccgatatcgtctcgcgccgcccgctcctcgccataatgcttgcgcaacacgcaatacacgtcattcaatgacgataccggcgccatgatctcaatgtttggctgtgcaacggcttccatgagcaaatcaacacattgtttatggaaaggcgctcgtttgtcattgcacaaatcgagcagaatattcgtgtcaaacagcagtttcatcccgtcccccaaatcgttccatacgtgcctgcgcgagaatctcctcatccgaaagatcgccttccgcctccggcaaattccggtcggcgaaacgttgaatcaactcctgctttttcctacgctcccgctcctgaatcagggagagcgtcagacgctcgaattccggcagttcccccgtatccgcaaggtagtcggtcagatcacgaatcaggtccgaataggtgcgcccattacgcttaagcactttctccgcgtcgcgcttccgttcggcattgacgcgcgccgtcaccatggccatagtcatatgcaccttcttgtaataccagtattacaagagatggggacgggtgaatcacgtctattaggcggtccgccagcgaccttttcgcgctgtttgccgttgaggtaccagtaggccagc

SEQ ID NO: 2052 - DNA, 2508 bp, Unknown
  R17_18m  MAG No. k141_48214
atgcgaccgaagccgttgataccaatcttaactgtcatgtaattctcccttgtagggtggccttggcgcgctttggcacaccgggccattgtttaccaacagttgctactgtaatgccgactctgtacacatggcaacgtttcagcgtgcgttttgggtaaaaatgccgtattttttgtgagcgctcacaatttggattgcccgcaaccgacatgtgattttcctctcctttggaggaatgtctcgaatcatcacgagcaagcgcgcggcatgcaagtcagcgaaccagcagcttggacacttcggtgtccagctcgccgatatcgccgccgaattcatggaatctgctcacctgtggcaacgccacttcgatggggaaggtgacgatcagtgtgccgcgtttcacgctgatggccgcgtccacgccgtcgcggaactcgttgctgaccccctgcaccaccgtattggtcagcgtgccgtctttaagctcatatttcagccccggttcgttcacgccaagcgaaacatcggagtgggagaacgccgacaccatgcggccgtcctcgggcaccggatgcgcggggaacgaaagcctaccatcggtgatggccgtgacgatgagcccgtcgccatacagatacccgcttgccccgtgtcgggccagcagcgccatcagttgaatgccggaaatcgtatggtcaatacggccgccaagcccgccgtacacgtgaaactcgcggcaacccgccgaccagccgaccttcagcgcggaaagcatgtccgggtcgtccttcaacgcgggcagcgcgatggtgcgcacatcggtgcggggcggccggccctccagcgaatcgaagtcgcccaccaccacatcgggcacgatgcccaactcgcgcgtatggtcgagtccgccatcggccgcaatcacatacgcaccggtgggaaccacgggcgtgcccgcatagtattcgcccgcaccaaaaatcacgcatacctgagtcattatgcctactgtagccggtatccacccatcgacacacggtccgcgaatgtccgggcatgtggtaagattcctatttggcttgagaaatcaagaaagcggggcaaccccacctggaagcctttcaaggcctcgggttcaaggcaaacagcctagcgattgcgatatacaacgcgcaatcaggaatgacgcaaagaactgatatgcgtctgcagaagatgagcgcatattggcgctggttttggcttgccatgaacccaaagcattgaacaggactccagcaaaggacctcgccacggaattaaagtagaggattggagtcatcatcagcgacgaaccacgtattaacgacgagattcgcgtcccgcaggtacgcctgatcggcccgaagggcgagcaggtgggcgtcatcgcgacttccgtcgcgctgaacctggccaaggaggcaaacctcgatctcgtcgaggtggccccgaacgcgaagcctccggtcgccaagctcattgattacggcaagttcaagtacaacgagaagatcaaggctcgtgaagctcgccgcaaccagagcaccgcggaaatcaaggagattcgtttccgcctgaagatcgacgaccacgatttcgacgtgaagaagggccatgtgacccgcttccttaacggaggcgacaaggtcaaggtcaccatcatgttgcgcggtcgtgagatctcccgcccgattggtggtgtggaactgctgcagcgtctggccgacgatgtcgaggaatacggcaccgtcgagtccaagccgaagcaggagggccgcaacatcatcatgacccttgcgccgaagggcaagaaggtccacacccagtccgagcagcgtcgtcgtggcgccgagtcccgcgccgagcgtcaggctcgccaggcggctcgtctcgcggccaagcaggagtctcaggctcaggccgcggccgacgcgcagtccgcgatttctcagaagacttccgacaagaagcaaaccagcaaggagggcagcaatgccgaagatgaaaactaattccgccgcttccaagcgcgccaagatcaccggcaccggcaaggtgaagcatgtcggttccgccatgcgccacaacctcgagcacaagtccgctcgcaagcgtcgcgctctgtccgccgatgccgtgctgcgcggtggtcaggccaagaagctgcaccagctgctgcagaagtgagcttagggcttacaggaacaaacaagactttagaaagctgaggaatagattatggcacgtgtcaagcgcgcagtgaatgcccacaagaagcgtcgcgttgttctcgagagggcttccggctaccgcggccagcgctcccgcctgtaccgcaaggctaaggaacagctgctgcactcctttaactacaacttccgcgaccgcaaggctcgcaagggcgatttccgtaagctgtggattcagcgcatcaacgctgctgtccgcgctgagggcatcacctacaaccgcttcatccagggc

SEQ ID NO: 2053 - DNA, 5188 bp, Unknown
  R17_18m  MAG No. k141_50330
cctgcttgaacccactggtgcggggatagatgatttagttgacacgcctgcgggaatctggtggggatttcgctggcacaccggatttcaagcaaaccccgcctcgggaaccgctccggacttcggcgttggcccggttcgcgcgtcaaacggttgatatgtggaccgggacaagccagtggcacggcgacacagcagatgcgctcaattgcaccgtaagccgtacggtttcgtcactttttcattcgcacaacgagcaaaaccacatgacctttgtgcgccaccgccacatcaaccgaccgtcgcctttattgtggcggtttccagtatggcaacaggacagaaaagcctcctccggtgagagccggaggaggcttgggtggaagcggacctttacttcacagagtcctgcaattcaggactggcctacggccagacccaacatgacctcgcgagtacgcgacctatccggccgcccgggccgggaaacagcccacggggctgtttccttaatcggctcgtctcgctcgacgcggtgaagtaaagcagcgctgcgctgttttacttgaccgctcccctcatcacaccaccgacgacccacttttgggcgaagatgtagacgatgaggatcggggccatggccatcaggtagctggagaaggccatcgggtagttggtggcgaactgcgagctgaagacgtactgggcgagcgggatggtctggttcgactggtcggtcaggatgatcaacggcaggaggaagtcgttccaggcccacagtgcggtcaggatggcgatggtggcgttaatcgggctcatcagcgggaagatgatggtccagaaaatgcgccacgtggatgcgccatcgattcgggccgcctcttccagcgaaaccggaatcgaacggatgaagccagtggcgatgaacaggttcgtgcccaggccgagcaccgtgtacaggatgatcaggccgacctggttgtccaggtgcagggagcccatctgcttcgcaatcggcagcatgacgaccgggaacggcacgaacatggcggcgatgaagaagtagtacaggaagcggaagaagcgcttatccatgttgcgggccacagcgtaggccacgaaggtgttggtcagcaaggtgagcaccacggcggccaccgtgatgatcgcggagttgagcgcggccttcgggtagttgaccttggcggaggcgtcggcgaagttgtgccactgccacgaggtgggcagggcgaaggtgccggcttcggccggagtcttcagcgcggtgacgatggtgaagtagagcgggatcagaatggtcaggctcagcacggccacggcggcggtcagccaccagttgatcttgtggtccctgcggaacttggcgggcttgccggacttggacggggtaactgttgcagtagtcatttcttatcctcccctaaatcagatctgttcctggctgcgggagatgcgcagctgtacgaaggcgatgatcgccagcacgatgaagaagagcacggcgtttgcggtctggtaggcgtactcgccaccggtcaggccacccttccagatgaggtaggtgacggtttcggtggaggagttcggaccgccctcggtcaaggcgacgacctgatcgaaggtgccgagcgcgttcttcatggacagcacgaggttgatggtgaagaacggtccgatcagcgggaatgtgatcttccagaacttctgccaggcgttgacgccgtcgatggcggcggcctcgtagatttcgtcgtcgatggtctgcaggccggcgaggtagatgagtaccgagtaggcgatgccctgccagacggcgaggaagacgattgggatccagctgagttgctcattggtcaacagcgaggtggacagccacttgatgcccagcgccttgccgagctcgggcagcgggttcatgaagatgtacttgaacacgtagccgatgaccagcacggagagggtgtaggggatgaagaagacggctcggaagccattcttgaaggcgatcttcgagttcagcagcaccgacaggaacagggcgatcacattaatcagcaccgtgatgagaatggcgatgaggaacgtgaacaggtaggcgtggcccacgcggttgtcttggaagagggcgatgtagttcttcaggccgatgaacttgtaatcgccgtagccctgcgagttggtgaaggaatactttacgccgtcaagaaatggcaggtacaggaagaaggcgaaaatgatagccgccggaaccaccatccagtagtaggcggggtccaccttgcgggtggagaaggcggagaccttcttcttggccggtttcttggcagcggtcttggttgcggttgcgtgtgacatgatgttctcctctcctaccgatcactcgaaggtcctggcttggaccttgtcccattcggtctgcatctggttcaggaagcggtcggtgttgccggaggtcaccatggtctgcaggtagccgccgatgttgatggacgaaggaatgtagtggtcgcagaagtcggccagtcggttttcctcgaagaacgggcgcacggtttccagcgcatcgttgccgaagtaggtgtccttcagcggcgtgatggcggactgggcgtcggcgtaggcgtcaagctgatccttctgcatgaggaactcgacgagcttcatcgcttccttggggtgcttggtgttcgcaccgatggtgagcatcacgtcgtcgccggcggtgaggatctgctcgctggcgtcatcggtggccggcatctgggcgaaaccaagttcgatatcggggttgatcagcaggatctgcgggatggcgtaggtgccgagcgggatgatcgcggccttgccttgggcgaagttctgcgtgccctgctggtaggtgacgccggtgtccgcagtggagtaggtgaagagctcggattccttctcgactgcggtcttccacagttcctggaacgtggtcttgccttgcttgagctcggtgtacttcgattcgggaaccagcgtgccggccagggaggcgagcggtgcctgggtggtccaggcgtcggccacggaaccctgcagcgggttgatgccggcgtccttgaaggtgttgagcatatcggtgaactcgctccaggtggtcggcggattctccgggtcaaggccaaccttgcggaacagagccttgttgtagatgtagccggaggcgttacccgcgaagggcaggccatacaggcgcttcttggaggaatcggtggtctgcaccagattcttggcgatctgcaccatgccggggttgagggtgtccacaatgggttcatcggtgaagtcgtagaacacaccggaggcggcgaagttgccgaagctgatgtcgccgttgaaggtgatcacgtccggcacacgattcttgacgaaacgggtgcgcagatcggtctgggcgttggcggagttgttgatgttgaccttgatggtcgggttctgcttctcaaagtcggcgaccatggacttgaactggtcggcggcctcggacttgaactggaagaaatccagcgtgacggtgcctgcggtgctggagccgcagcctgccaggccgaacccgacggcgatcgcgcacatcacggcggcggtgcgcacggccagacgcttcagtctaggcgttgcatgtggggaatcggacagcataattgttgactcctttatctttcttttcctccggcttcggtgccggcggttcttccactttccaaggtaacggttcggccatttcattcccagcgccagcgagcccacttgcgcaagcaacaaaaagcgcggtattttgtgattaacgcaataaatacagcgaaggggcttgcatgtctgatgtcaacgcgattccacagtggttttccggatccgagcatacgcatcgcgtggcggcggcaattgcccaatacgggccgatagcccgcactacgttggcacagatgctgggactgagccaaggggccttgtcccgcatcaccagcgatctgatctacgccggggtgatcgaggagcttccggccgaggccggcccgtcaggcaagctgcccgagcgattcacgccaagggaaagttcggatcgtcgcggacgcccgcagacttcgctggtgttgtgttcgaacgcacgcaccttcattggtgtcaaggttcatgggatgtcgattgtggccgctgcggtgaacgcgcatggcgaggtggtgtccggccggcacgaggtgccgatcggggcggatcagtcggctgagtatgtggtgtcggccatcacgcggctggtgcgcgaatgttccgccgatatcgcctcttccggactgccctcccccactgcggtgggcgttgcggtaggtgggcatgtggtcgacgattcgattgtgacgttcgcgccgttcctgcattgggacggggccacggacttggggacgatggtcacagaggcgaccggcctgccgtgcggggtgttcaatgatatcgattctctgctggtggatgcctcctggttcgggccgggtgtcggcgtggatatgttcgccgtggtgaccatcggcgtgggtgttggttattcgctggccgtgaacggcaagccagtgcagtacccggataagagctatggtctggtgggccacgtgcttatcgatccggaggggccgcgctgcaccagcggacatatcggctgttcacaatgcttgactgacgattcgatcgccgaacagtactctgcgattgtgggtcgcgcggtcagttttgaggactttgcgcgcgatgccaagggacgcgtgccgcaggccacgcagttggtgaaccggacgtgtttccggttgggttcgctggtggctacggtggcgaacatcgcgatgcccggacatgtgatgattgccggggagtccgcgtttttggccaagctcggcaccgattcgctgcgcgatggcattcgtttctaccgtcacagccagacccagccggtcaagttcacgattatggaccacgactggcagctctgggccaaagccgccgccagtcgcgtaatcgtgaagcatattgggtaggccgttcttggctcccctcagagagggaagccaagaacgttgcttcgccacagttactccgccacgaccagcaattacggacttgcctatcggcaaggctcaatcccaccttcgctcag

SEQ ID NO: 2054 - DNA, 3986 bp, Unknown
  R17_18m  MAG No. k141_50751
agcggtcggccaaggtttgctcatggctcgctacgagactgcttttggccgtttcggtattcgcgtaggccagattctgattaccgctgaagacacgattcgtgccacccagtaccgcaatgtggaacgcacgctggaccgtctgctcgacctcggcgtggtgccgattatcaacgaaaacgattcgttggcctcgaacgagattcgtttcggcgataacgatcgactctccgccttggtagccaatctggtgcgggccgaagccttggtgctactgaccgatgtggacgcgctgtacactgcaccgccctcgcagcccggctcccgccgtgtggaatatgtgccgaacgttatcgatgcacttggcgacatccaagtctccggctccggctccaaggtcggcaccggcggcatggtcaccaaactcgaggccgcgcgcgtggcggccgtctcgggcatccccacggtactcacctgcgcctcgaacgcgggcccggcgatgatgggcgatccggtgggcaccgtgttcgcaccggttaaggcccgcggctcatcacgccgtctgtggattggcttcgccgccgacccgcgcggcactattgtggtcgatgcgggtgccggccaggcgattcgcggcgggcgtgcctcgctgctggcggccggcgcgctcgaagtgcatggcgatttttccgccggcgatccggtctggatcgatgccgaaagcggcgaacatctggcccgaggcctcgccggcttcgattccgaagaaattccgcagatgctcgggcgtaacaccgcccaactcaagcgtttcctcggcccccagtacgcccacccactggttcatcgcgacaatcttgtacttgtgtgactgatgggatctgtcacacaacaggtttcatcaccatagtgcggctctggcgatttttcgtgctgtaggtttagcatggaagccatgactatggcgcaatggcagactctttccgaccgtatcaacactgtggcaccgagcgctacgctcgccgtcgattccaaggccaaggccatgaaggccgccggacttgacgttatcggcttcggcgcaggtgaaccgaatttcccgacccccgcaaacgtggtcaaggctgcggcagatgcctgccttgacccaaagaattacaagtacacgcctacgccgggcctgcccgagctgcgcgaagcgattgcggctaaggtgctgcgcgattccggctacgaggtgtccgccgaccaggttgtggtgaccaacggtggcaagcaggccgtgtatgaatccttccagatcttgctcaacgatggcgatgaggtcatcatccccgctccgtactggaccagctatcctgaagccgtcaaattggcgggtggcgtgccggtcgaagtattcgccggtgccgacgtgaacttcgagccctcgcttgaggcgctggaagcggcccgtaccgagcgtacgaaggcaatcatcgtcaactccccgaacaacccgaccggagccgtctggaagccggaaaccgtggaagcgatcggtcgttgggccgtcgagcaccacatctgggttatctccgacgagatctacgagcacctgaactacgacgacgcgcgcaccacctacattggtgccgccgtgccggaatgccgcgggcagctgctggtgctgaacggcgtggccaagacctatgcgatgcctggctggcgcgtgggctggatggtcgcgccgcttgaggtggccaaggccgccaccaagctgcaggggcatatgacctccaatgtggccaacatctcccagcgtgcggctctggccgccgtggctggcccgctggacgaggtgcatgagatgcgcaaggcgttcgatgcacgtcgccgcgcgatcgtggctgctctgaacgatattgagggcgttaactgcccgactccgaccggtgcgttctacgcttttgcggacatcaccgctttgcttggcaagccgctggggcccaacggcactgtgtccgatacgtccgctgattttgccgccgcactgttggatgaggcccacgtggccgccgtccctggtgaggccttcggtgctcccggttacctgcgtttctcctacgcactggccgacgaagacctagccgaaggcatgcgtcgattcaaggaatgggctaactgagaagagtcgtgtgccgcgcacatgccgcgcgcgcgacacgcgatttgcgataatccaccggagccgttactataacaacttggcggtttcgccgtggcgaagcgttctctacggaatgcacgccgaggtggattttcacctagggaagtggcgcaattggtagcgcaacggtctccaaaaccgtaggttgtgggttcgagtcccgccttccctgccaagttttcaataatcaagcagctgacgcgaggtacagaatggctaagacgaacaacagcgaaaaggtagtcaagccgaatgtcttcatgcgtatcggtctgtttatcaagcagatcatcgacgagcttcgcaaggtcgtaacccctactgccaaggaactgttcttctggtctctggctgtgtttatcttcgtgctgctgctgatggccctcgtcacgggcatggacttcggtctgggcaagctcgtgctgtgggtgttcggctgatccgcacaacctaaggtgaataacaacgcatgagtgatgaactgaatctcgagaatctcgacgccgtgccggctgaggagcctgttgtcgaggcttccgaagctgctgccgatgaggcagctgccccggctgaaccggttgctgacctttccgcagaatctgacgcatccgtcgacaatgcagatgttgagtccgccgctccggccgcgactgaatccgctcccgttgcttccactcagaccgagaccgtttctctggatgaggacgaggaagaagtcaacgaatccgagcaggccgaggaaaccgatgccggtcagcaggccgttgacgaattctccaagtccctgcgttcccttgatggcaagtggtatgtgctgcacacctactccggctatgagaagcgcgtgaagaccaacatcgagtcccgcgtcgcctccttcggcatggaagatcagatcttccaggtcgaggtgccgatggaagaagtcgagaagcacaccgaaaagggcaagaaggtcatcacccgcgtgcgtgttccaggctacgtgctgattcgtatgtggccggatgagaacgcccgccgtatcgttcgcgaaaccgaaggcgtgaccggcttcgttggcccgaccaaggatccggcaccgctctcccgcaaggaagtcgtggcgatgatggctccgatgatcgcttccgaggcactcaaggccgccggcgacaagcccgccgccgccaagaagcgcaaggtcgaagtctcctacgccgttggcgatcaggtcaccgtcaccgatgggcctttcgccaccatggccgccgttgtttccgacgtggagcccaccacccaaaagctcaccgtgctcgtgtccatcttcggccgtgatacgccggtggagcttggcttccaccaggttcagaagctggattaaccccaaactttgcagagcccgaccatagtggtcgggctttttgtgttgtccgggtggatttgcataataggaaagcttgtgtctggagggaagacccgctagcacagcacagcaatataagttgcgggaggagaccgaccacaggccgattgcctacagcatgcacggataaataacgagtcaagaccgagcgtgatagcagacagccgaacctgaggacggcgaccattcgaaccgcgttatagaaagaagaaccataatatggctcccaaaaagaaagtctcggcgctgatcaagctccagatccaggctggcaaggccaacccggccccgccgctgggcccggctctgggttcgcatggcgtgaacatcatggacttctgcaaggcatacaatgcccagacgcaggacaag

SEQ ID NO: 2055 - DNA, 13348 bp, Unknown
  R17_18m  MAG No. k141_51218
agggcgtgcttctggtggtgggtttcgatggaggagccgaccacgtcgaacgcggcggaagcctcttccagaaggccacggtcttcgttggtcatcgaatcctcgtccagcggcggaatctcgccgaagttcttgttgatgaggttggccacgcggttcaccaggttgccccacgaggaggcgagctcctcgttgttgtggcgcacgaactcggcccacgtgaagtcggaatccgaggattcggggccggccacggaaatgtagtagcgcacggcgtccacggggtagcgggcgaggatgtccttgacgtagatcacgatgccgcgggaggagctgaacttcttgccttccatggtcatgaactcgctggccaccacctgctcaggcaggttgagcggacccatcgggccggtttcgccgcccttggagcccttgccgttgtacgccagcatttcggacggccagatctgggagtggaaggtgatgttgtcctttcccatgaagtagtaggccgggcagctcggatcgttccaccattcacgccacttctccgggtcgccctggcggcgggcccattcgatggaggccgacaggtagccgatcacggcgtcgaaccacacgtacagcttcttgttcgggttgtcgatccagcccttcaccggcaccgggataccccagtcgatgtcacgggtgatggcgcgcggcttgacctccttgaacaggcccagcgagaagttgatgacgttggtgcgccagcccttgcgggtctccagccatgccttgttggcttcggcgagcgccggcaggtcgaggaagtagtgctcggtctgctcgaagcgcggggtttcgccgttaatcttggagacggggttgatgagctcgtccgggtcgagctcgttgccgcaggcgtcgcactggtcgccacgcgcaccttcggcgtggcaaatcgggcactcgccctcgatgtagcggtcgggcagggtacggccggtggacgggctaatcgccacctgctgggtgcccttgtagatgtagccgttctccaagcactgcttgaacatctcctgcaccacgtgctcgtggttaccggtggtggtgcgggtgaacaggtcgtagctcaggccgaggtcgcacagatccttggcgatcacgcggttgtaacggttggccagttcctgggcagtgaggccttccttctccgcctcgacgagaatcggggtgccgtgctcgtcggtgccggacaccatgagcacgtcattgcccttcatgcgctcgtagcgcgcgtagacgtcggagggcacaccaaatcctgcaacgtgaccgatatgacgggggccgtttgcatacggccaagcaacattcaccaaaacatgactcataaggcttgattatccggcgcggcggggacacgcccggatagctgccgcgccgccatcctcatcccactcacctatccacccgtaacttcccccacatacttatccgtacaccgcttgcgcgcttatccgcatacgcattcgcacacgtatccgtacgtgcatccgtacacacgtccacgcacccatccgtacgcacgtccacgcacatccgcacacacttccgcctgtcgatatccaccgagttatccacatcattcgcgcacctagtgaagttatgcacttatccaccgttttcgcttatccggtggcgcgcaagccgtacttctgcatattgttcgatcatggatatcacagcaggtccgatgacggacatcacaacagtcacctcgccggcaaccgcgcagcccgcggtgccgccgatactgtttaccaagaatctgccgggaccgctcagccttaaccgtctggccgccttcggcgcgttacgtaagctcgacgattccgccggctactggatcgagcattcgggcacactgtatggtcgcgcaaaaatcgtcgcggaggtcgccccgtttggcactgtggtgtgttcgatgaccgccgcttgggtatggctgggaggccccgactttccgagcaccatagacgtgatctccacatcgcacttccgctcggcatccgtcagccgccgcatccgcgtattcaaaagattgacgttgccggagcaaatcatcaagctcggcgggctgcctgtcaccacgccagcccgtacggcttgcgacctggtgatgagtcctgaagacatccccgatccttccaccgtcaacgcactggtgtgtcagctgatgtccgcgtaccagtttcggccaaacgactgtctgcaaatcgtcaaggagcatcggcatcacaagtatgccggacgcgcacgcatgttttttgaatcggtgcagaaggagattgacgaaccggctttggagcaatgcgcatgacgaggggattcatcgccaaaggacatcgtagaggccgctatgccgctcaccgtttacggcatttgcggcaggcgcaacggttgcctcgccacgcggcggcggcacactcatccgaatccgcatcgcgcgcaatctcggatatgaccgcgccgcctgaaccacccatcagacttacgcccgcggtggcatgttcgcccgatacggatgttgccgtgctctggcacatcgcatatcacgtgcccgaactgcgtaaatggctggttgccaatcccaaagccgacgcgcctttgctggaattggtctcgcagcgtggtgggcctggggtccggcaggcgttggaaatattgttcgagtcgatggaagcgtaacggggagataatcgccggctgctgcgctatcccttgattttcagcacagccgcatacacctgcttgcgattggccaacgatccgtcagccagtggatgctcctgcaccacttgcgcgatggcgtccttgatacgcaggccttcctccaaagcacggtcgatggccagcacggccatgtcatccacgctcaacgtactgggcgcggccgcttcggcctcctcgttggacgcgccgccgatgaccagcaccatctcgccacggggcggatcatcaatcacactttggcgaatctcgccaatcgggccgcgacgaatctgctcataatccttggtgagttcgcggcacagggccatcgggcgattcgggccgaacgcgtccagcagatcgtccatcgaatcggcaatgcgatgaggcgtctcgtagaacacgatggtgcggcgttcgggcaacagcgtgcgcagatactgcacgcgctcggaatgctttcgcggtaggaagccctcgtagcagaagcggtcggtgggcaggccggagagggcgagcgcgtcgagcacagcggaggggccgggcgcgcaggtgacgggcaggccgcgttcgatggcatggcgcacgatggccaagccggggtcgttgatggtgggcatgccggcatcggacacgacgagcacggtggcgccggtttcgacctgatcgagcaggccatcggccttgtcgcgctcgttgtggtcgtgataggcgatgacgcgaccgttcacatagacgccgaggcgacgggcgagatcgtagaggcggcgcgtgtcttcggcggccacgatatcggcccgctccaagagggccaccagacgggcggaggcgtcgccaacgttgccgatcggggttgcggcgagcaccacggtgccggcggggacggtcacggccgattcgcgggattgggtggcggcggattcgccggcatgaacttcatcattgcgttcaggcacttgcgtcacgctaccgtcagcgtcatactgctcattcaactcatctgcgcttgtcatactcccagtattgcccataccacagagcaatccacgacaatccatggcggaatcgaggcattctccctttgcaggggctgatttcacatgttccggaagtctacttccgtttcaaggggctcctcatccggtgaagcaccagtacaaacggctttgacgcaacgctattccgccattttggcggcatatctacttgaccatcagcccctcgaaacgcaagtagacctccggcaaaccccaaatcagccccttgaaacgcgagatggcagaatttcaacgaagacaaataaaaagaccctctgcggtggaatgaatgcagagggtctcgtggagctgacggtagtcgaaaccgcgacctcttcgatgcgaacgaagcgctctaccaactgagctacagccccttggatgttactttgctccgcaaagcaactcgcaacaatatagtacggagtgcggtcaaacgcaatttgacgccgaagtgtcgcagacggggtaaatcacccacaccgctccgcatggataccgcggtggcacccggcaacgtcatcatgcttccagcacatgcagcactttcttttcgttgtagaacgcgaatacgatgccgcccaagccgcacagcacggccgcgcacacggcggcgatgcgatagcccgcgccggacgccatgccgatggtggagacgccggtgaacagcagcatggccacggactgccccatcttcatcgcaaaggtgcgggccgcgtagaacatgccctgacggtcctggccggtggtcttggagctggcgtcggcgatattcgccacgatggcttgcggcagaatgccgaacgcggccatcggaatcgcgccgaccaccgagagcgccaaaccctgggccatcgccggaatgaagccgagcgcggccgaaccaagggcgccggcaaatgcgaacgcacaggtgaagatcacgaaggcaaccagcagcaggcgcttcttgccgaccttattggccaagatattgaccggcagatagaacagcacggagacgccggtcatgagcacgaagtagatggtcgtggtggtttccggcagcttgagcaggctggtcacgaagaacggcagaccggtctggaaggtggtgatggccacccagtagaccacgtcggaacacacgaacttgcggaattcgccgtcgccgaacgtctgcttcagggattcgatggccgattcggaggtgggctgggagttgacgtagtccttctcgcggatggccagcggcggcaccagcatgcacacgaacgccacggcggccatgatggtgaaggtcacgcggatggcggtgatacggcccatcatcggcacgaacgcgccccaaatcaccggcgccacgtacgcgatggccgtgccggccacccaagtgaaggagatggcggtggagatggtgagttgctgcttggagtcgtggccgagttcggcgatgagcgcgttgtacggcgtgcagtagaacgtgaggacgatgtagtagccgatcacggtgacgaacaggaacgccgcgttcacccagccggtgccgttgatcggactccagaacacgagtacggtgaccaccgcgagcggcagggcggcgaatttcaggaacggcatacggcggccggatttggcgtcgcaacggtcggagagggacgccacggccgggtccacgaacgcgtcgaagaatcgggcgaaggcggtgatgccgcccaccacggtcacgatgccgagaacgaccaggccctgcggcacgaatacggtctgaccttgggagatggtctcctggtcaggttggtagaaatacacgagccagttggagatgatgccggaaagcagcgcccacccgaactggccgaccgcaaacgcccacactttggcgatggggagatctttgatggctgatttcgccggtgcaacttgcgcgcccgttacacttgctgtagtcgtattgcccattccccataacctccgaatcaacattgacacagtgtcaaaaaccagtatacaccggggttttacactcaattccctgcagggcaaaaccgcacaccacaatccacaccccgagccgccttcccctcagccatccgcaggctctacgatgagagccatgactggtctggccgaacgactaccgcacgtcgccgctttccccgaagcgctgggcaccgggttgctgctgcataccgatgtcgcgctggacgacgggctcagtaactgcatcgatatgttcatcagcacctatgaagccgcattgtcccggttcaaggatgattcgacggtcggccggatgcgcacggccacgcatggcggcacgttcgattttcctgactgggcattgggtttatttggcctgtacgaccagctgtttgcgtcgactaatgggaccatcgacccatgcgtgggcgaggatttgattcggcttggctatgacgagtcgtattcgtttacgcctgcgccagatgccgctgaacatgcaggcgcgatccacggacgagccatttggtcagccgacgttgagcggcatggcacaacactggtgacgcgcggaccggtcgcgctcgatttcggcgcgtgcggtaaggggtatttggtggatttgcttgcggggatgttgggtgatggcgcgggtcaccctcaacccattcaatacgtcatcgacgccgggggtgatttgctagtgcacacggacgaaccaatcaccatcgcccttgaagatcctgccgatccggccaacgccgtaggtacggtcgaaatcagccacggcgcattctgcgcgagctcccccagccgccgccactggtctgacgccgcaggtcaccaacttcaccatctgctcaacgccatcgacggactaccggttgacgatgtagccgccacatgggtggccgtcacgccgccatcgagcgccataaccacgaagacatcgacgcatggcagcaatgcctcgacaacggcaaaccgcgataccgacgattcgtcgaacaccgttgcggcacacgtccctgtcacactggccgacggcctcgccaccgccctgttcaccaccccggccacccagctgcgcgctcacttccccttcgaatgcgccattctcaacgccaaccgcaccgccgcccaatcccccaattttcccggcggctttttcacacactaatgtacgaaatcatcagtatcacatccctcgggtggaccgatgggttgctcccctcagtcagctacgctgacagctcccctcggagaggggagccgagtatagctaatccgctaatccgctaacgcaggaaacaatccgtcagtcagcgagtgcgaactggctgttgtagaggtcggcgtaaaaaccgcccgccgccagcagctcgtcgtgcgtgccgcgctcgatcacgtcgccgtggttcatgacgagaatcatgtcggcgtcgcgaatcgtggagaggcggtgcgcgatcacaaagctcgtacgccccacggtcagcgcgtccatggccttctggatcagctcttcggtgcgggtatcgaccgaggaggtggcctcgtcgagaatcagaatcggcgcgtcctgcaccatcgcacgggcgatggtcagcagctgcttctggccctgggagagcgacgacttgtcgtcgagcacggtgtcatagccgtccggcagcgagcggatgaagtggtcgaggcccacggccttgcacgcatcctcgatctgcttgttggtcacgccgggcttggagtaggcgatgttctcgcgcacagtgccgcggaacacccacgtatcctgcagcaccatggagaactggtcgtgcacgttccagcgcggcacggacttggtgtccacgccgtcaatcgcaatcgagccgccggaaatctcatagaagcgcatgagcaggttgaccatggtggtcttgccggcaccggtcgggccgacgatggcgaccttctgcccggccttgacggaggcggagaagtcgtggatgatcggcttgcccggttcgtaaccgaactgtacgtggctgaattccacgtcgcccttcacttcgtgaccgttggtcccaagcaaagcggacttgccggattcgtcctccatctccggctcctcaaggaaaccgaacacgcgttcggcggccgccgcgcaacgctgcaggttctggaaggcctgggcgaactgcgccaacggctgggtgaacaggcggacatacatcatgaacgccacgatcacgccgaactcgatctgcccgtcgagcgcgagcgccgcgcccaccacgcacaccaccacgtagccgaagttgcccacgaaattcatgagcggcatcatcaggccggagaggaactgcgacttccagccggactcgtagaggtccgagttgtacttctcgaagcgacgaatcgaatcggcctcgccgttgtatgccttgacgatgaggtgaccggcgtacatctcctccacgtggccgttgacgtcgcccagcgccatctgctgccgggcgaagtacttctgggaggacttcatgatggccatcatgatgatcaggccgatgaggctggcaccgatggcgcacagggtcatgatcacgttgttgtagaacatcatcaccagcgcgcccacgaacagcgtcaccgaggtaatcagcgagccgagcgactggcccagcgtctggccgatggcgtccacatcgttggtgatgcgcgacagcacgtcgccgtagctaaccttgtcgaagtatttgagcggcagtttgttgattttgaccgagatggactcgcgcagtcgctgggcggtgcgctgggtgacgttggccatcatccagctttgcacgtagccgagcacggcgtagcccacgtacagggccaccaaagtccaggcgatgtggcccaccgtgccgaaatctaccgagttcatcaccggtctgccgttgacgatggcgggcagacctttgacgatctcgttggtcatgtccttgagcttgtccgggccgacgatctggcagacggtgccggccgcgcccaggatgagcgcgatgatgatgacgggaagatagttgcggcagtagttcacgagtttgcccatgactttgccgaaatcatggggcttttcgacggcacgcctgccgcccattggtcctcttggcatttgttttactccttaaaagtccgtattgacctccctctgatgagggaggtggcgcgaagcgtcggagggagagaagccgtacgcgactacccctcagtcagctgtgctgttttattcgctcgcttatcagctcgtcttcgcctgggaacagcccactgggctgttccctttacggctcagcccctgacatggggagctaccgctgccgcccccctacgccgtaagctccgactggctgagctgggattcggcgatctggcggtatacgtcgcagttgtcgagcagttccttgtgcgtgccctgacccacgaccttgccgtcgtcgagcacgacgatgcggtcggcgttcatgatggtgccgatgcgctgggccacgatgagcttggtggaatccttggcctcgcgggcgagcgcgtcgcgcacttcgcggtcggtcttgaagtcgagcgcggagaacgagtcgtcgaaaatcaggatttccgggtgacggtacaccgcgcgcgcaatcgacaggcgctgcttctggccgccggacacgttcgatccgccttgggcgatcgcggcggaatacccgccgttcatgcgcgccacgaactcgctggcctgcgccacgtcggcggcggccttgacgcgattcagctgctcggccggtatatcggcaccttccgcggcctcgccagcggcgatcaacgcggcctcgcgcttgcgcccggccggggtggaggtatcggccatctcgacctccgccgggtcgcccggctgatcgccgtagctcacgttggaggccacggtgcccttgaacagcacggactgctgcggcacgtagccgatcttgtcgcgcagggccttcaggtcgtagtcgcgcacgtccacgccgtcgaccaacacctggccttggctggtgtcatagaagcgcggcacgagattgataagagacgacttgccggagccggtggagccgatgaacgccaccgtctggccctgctcggcggtgaagttgatgccttccagcatcgcctcgcgcgaatccgggtaggtgaagctgacgttgcggaattccacggtgcccctctggccggttttggccacgtcggcggcggttttggtgccgttctcgacgattggctcagtgtcgagcacctccatgatgcgctgcgcggacacgtcggcgcgcggccagagcacgaacaccatgctcatgagcaggaagctcatgatgacctgcacggagtagttggagaacacgaccatgttggagaacacggtgagcttgtccttgagcccggcggcgtcgatgaggtaagcgccgatccagtagacggcgagcatcaggccgttcaggacggtgttcatcaacggcatcatgaacgccatgacgcggttggtgaacagctgggtctcggtgaggtccttgttggccttggtgaatttggcttcctggtagtcctcggcattgtaggcgcgcaccacgcgcaggccggtgaggttctcgcgggccacgaggttgatgttgtcggtcagggtctgcatgaccttgaacttcggcatgaccatggccatcatgacggtgatggacaccagcaggaccgccacggcgatgccggtggcgagcgtccattcgaagccttcgccggcgatcttgcacacggcccatacggccatgatcggcgacttgacgatgagctgcaggcccatggtgatgaacatctgcacctgcgtgacgtcgttggtggaacgggtgatgaggctggcggtggagaacttgctcatctcggccgggccgaaggactcgaccttgcggaattcgagcgagcgcagacgctgggtgaacgaggcggccacgcgcgcagcgatgtagccggtgatgatggcacacgccacggatccgagcgagatgagcagcatcttgccgcccgcgatccagatgtccttcatgtcgctgcccggcgtctcgaccagcgtggtgatgtctgacatatagtcgggcagtttcaggtcgaagtagacctgcccgacgatggtcaccagggcgatgagcatctgaccgatctccgctttggagaggtatttcatgatgcgaaacattggtttccccttgtgttggttgggttggttattggttattggcgattggttcttaagttggctgggttatcggtgattatcggttcacgatgtcttaatagtttccattgtttgattacttacactgtgagatattatacgcacttctgtatgttcgctgtgagcgtcctcaattacctttacctccctctgacgagggaggtgtcaccgcgcagcagtgacggagggagagacccgccagcgggaggaagctagtctcgctcagcctccgcgcacttagctgccatgtgttcagccacgcgcttgtcccgctccacgaatgcctcacgcacttgttcagccgtcggccgaggccgccccggatggcaaatcgacatatatgtggtgaactcagacaccaggtcaacgaattcgcgcgtgcgccgctcccccatttgcaagaaaatccagcaaattgcggaacgcatttcctctatcatccgatgagactgctcgcgcccggaatcagtgagattcacgcgaataatgcgccgatccttggaatcaatgtcacgcgtgacccagccttttttctccagagacgacagcacagtggagatgcggccggaactggcctgcagcgccgatgccaattgcgatggcgtttgcgtccccttcatggacagctcccggagcacgaactgctcaccatgggctccacgagtgaattccctctgcatcgtcgaacgattgccccacacgctggcatacagttcactaactgcttcctgctcaaatcccataagagcaccatccattcccattcgccacacggcagagcgccgcaaacaccccaagaatatctcacaccgtaaacaattcattactagaaactatttttggaacgcataatgcacacactccacgctctttgatattctgaaagccgcatagatattcacttcggggcgtcgtctaagaatatttgctgggccaacggtagcgacgttggcattgtgctccatgaggtatctggtcgaaaaggcggacgaagacaggccagttgggcggagcgcgcccatacctcaaaaccattgcaattattggctttgaccattttcgtggagtcacgaaaatggtcatgaaaaacataaggacacacccatgaaccgcgacgaaatcacacgcaaaaccagcgaactcagcactatcgcacacaccaccgaggactccaaagttgagtattggtatgcacgcgagctaatgacctatatggggtacgacagatgggaaaacttcagcaaagctattacacgagccaagcaagcttgcgacaattccggcgtatccgttgaatcccatttccgtgacactacgcgagacgtgactctcggcagcggcgccacccgctccatcgcggacgtcaagctcacccgatacgcctgctatctcattgctcaaaacggtgatccaaagaaagaagaagtggcacttctccagagctattttgccgttcagactcgcaaaacggaaatcattgagcaacgcatgggagaaatcagccggctcgccggccgagaggcccttgccactgcagagaagaaactctatccgtatacccaaatcacacacaacaaaaccacacaagagcacatgtacacgcccaaccacgccgcagaacgccggcaaggatgtgatacaggccacagaaagcgttgtaccgcctaggcaatgcaacaattgtccgctatgctctgaaggcagatggcggcacggatgccatcccaaagagggggtatgaccatgattcggggtatgaacctatgcagcatcgccggctgcacgcacgaagcagaagaagcgggcatgtgcaacatgcatttcacatcggcgctggttcacggagcgctgcactacactgcggacggacgtccgtcgcactgctgagcgcaacaacaaagcaaaacaaccagtaacgctcaacggcttccacatgttcatgctctaattgcatgtacttgcagacacaatggccggtctgagccagctgccctcgcatggagcagctggctcagaccggccattattgttgctttgtactgtttgcactgtattgcgcctgcattgcgcaagctcgggcgcactcgggtgcactcgctgagtggcgtgaatcgcagattgctcaatagcaacgcaatccacgccactcagcagttgccatggttatgcgcggcgtttgcggatgacgagcaaggcaccagccgcagctgtcagcaccacaaccacgaccgcaatggcagccacggcaacacccgtattcgaaaggggcgcagcgccattagcagccggcttattcgtggcagtgttaccgggctta

SEQ ID NO: 2056 - DNA, 4610 bp, Unknown
  R17_18m  MAG No. k141_51749
agcaccgggaacatgacgccgaagccgtagcccatggcgatgttcaaccagccggcgtggtgacccttggtgttcttgagctcgacgttggccacggagccgttgccgaagatcatcagaatggcggtgccgaagaactcggcggccagcttggtaaagagagagtattccactgcttcttcttttctcttcgccgcgcaacaggcatggctgactgttcacggcattctgtgtgattggaaatccgttcgcggagccggcgacgcgatttacgctgggcgcgaaagcaaacgtggcgattgtacactttgccccacgacgaaatgctggcaggatgcgatgtcgaatgtccagccgaatgcaatgcccaaaaaagccaccggaatcagccgaagcgaccttgactctcagtggttgcgaatgacgttgcgcaggggtaggacgctggtgggcgagacggacagttcgtcgattcctaggcacaggaacgtatcggtcaggctcaggtctgcgccaagctcgccgcagatgccgcaccagatgccatgacgatgggcagcctcgatagtcatctggatcatgcgcagcacagctggtgaatgcgggtcggcaaagcgttcgagactcggggtctgacggtcacaggccagcgtgtactgggtcaggtcgttggtgccgatggagaagaaatcgacttcggcggccagctcgtcggccatgatgaccgacgcaggcgtctcgatcatgacgccgatctggatactctcgttgaagtcggtgtgctcgccgcgcagctcgcttttggcttcttcaagaatccgcttggcgtcgcgcacctcctgcaccgaggtgatcatgggcagcataatggcgatattgccgtatgctgaggcgcgcaacaatgcgcgtaactggactttgaaaatctccgggcgggtcaggcagatgcggattgcccggtaaccaagcgcggggttatcctcgtggtccagattgaagtagtcgacctgtttgtccgcgccgatgtcgagtgtgcggatgatgaccggacggtcgcccatctcctgtgcgacttgtctgtatgcatcgaactgaaattcctcggtcggccagtcctcgcgttccagatacaggaactcactgcggaacaagccgatgccctcagcatcgttggccagcacggcggctacgtcagagggacggctgatgttggcgtacaggtggacccgctgaccggacttggtttcggtgggcttgcctttgagcttccgtagtaggctcaggtgttcctcagcttcggccttcctgcgctggcactcggtcagcgtggcctcgtccgggtcgacgaacaccgcaccgctggcgccgtcgattacggcaacgtgaccgtcatcagtcgggtcgaaggcgtcgccgataccggtgatggcgggcaggcccatcgtgcgcgccagaatcgcggtgtgcgagttcgctgagcccttggcggtcacgaggcccaaaaccttagcgcggtcgagctgcgcggtctcgctgggagcaagatcttgggcgaagatgatgtggctttcgccgttctgcgcaatcccgttctgcacagtaccgttctgcacagcatcgccttgtatactgccatcctgcgcaatcccgttctgcacagtaccgttctgcacagcatcgccttgtatactgccatcctgcgccgtgctatcacgtttgccttgcagcacgttcatcacgcggcgagaaacatcctcgacatcagcggctcgagcctgcatggtcgagctatccatcgcagcgaacatggcggcgaactgttcggcgacgcttttcaccgcaaattcggcgttcaccttgtcttgcgcaatcaaaccttcgacgcatcccgcatagtccgggtcctggagcataagccgatgggcgtcgaacagctcggccttgttttcgccgaactcagcggcgacgttgtcacgcagttgcttgagctgagcgacggccatgtcacgggccgcgcggaatcgatccatctcagcctgcggatcgtcgattacgcggcgttctacagcatgatcggcggcggcgagcacgcggaccgtgccgatagcaatgccagcggatacgccgacgccctgtatcgttctcattacaggtgctccttgaggaatcgctcgaactctgcggcagcgacagcttcatcgttgccctgcacccgaaccgtaacctcgtcaccttgttgaacatcaagtcccataacaccaaagatacgcttggcatccacggatttgccgccgtaggcaacggtgatgttcgactcatattcccgcgctttggcaaccaaccggccagctgggcgggcgtgcatgccttcggggtcggatacggtgaacgcgaatatctgagacatgacgccgctccttacacgtccggccgtcacgcgcgaagacggcctttccgcaccagctacggactgatgctggaaaaaacaaaaaaccggaatctttcgattccggttgtctgtgcccccgcagggattcgaaccctggacacgctgattaagagtcagctgctctaaccaactgagctacaggggcttggttagatattgaagtgttccttgcaacaggtgttaaatatactcagatttgaagcggatgcaactctcggcgtgtcgcgcctatttccagcgtttttaaacaccaatacaaaaatcccccatgcggcgcgaaccgcacgggggatgatgcttaagctcagactcttggtctgtgtgattccagcactaggccggaatgactcactcggccacgaccttcacgaagaaggaagcggtgatctccgggtggagggccaccttggcggggaaatcgccggtggtcttgatggtctcgacctcgatggccttcgggttcaccgcggccttgtcggacagagcgatggcgatggcctcgttggagataccaccgaacagcttgccggactcggacaccttggcggcgatctcgacggtggtgccctcgatggcggccttggcggcgacggcgtcctcgcgggtggcgacggccttggccagacgagcgcgcttcatagcggtgatctgagcctcagcacccttggtccacgcgaaagcgaggccctgcgggaacaggtagttgcgggcgtagccggccttcacgtcgacaacgtcaccggagtggcccaggttggacacggtcttggtgagaataaccttggtttcagccattgttcaaagcctccctaactcagcgacccgaagtggcgtacggcagcagggccatctcgcgggcgttcttgatcgccttggacagctcacgctgctcctgcacggtcacgccggtgatacgacgggaacggatcttgccgcgatcggaaatgaacttacgcagcagcgcaacgtccttgtaatcgatctcggtgaccttggcggccttcagcgggttcggcttcttcttgaacggcttgaccggcggttgcggcctcttacgtgacatgatgttctccttataaatcttgatattgattgctgctggcagcggggaggtaagtactgatcagaactccgggtcggaatcgtcgccgccgccgaaatcggaggaagcgccgaacgtggagaagctaccggcatcagatgcaccggcattgctccacgggtcggccgcaggagcggacgggttggcgggagcggcaggctgctgggagtatccagcgccaccaccctgatagccaccgttgtaaccgccctggccaccggcataaccaccttggccactctggttgccatagccctgattgggttgctgaccaccctggaaaccaccggaacgaccctggaagccgccctgaccggacgactggcgggtcacctgtgcggtggcgtagcgcagggagggcccgatttcatcgagctgcatctccacgacggttcgctgggaaccatcctgtgcctgataggaacgctgctggaggcggccggtggcaatcacgcgcatgcccttcttcagggactgggcgcagtggtcggccaggtcacgccaagctgagcacctcatgaacagcgcctgaccatcctcgaactggttggtctgacgattccaggttcgcggggtggaagcaatcgtgaagctcgccacggtcgcgccgctgccaatagtgcgcagctcggggtccgcagtgaggttgcccacgatggtgatgacggtttcgcctgccataacggtccttcttacttaccttgaataccagctgttcagctgactaaacgcttgattcagcccttacgaaggatcttcgtacggatcacggattcgttgaggttcagaacacggtcgagctcatcgctggtagcgggctcggcggtgtacttcaccacgacgtagttgccttcggtcttaccggcaatctcataggcgagcttgcgacggccccagtaatcgggctcatcgaaagagccgccttccttggtgacgagttccagatactgctcggtcagcttcttcagaccgcgctcatccagctcaggatcggcgatgaacatcagttcgtacttgtgcgcagacatcacccacctccttcggactattcggccacgg

SEQ ID NO: 2057 - DNA, 3428 bp, Unknown
  R17_18m  MAG No. k141_52996
gtccatgatggcaccgtaagcgtgggacagagcgtaacccagctcaccaccctcgtggatggagcccggggtctccggagcgaagtgggacggaataccgcccgggtaagaaaactgacggaagaacttctgcagaccagcttcgtccttggtgatcttcgggaaggtctcggtgtaggtgccgtccaggtaggactgggaggtaccggccgggccaccgtggcccgggcccatgatgatcacggtgttctggccgtggtcagcaatgaaacggttgatgtggccgatgaggaagttcaggccaggggtagtgccccagtggcccaccagacggtgcttcacatcttcgcgggtgaagggctccttcatcagcgggttggaacgcagataaatctggccgatggaaaggtagttggcaacgcgccagtacttgtcaacgccttcgagggcttcctcggaaaccggagcgttgagcttcttccaaggggtgccaataacaggactcgtcatgtgtactcctgtactcctgcacgtgatcgtgcgattgattatttctgttcggtcacggttcctgacccttgcggtgccaaggttttccgttcccaatcaatcgtcatggtacgaggacaacgcgacttttgaacgatttcttgcgggtgtgttcgaaattgttgcggaaatttcagtatttgtgcggttcacctgaccgtttgtcaacattagttttttcaacatactttttcagaacggcggaagcatgcggaaatctagcatctggctagaacagcgcacgttcgatttcccatgttcgaaatcggcgtgttgtccgactacaggcatgtagtttgttcgatttgcgcacatagtccctgcgtgtcggccttgtcgccttgaccagtgataatcaggggtgttcagcccacgtaaaattccaatgaacgttaggggaatatcaatggcaaacggtcctgtgcttgtcgtcgacttcggcgcccagtacgcccagctcatcgcccgccgcgtgcgcgaggcaggcgtgtactccgagctggtccctcattccatgccggtcgacgagatcctggccaaggatccgaaggcgattattctgtccggcggcccggcctccgtgttcgagcccggcgcgccgaccatagataccaaggtattcgaatccggtgttccggtgcttggtatctgctacggcttccaggtcatggcctatgagctcggcggcaaggtggataaggccgctctcggcgaatacggcaagacctcagccaccatcgacgacgccgacggcatcctcgccgactcccccgccgagcagaccacgtggatgagccacggtgtggcggtcgaacaggccccggccggcttcgaagtgctggcccacaccgaaggcgcgcccgtggccgccatggcggacgaatcccgcaagctctacggtgtgcagtggcacccggaagtcaagcactccccgcttggccagaagcttatcgaaaacttcctgcaccgttgcgccgcactgcccaacgactgggacgcctcctcgattatcgaggatcaagtcaagaagatccgcgagaaggtcggcgacgccgaggtgatctgcggcctgtccggcggcgtggactccgccgtggccgccgctctggtgcacaaggccatcggtgaccagctcacctgcgtgttcgtggaccacggcctgctgcgcaagggcgaggtcgagcaggtcaagcacgacttcgttgccgccaccggcatcaagctcatcaccgtggacgcggccgacgacttccttgaggccctgaagggagtctccgagccggagcgcaagcgcaagatcatcggtgagaagttcatccgcacgttcgagaaggcccagcgccaagtgcttgaagaggccggcgcgcgcggcaaggaagtcaagttcctcgtgcagggcaccctctaccccgacgtcgtcgaatccggcggcggcgacggtgccgccaacatcaagtcccaccacaacgtcggcggcctgcccaaggacatcaagttccagctcatcgaaccgctgcgcaccctgttcaaggatgaggtgcgcgccatcggcaccgagctcggtctgcccgacgaaatcgtctggcgtcagcctttcccgggcccgggtctgggcatccgcatcatcggcgagatcaccaaggagcgcctcgacctgctgcgcgaggccgacgccatcgcccgcgaggagctctccaaggccggtctcgaccgtgacatctggcagtgcccggtcgtgctgctcgccgacgttcactcggtgggcgtccaaggcgacgagcgcacctacggctcccccatcgtgctgcgtccggtgagctcggaggacgccatgaccgccgactggtctcgcgtgccctacgacgtgctcgccacgatctccacgcgcatcaccaacgagtgccgccagatcaaccgcgtcgtcctcgactgcacgtccaagccgccggccacaattgaatgggagtaattgctctctgtgacgaatgggattctccatcggggaatcccatttttgttgccgacgatgcccggtataattttttcgcttacgacgtcgtccggaaagggatgccgacctctttgcgccagggattcgacaacgaaaaaacatcgaactgcaagccgccaacatctcaacagcgtgaaccgacgcttgcactcggatgaaacgctgattgcattgtcaatcaccagcgacaccagtcctgtggccgctcgcgtcatcgacgggctcaaacagttgcagggctgcgacgcctttttctccgttatcatctcatccacggacgaggcgttgtatcgcaaactcggcatcaacgtgtgctgcgaaccgaagtacgaacgggtgagtctgtatcaccggtaaacgccaccgataagcgcggtatgccgcgaatcgtcaagccggtaatcatgcagcatgcggcctgacgattcgctgctgtcgcattgtctctcccctcgaccatgctgggcttgttttccgtttgttggagagaacgggggatgccattagcactacggtgagagaaggattatccgtgaatcggttcgtgggtctagacggtattaaaggactggcgctgatagccattgtgctgtaccactgcatgcagcaactgctgccaggcggattctacggagtcgacgtgttcttcaccgtctctggattcctgattgccgtcagtttgattcgttctctggcgaaaaccggatcgctgaatctcgtgcgatatatccccaagcgtgcagtacgtctctatccggcgctgtttctgctgattccggtcaccgtctccgtcggctggctgctcgatcacgacattctagtttccatccgcgaccaagtcatcaccgtgctgctgggctgctacaac

SEQ ID NO: 2058 - DNA, 13013 bp, Unknown
  R17_18m  MAG No. k141_53208
gctgcggtctctccctcacccggctatactgggagctccctcgtcagagggagcttaaattcggtctggttataggcccatgggcttcttgggctttttgtcgctcatgagcataaggaagctgcgggactgggcggtgatcatgaagcccgcctcatagctcagttccggcccattcgggttgtgcgtatccacgaccagctgccatttgcggccgtatcgctcatccggcagggtgaacataatcggctcgtaatgcgcgttgaagatcaggatgaagtcattgtcgaccatccggttgccgtaccagtctacctccggaatatccgaaccgttcagatagatcatcatggagaacgcatgcgtgttctgccagtcgtccatatccatgatcgaaccggtgtggtcgaaccattcgacctgcggaatcatgttcgaatcgtcgccgggctcacggcctgtgaagaagcgacggcggtgcaacaccggatgatccaaacgcagatgaatgagtttggaaacgaaggcgagcagttccttgcgtcccttgtcaagatgccagttggtccaggagatctcgttgtcctgacagtaggcgttgttgttgccctgctgggtgcgggccacttcgtcgccaccgcaaatcatcgggataccctggctgaacagcaacgtggcgaacatgttgcgcatctgacgctgacgcaagtcgttgacgtccggaatattggtcgggccttcaacgccgcaattccaagagcgattgttgctctcgccgtcgcgattgccctcgccattggcttcgttgtgcttttcgttgtagctgaccaggtcgttcattgtgaaaccgtcatgcgcggtgatgaagttcacggacgccaccggtcgacggccgttgacctgatacagatcggaactgcccatcaggcgcgaggcgaattcgggcagcgtggagggctgcgagcgccagaagtcgcgcacggtgtcgcggtagcggccattccattcggaccagctggacgggaagccgcccacctgatagccgccggagcccagatcccacggttcggcaatcagcttcacgcgcgagatgatcgggtcctgctccacgatgtcgaagaacgcggacagcttgtcgacctcctggaactggcgtgccagcgtggcggccagatcgaagcggaagccgtcgacgtgcatttcggtaacccagtagcgcagcgaatcggtaatcaactgcagcgcgtgcggcgagcgcataagcagcgagttgccggtaccggtggtgtcgaagtagtgctgctggtcgccttccaccagtcggtagtaggaggcgttgtcgatgcccttgaagctcagggtggggcccatatggttgccttcggcggtgtggttgtacaccacgtcgaggatgacctccatgccggcgtgatggtaggccttgaccatggacttgaattcgttgacctgctcgccgcgctctccggaggaggagtaggcgttgtgcggcgcgaagaagccgatggtgttgtagccccagtagttcgacaggcccttctcctgcaggaaggagtcgttgacgaactggtggatcggcatgagttcgatggcggtgacgccgagcttcttcaggtattcgatgacgctcggataggccaggccggcgtaggtgccgcggatgtccggcggcacgtccatgttgaggttggtcatgccgcgcacatgcgcctcgtagatcaccgaatcgtggtacgagatgtaggggtgctggtcgttgccccagtcgaaatacggattgatgacggccgacttcatggtgtgggcggccgagtcaaggtcgttcatcgccgaggtgtcgtccgggcttttgaaccagtaggagaacaggctttcgtcgccgtcgatgttgccttcgatggccttggcatacgggtcgagcagcagtttgttggggttgcatctgaggccgtgcatcgggtcatagggaccgtagacgcggtagccgtagcgttggccgggctggaggccggggatgtagttatgccatacgtatgagttctgttcggtcatttcgatgcgcgtttccgcatcgtgctcgtcgaacaggcatagctcgactttctgcgcaacctgtgagtacagcgcgaagttcacaccggcgccgtcatagctggcgcccagcggatacattgatccaggtctgatctgcatagttttcagtatcccactttcttgtgtcactgatgtgccggggagttgaacgtcaggagaacagcgacggcttgtctttgtcggagttcctggcgatgagtctgcgtaacgcctcatgctggatggcgatcatcgaattggatgaggtgatgcgcgtggcggcaaggtcgctccacggaatccacgcggattccacgtgctcgtccgcgtcgaaatggcgctgctcccgtctgaacgggcccaaatgcaacaccatgatgtgggccagttcgtcggtcatgccttcggacgagtagaaatcgcccacgaagtcaacacccatggtgtcacggtccggcaccacgccggtttcctcggccagttccctcagggccgcgtccatgatgtcctcgccctcgtccatgagaccggcgggaagcccgtaggcgaacatgtccgatccggcacggtattcgcgttcgatgaggtaacggtcggtggacatgtcgtgcacgagcatgaccacacagggggcgtgacgcagcacctggcggccgatctcgtgttccttgccctgcttgtcggtcagagcgatgcgcatgtcgtccacgtggaagatgcgcccggtataaacggtttcgctactgatcactttggcgggcacgtccatgtcgatgccgtccgaggaggcgttcagcttatggtcgagccgatgctccagttgttcctgcttgcttcccccaaacatgtcatctcctcggaaaaaacgttttcgccacgtcactatagcgccttaatcccgatgcgcggtaatggacagcgtccatggatcggtcgtgtcgtggaaccactcgacttcaggccttgctccggtcgcttgttcgatggcggccggcacgtcatcgatcgcgtagttgaaccacatggattcgatggcagcatgaggggtgttgatgaagcagggacgcacatggctctcccccgccattccatggccgagcatgatgccttgggccctcatacgggcttcataccgggcttgttcgatggcgtcggtcaccggatggtgacgcaaatcgctggttacgtacacgtccgcaccggtggcacgcacctcgttgaacagggagtccccggagccaggcagaatggccacatactgaacaaaagtgtccgaatcgccgcatacctggatgccgagcgcggtggtcatgccatgatcggacacttcgtcgaatacacgctgagcgaaatccttcagggcaacaggcttcggcaaacgacccacacgccccaagccgaccggatgagaggcgttggcatcgtcaatcggcacgagtggtttctggtcgatgagtccgaagtagtcggccgccgcctgccccacgccgcgatacgcagcgtcagcattggtgtgccctacccacagcccgcagccttgctggtagagcctgcggacgatgtcgccccggaaaccgagtccgctcgtctcgtgtacggaacggaagaacaacgggtgatgggtgatgagcaggtccgcgccagtagcgatggccttgtcaatgatggcggaggtcgggtcggcggcgaacacgatgcggtgcacgtcgtggctcagatcgccgacgatgagacccggctcatcccattcctcggcgtagcgcaatgggtacagggtctcgagaacgtcgatgacttgcttgagattcggcatatgtcccattgtagtgggctattgcggcaagggactcattctgcaattgcggacaagccatgctcgtgctcttcattgctcgactatcggctcgccttcgcctacaaacaatccactggactgtttgctcaacggctcagcctcctcacccgaggggagctagaaattgtcagtgtgcggcgagctgccagtcggaaccgataccgcacgatacgtccagcggcacggcaaggtcgacggcgtgttccatggcgttgcgtaccagttcggtgacctggtcgccttctcccggcgcgatttccactaccagttcatcgtgaatctgcagaatgatacggctcttgacgtgggcctctgccaaggtctgctcggcgcgaatcatcgcgatcttcatgatgtcggcggcagatccctgaatcggtgcgttgagtgccgcacgttcggcggcctctcgcgcaacacgattggtcgaatgcagggccgggaagtagcgacgccgtccgaaaatggtttccgtataccccttctctcgggcattggccaccagcgattcaaggtaatcgtgcaccttgccgaaggtatcgaaataccggtttttcaacgcttccgcttcacgtggcgcgatcttgagctgctgggcgagaccatacgtgctcagaccataggccaatccgtagctcatggcttttacgtggctgcgctggtcgccggtgatctggtcgaccggcagcttgtagaccatcgaggccacgtatttgtggaagtcggctccggagcggaacgcttcgatcagcgcctcatcaccggacagatcggccatgatgcgcagctcgacctgtgagtaatcgcaactcatcagggcctcgtacccctcccccggcacgaacacgccgcgaatctcacgaccggcggcgttccggttgggaatattctgcaggttcgggtccacggagctcaatcgaccggtggcggcaacggtttgctcgaaagtggtgtggatgcgctcatctgatgtgttggtggcatcgatcagcgtttggacgatctgcttgagcttgttgatctctcggtggcgcagcaacgccccgaggaaaccgttggcccgctcattgtccactgatttgacatacagatcctgcaatgcggccgcattcgtggtgtatgagccggacttggtgcgtttggtgggcttcaaacccatatcttcgaacagcaccttctgcagctgcttggggctttgcaggttgatttcggtgccggcatactcccaagccatttcctgcgcctgacgagcctcggcggcaaactggtcacgcatggaaacgagtcgaacgctatcgactttggctcctgtgtgctccatgccgtgcagcacgcgggaaacaggaagttcaatcgcgcgcatcagccagcattgttcacgctcgtcgataatcggcccaagcgtgacggcgaggctgcggataatggccaaatcgcgcagacgatgttcgttcggatcttcttcgacctgatcgtcatcgaagtccaacgtgccttgcgaaggctgttcggtttcggtgaagtggatgtcgaggaagtgctcggccgcctgcttgaggctatcggcgtggaaatccggttgggccagatacccggcaagcttggtgtcgaacatcggcaggtccatgtcaagatctaccgcgcccagaagatgcagcaactctttatacccatgcacgatggtgcgggagtgctcgctttccaggaaccgcgcaagctgtgctcgcagggtatcggtgattggaaggggcactatggccgctgatgttgccgtggcaacggcaatggcttgtgccgtggcacgacccggcctttcgtcgccccatgcggccacggtccaagcgtggccgaccgcgtcgccgcagacggtatgccgctgcgatccatcgccatagtcggaaaccgtgaaatcagcgatttcaccgggaactttgacctcggcgcgatgggccttgacccattcgtcgaactgctccgaagaggtgatgctcgtgggttccggcaggttcagatcgagactgttatcctgctcgtcctgttcattattcgtagactcgccggctccgtatgtgttggaaaccttggcaccggtattgaaggttttcagcacgcgactcctggtacgcggtccgaattcaagctccttgaacagggcgtcgatttgtgccacgtccacggtgccgaatgtcagatcctcaatatcgacgccaagatcgacatctcgtaccagtgcgttgactttgcgattgagcttgacctggtcgatattggcccgcagcgattcgccttttttgccgccgatttcatcggcgtgctcgcaaatgccgtcgagggaaccgaattggttgatccacttggccgcaaagccatcgcctacaccgggcacaccgggaatattgtcggcggtttcgccgcggagcgccgccagatccggatattgtgcgggagtgactttgtatttgtcgatgatggactgcggcgtcatatgcttcaggtctttgaagtgatggcccgggtacaacacggtgacgttgtcatccaccagctggaaggcgtctcggtctccggacaataccagtgtgtggtagccggccttgtctcccatggtggcgagggtggcgatcacatcgtcgccttcgaatcccggcttctcgatgtaggtgacgccgagggccgtgagcatgcgttgaatcaatggcagctgggtgagcagctcttcgggagccgcctcacgggtgcctttgtattgcggaagcatctcattgcggaatgtgccgcccttcacatcgaaggcgacgcccagatggtcggggttctccgcatcgatcacctgcgcgagcatggtggcaaaaccccagacggcgttggtggcctggccgctggaagtactgaagttgtcgaccggcagggcgaaaaatgcacggaaggccagcgagtggccgtccaccaccagcaatgtttcattggtgggtacggtcacgctggcctctcccatagtgtgtttgtgttgctttacgactcagcacggtgatgccgataatcagcgttcgcccgaatcagaaggcttcggatcgccgtacttggcgatgatggcctgagccaggcgcttcttggggatgcgctggtccatggaggtcttctgaatccaacggaaggcaccctgctcggagaagtcagccttgtccatcagcagacccttggcgcggtcgacgagcttgcgctcctcaagcgtgtcttcggccttcttgagcttctcttcggtttccttgagctggtcggtggtttccttgagcttgcgttcgctgcgctccacgttgtccagcagatcgttgatctcggcgaaacggcccatggccacctcgagggtcggcagcaacttggattcctcgtacggcttggtgacgtatgccatggcgccggcaccggtggccttcttcaccagatcggtctgggagaatgcggtgagcatgacgacaggggcgatgttctcatcgcagataatgccggcagcggcgatgccgtccatacgcggcatcttgacatccatgcacaccacatcagggcgatacttgcgggtcagttccacggcttcctcgccgttggcggcctgaccaacgacctcataaccgttgtcttccagcatggcgaccagatccatgcggttcacggcttcatcctcggccacgacgacggtacgcggaccatcctcggccacggccttgcgctcagcaggttcgctttcatcggctacggccttgagttcttcgtcggtcagcacctcatcgacgttgatactcggttcttcggacttcttccttgcagccatgccaacctctttcttgaattacccaacaatggggttcgtaataatttcagcgaactcctagctaaagtgccctcggtgggactcgaacccacactgcgcagattttgaggctgcttcctctaccaattgggatacgagggcgtgcctaagcactctgaagagagtagcataccgattcgactcctgcgacacaagacacgcgccagtcctccatttccccccggtaaaacaggcgaaacacgtcgatatcgtggacggcgtacccgtgtgttgcccgttcttctgcgtggtttcaccgcttacaatgggctgtagtttcgatgtatcgcttttgttaggagggcttatgagcaacgaaacttaccgtcagttcgatccctggcgcccttctccggtcaaggagatttcccgtagacagattgtggagacgcattatttcaatgtcgatcacgtctcctatgagtcgaatcagatcggttcgtttgaacgctactttgttcaggagaacaatggcgacactgtggctgtgctggccgtcaccgatgacggcatgattccgctggtcgagcagtatcgcatcgccaaccatcgttggacgttggagattccggcaggccacgccaacaacccgtccgaacgcccgaccgatgtggctaagcgcaagctggccgaagaggctggtttcgatgcctccaagcttacgcagttcacccgttttatgaacacgccgagctattccacccagcacaccgcaatcttcttcgccaccggacttaccccggcttcccgtcaggaaatcggcccggagactccgcgttccgacgtgcgtatggtgtcggtggacgatgcctatgagatggtggtcaatggcacgattgtggatgccaagaccatggtcgccattctgcgtctgaagagcggcacgctcgatcatctcaacgactagtcaccacgctcgatcatcgcggtgactacgtgccattgcaatcaccgcacaatcgcaacataacggataacgaaagccccccatccactttctggatggggggctttcgcgtgctatgtgctagcagtcagcagctaccagcggcctgaaatcagtcgcaagcgccaacggtgtgcacgtagatggagtcggtgcggcccggctggtgatcgccctgagcagagctcaggatgacgatcttgtcgccgtcagcaaccttgccggcatccttgaggaccttgtccgtgtagatcatcagatccttgcgggacttgtcgtggtagtcctccttgagcaggaaggcttcggtgccccaggacagagccagccagtggtaggtgtgctcgttgctggtcaggccgtagatcggggcggccggacgctcacgggagacgcggtgcacggtggcgccggtctgggtgtaagcaacgatggccttggcgttgagcttgtcggccaggtccacggcggcggaggagacggcgccggtggaggacatgtcgaggttcttgagctccgggatgcggtcgaagccgtggtcggtggcgtagccggagatgcgcgacatggtggccacggtcacatccgggtacttgccgacggcggtctcgttggaggtcatggtggcgtcggagccgtcgaggacggcgttggcgcagtcggaggcctctgcacgggtcgggaccggggagttcaccatggagccgaggacttcggtggccacgatgaccggcttggcatactggcgggccagctcgatgatgcgcttggtggccagcgggacctcttccagcgggcactcaacggccatgtcgccacgggcggccatgacaccgtcgaaggtcttgacgatctcttcgaggttctccagagcctgcggcttctcgatcttggcaacgatcgggatgcgacggccttcctcgtccatgatctcgtgggcgcggtcgatgtcggtggcgaaacgcacgaaggacatggcgatgatgtcggcaccggtgcggatggcccaacgcaggtcagcctcatccttctcggtcagagccggcagggagacggcgacgcccggcaggttgatgcccttgtgggaggacacaggaccggccacgacgaccttggtgtacacgttgttgccctcgaccttggtgacctcaagacgaaccttaccgtcatcgatcaggatcgggtcgcccgggtggcaatcgcccggcaggcccttgaaggtggtggaggtgatgtgctcgtcgccctcgacgtcatcagtggtgatgacgaattcctggccgagctgcagctgaaccttgtcttcgccatcggcgttcttcttgaaccaaccgcagcgaatcttcgggccctgcaaatcaacaagcgcggcaacgttgcgaccagtggcttcgctggccttgcgcacgttgttgtagaccttgaggtgatcctcgggggtgccgtgggagcggttcagacgagcaacgtccataccggcttcaacgagcttcaggaggttgtcgtaatcctcggtggaaggaccgatggtgtctacgatcttggctttacgcatgaatgcctgcctattcttgttcaatttggttcgaggcacgattgccccatttgccgaaacccagtctactagcgcgagccgactcatgacaagttttcttcacggtgtgttgtgagcgctcacattgttgtgttgactaggtttaagggttgtgttctctaacggtttcaggccttttcagcgctttccatgctcttcatcttgatcacggaagccacggatgcgccgccaattgcgaccacaatcacagccagcgacagccatgtgggcacttccggcacccaatggatgccttcgccgccgttgatgaacggcaaggtattgccgtgcagggcctccatgatgagcttgacgccgatgaagcccagcaccacggacaggccggcaggcaggtagacgagcttgtcgagcagagcacccagcaggaagtacagctgctgcaggccgagcagggcgaacacgttggaggtgaacaccaggaacggatccttggtcaggccgaagatcgcgggaatcgagtcgaaggcaaacatgacgtcggtggtgccgatggtcaggaacacgatgagcatcggggtccagtaacgcacgccgttcttggtggtgcgcagcttctcgccgtcgtagtcgtcggtgatcttgatgatcttgcgcagattacggatgatgccgttttcgtgatattcctcgtcttcatcgccgccgagcaccagtttgacggcggtgtagatcaggaaggcgccgaacaggaagaacacccatgtgaagcgggtgatcagggccgcgccgatcagaatgaaaatgccacggaagatcaaagcgatggtgatgccgatggacagcacatacttctgaatctgcttgggcaccgcgaagttcgacatgataatgacgaacacgaacagattgtcgatggacaacgagtattcggtgagccagccggaatagaactcgatggcgggcttggagccggcgaagaaccagatgcatccgccgaagatcagcgccatgaccacgaagaaggcgatatgctgcacgcattccttggtggagggcacatgcggtcggcgcccgatgacgaacaggtcgacgatgaagaacagcgcgagcaccacgaaggtgatgatttcaaatgcgagtggggtttctgccatgattccctacactaacccatgtatgtgacgggtcatcgccccgcctcggtcatctgccggagctccttcttgagatcacggatctcgtcgcgcagacgggccgcaagctcgaactggagttgttcggcggcggtgtgcatctgttcggacagctggcgaatcaggtcggcgaggtcctgcgcgggcaggccggccttcaggatctcctcgtggcgtttgtctgcctcgttgggatcgagtaccggcacgcccaggtgtgtgttgccggccttgcccgcgttgcggtagccaccttcaagcaaggtctgggtgtccacatcctccttggcgagcatgtcgttgacgtcgctgatcttcttgatcaggggcttgggatcgatgccgtgttcctggttgtaggcaatctgcttggcgcggcggcggtcggtctcgtcgatcgcctgcctcatggcctcggtggtctcgtcggcgtacatgatcaccacgccggacacgtttcgcgcggcacggccgatggtctggatgagcgaacgataggagcgcaggaatccttccttgtcggcgtcgaggatcgccaccagcgatacttccggcaaatcgaggccctcacgcagcaggttgatgccgacaatcacatcgatcttgccttcgcgcaacatgcgcagcagttcgacgcggcgcaacgtatccacatcggaatgcaggtattcgaccttgatgccgcgttccagcagatagtcggtcaaatcctcggccatcttcttggtcagggtggtcaccagcgcacgctcgttcctggccacacgggccttgatctcggcgagcagatcgtcgatctgccccttgaccgggcgcacgtcgatcttcgggtccagcaggccggtcggacggatgatctgttcgaccaccccgtcggacaagcccaactcgtagtcgccgggtgtggcggacagatacacggtctggccgacgcgctgcaggaactccggccatttgagcggtcggttatccatcgcggagggcagacggaagccgtgttcgaccagcgtgcgcttgcgggaggcatcgccctcgtacatcgcgccgatctgcggcacggtgacgtgtgattcgtcaatgaccagcaggaagtcatcggggaagaagtcgagcagcgtgtgcggtggggtgccggcggcgcggccgtcgaagtggcgcgaatagttttcgacgcccgagcacacgcccacctgggtgagcatttccagatcgtaggtggtgcgcatgttgaggcgctgcgcttccagctccttgccttgcttacgcagttctgccaggcgttcgtcgagttcctcgcgaatggttttgagcgcgcgttccatgcgttcggggccggccacgtaatgggaggccgggaagatgtggatttcgttttcctcgtcgatctcgtcgccggtcagcgggtgcagcgtggagatgcggtcgatctcgtcgccgaagaattcgatgcgcacggccagttcctcgtagacggggatgatttcgaccgtatcgccgcgcacgcggaa

SEQ ID NO: 2059 - DNA, 20997 bp, Unknown
  R17_18m  MAG No. k141_53277
ccctcctcagagggggctgtcggcgggtctccggtgttttctttacggctcggcccatcggaggaggcgacaatagtgcgctcagcagggttcgggcgggagctggcttggaaccaggggtgttcttcgctggtgtggccggggaccaggtcgagcagcacgtgcatgccgcgccggtgggcggcttcgaacagcgcgatcaggtcgtcattggtgccgtaacgcggcgcgacttgtgtatagtcgcgcacgtcatagccggcgtccttgaacggcgagtcgaaacaggggttgatccacagcgcgttgcaccccaaagcggcgatgtagtcgagcttgccggtgatgccgggaatatcgccgatgccgtcaccattcgagtcagcgaacgattgcggatagacctcgtagaatcgggcgttttccagccaggctggcttggggtaagtctggggctgttgcgtcatcgtggtccttccttcaggtgtgatggatctggcttctctgccgggtccgaataacggttgtttttacagattcttgcgggatgttgcttaatgatactgcatgattgcgaacgctgtcaatctagagaaacgcgggataaacgttgaaatatcaaggatttaagactctgcaattatggctgattgcaattggcttgcatacgttcgcaatttcagttacactgaactcaagcaacaacgacgtaccccccaatcttccgcgattcccctgtatcaggccgaaaacggaaacgtagtacccaagggtgtgcgtggcaggagccgatactggagtcggcgtccgaagaaaggaaaatcaacgatgatggcacgatggaagaaagccctagcggcgatttccgcctgtgcgctgttcgtcacgggcctgtccgcctgcgggtccgcaagcgcgggcggagacgcggagcatatcacgcttgtggtgtgggcctcccaagaggaccaagccaacacggattcgtggctgcagaccatggaggccgcattcgaacagcagcaccccgaatacagcatcacgtggaaaaaccagaacgtggcctcggcagacgccgccggcatagccaagcaggatccgaccgtagccgcagatgtttacacgttcgccagcgaccagctgggcaccctgctcgatgccggcgccgtcggccaagtgagcgacccgacgatgaaacagctcgccaagcagaccaaaggcaatgccacgatgctacagaccgtcaccggcgaggacggcaacgtctacggtgtgccgctggccggcaacacctggttcatgtactaccgcaaaagcaagttcaccgagcaagacatcacctcgctggacgccatgctcgccaaaggcaaggtctcattcccgctgaccaactcctggtatctgcccgccttctatatcggtgccggcggcacactgttcggcaaagacggcaccgacgccaagtcgggcgtgcagttcggcggtgcaatcggcgccgccgtcaccgattacctcgtcgacttgcgcaacaacccgaacttcgtcaacgacaagaacggctccggcctggccgggctgaaaagcggcaaggtcgacgtggtcttcaccggcaactgggacgccgccacggtccgtgagaatctcggcgacgactggggcgtggccaagctgcccagcttcacgctcaacggcaagcaagtgcagatgaaggccttcgccggctccaccatctacggctggaacccgtacaccaagcatccggtggccgccgaccagttcgccgcattcctgtccggcaccgaatcacagcgcaagcactataagatgcgttcggtgattccctcggacagcgagcttgcctccgatccggccatcgagaaagacgccgtggcccaggcccagatggacaccatcgccgagacgtccgtggtgcagccgtccatcgccgagatgaacaacttctgggtaccgtgcgagaacttcggcaattccatctacaacaaggaagtcacccacgccaactcggccaaactcaccgagcagtggatggcctcataccagagcctcctgtagaacgcgagaagaaagaccaatcatggaaaccacagccatgccgcgcgcagcgaaacgcgcaccacgccgccgcaaggcggactacattcctccgtcgcactacacgttgcgcgcggcggccacccaaggcgatgccctgacccgactgtcgttcctggtattgggcgcaggcaacctggcccgtaagcaggtggccaagggactggtgttcctggccatcgaagtggcgtatatcgcctacatggtgacggctggcgggccggcgctcgcaatgctgggctcgctcggctcccgcacccagaccaaacagaagatcgatggttattggcattacgatgccggtgacaattcggtgctgctgatggtctatggtgtggccgccgtgttcatcaccgtactgttccttgtgttctggtcgtatgccgtgcgcagcgcgtacaaggcacaggtgctcgcccgagagaccggcaaggcgccgaccttcatcgaagacctgaagaacatcaccgatcgcaacgcgcaggtcatgttcatggcgttgccggtggccggcatccttgtattcaccgtcctgccgacgctgattatgatgtgcatcgcgttcaccaactacgatcccgatcacgtgctgctgttcgactgggtcggcttcaagaacttcacccagctgttcagcgccaccggcgagattaatgccgcccagtttggcagtgtgttggcctggaccctgatttgggcgttcttcgcgacgttcctgaacttcttcctaggcctgttcctcgcgatgatcatcaatcgtcgtactacccgactcaagggcttctggcgtgcggcgttctcgctgtcaatcgccgtgccgcagttcgtctcgctgctggtcattaaccagatgctccagccggaaggtgccatcaaccgcctgctgatgtcttgggggtgggtcgacagcccgctgccgttcttcaccgacaccatgtgggcccgcgtgaccgtgatcgtcgtcaacctgtggatcggcatcccgttcaccatcatgcagatcaccggcatcctgcagaacatccccgccgaacagtacgaagccgccaccatcgacggcgcgaactggtggcagaccttcacccgcatcacgatgccctacctggtcttcgtgctcaccccgtacctgattaccacgttcaccggcaatgtgaacaacttcaacgtcatctacctgctgtccggcggtaatccgaccccggtgggcgatacggccggcaagaccgacctgcttatcacctggctgtacaagctcacggtggaccgtggagactacaacctgggtgccgtcatcggcatctttacgttcgtcaccttggcagtggtctccctgattacctaccgcagcagcgcttcctacaagaatgaaggaggattccgatgagcagcaacgcgcagaccgcgacccctcgtaccgacatcgcaacccctaagtccgccagcaatccgttctggcatgaccagcgcaagcgccgcatcgtgggcgatgtcctaagccatctgttgctcgccgtgcttgcggtgatctgggtgattccgattgtgtgggtggtgctggagagcttcaacaagaatcccggcccctacaacgagacctttttccccaccgaatacacgttggagaattacaccaagctattcaccgacacccacatcctgaacttcccgcgcatgttcatgcatacgctggtgatttccatcgtggtgtgtctgatcagcgtgttcttcgtactgtgcgtggcgttctgcatgagccgcatgcgcttccgtttccgcaagtcgttcatgaacattgtgctggtgctgggcatgttcccgggcatcatgtccgtggtagtgatctacttcattctgaagtcgttgggcctgacccagggcgtgggcgtcaccgtggcgttgattctcgtctactcggctggtgccggcgcgggcttctacgtgatgaagggctacatggacacgattccgatgtcgcttgatgaggccgcctaccttgacggatgcactcgctggcaggtgttcaccaagatcatcatcccggtgtgcaagccaatgctcgtctatcaggccctcacctcgttcttgggcccgtggctcgacttcgtgatggccaaggccatcgcccgcacacaggataactacaccgtggcgctcggcctctaccagatgctcagccgtgagtatctcaacgattggttcgcccgcttcgccgccgccgcggtaatcatctcagtcccgattgccatcctgttcatcgtcatgcagcgcttctaccaggagtcgatgggcggagctgtcaagggctgacgctggcgcgtctgcccttgcggggaagcccagtgggcttccccgaggctccgcctgagtgaggcgggagccgaacgaaggtgatactgagcctcgccgcaggcgagcccgtaattgcaggggccgcaggcgagctgtcgcgcaggcaagatttgaacaaaggagaacccccatggaacagcagatctccgcgttggcggtagccgattggacgccagccgaactggcgatgccctgccccgattatcccgtctatcaggatgacgacctcggtgcgttcccggatgccaaaggcaccaccttccgcgtctgggcacccacggccagcggtgtcaccctgcgcctgttcacggctggatcgccggagacggctcccgagcctgaaacgcaggccgacctcactccgggcgcggacggcacctggctggtgcgctgcgacggcatcggccacggcacctactacgactatctggtccgattcgcggacggcaccgtcaatcgcaccgccgacccgtgggcccgcgcggccggcgtgaacggccggcgcagcatggtcgtcgacctcgaccaaaccaacccggcaggctgggccgaggaccgccgcccgcacatccccagccgcgacctggtgatttgggaaacccacatcggcgacttcagcaacgacgaacacagcggcattccggaagagcatcgcggcacctatctggccttcacccacccggacaccagcgtggacggtgccggcgagttccccacctgcatggcctacctcaaacgtctcggcatcaccgccgtgcagctcatgccgttctacgactacggttccatcgacgaatcgatcccacgcaccgaccccgcccgcggcttcaactggggctacgatccgctcaactacaacgttcccgaaggctcgtacagcaccaatccgtatgacggcgccgtacgcatccgcgaatgcaaacagatgatccagtcgctgcataatgccggcatcaaggtgatcatggacgtggtctacaaccacatgttctccaccgacaactggttcgaacgtatgattcccggctacgcgctgcgccgccgcgccgacggcaccttcgccgacggctcggcctgcaccaacgacgtggccaccgaacacccgatgatgcgcaagtacatcgtcgattccgtggtctactgggcgcgcgaataccatatcgacggcttccgattcgacctcatgggcctgatcgacgtggacacgatgaacgccgtgcgcaccgcactcgaccagctgcctggcggtgccacgatctccatgcacggcgaaccgtgggcggcccgcgaaaccgcgctgttgcccggcgcgattctggccgacaagcgcggcatgccctacctgagcccacgcatcggcgcgttctgcgactccacccgtgacgcggtgcgcggccatgtgttctaccagtgggtgcccggctacctgaccggtgcggccgccgattacgctgacgacatccgtcatgccgaagacggctggcgcggcaccttgcgcgagaccgccagcgtggggcaggtcatccaatacgtttccgcccacgacgacctgacattgtgggacaagctgtgcgcggccatgcgccgcatccccaccgatacggactattcggccgaaggcgaggcgtgcgaggacctgatgcgcgccaaccgactggcggccggcatcgtattcgcctccgccggcgtgccgttcatgctgtccggcgaggaattcgcccgcaccaaacacggcgtctccgattcgttcagcagtccggccgcgttgaaccagctggattggcgccgggcgcaacgcatgggcgatctggtcgaccattacgccgcgctgatccaactgcggcgcggcaacccggcctacttcggcggcgctcgcatgatcgtgccgcgcgacgacgagaccgtggtgttccgcgtcggcgacgattgcgtggccatcaatcctaccggcagcccgcagacccagctcaccaccgatctggagatacccggcccgtacggcgaggtctcgaaaatcgcgcccaacgaatggcagtgcatctattgctccggcagcgatatgccgggcgcggtggaacagcgactgctgcccctgcccccgtacaccttcaccgtctggcgccgcaatcgtggctgacggcgatgctcgctcccgccggcggcgcacaccgcataccccggaaaggtggcgtgatgactgaccgtttcgctcccgactcccgctccctccggcgggagctgtccggcaacgccggactgagggtggtcgatgaggccgacaccgtaccgaccgtggatgcggtgtttttcgatctatacggcactctggtggatattcgtaccgatgagacatcggctgccgcctgggatgcgttgcgttcggccttgtctgactgcggcgtgacgtacgccggcaacgccgagctccagcggcgattcgaaaccttggcacagccgattcgcgatgccgccgtcgccgcgcacggcgagtgggccgagcccgatttgctgccggtatacgcggcgttggcgggggagtgccggaatgacgacgctatggcacgatcgttggcatggacgtttcggcaggcgagtaccagcctgctgcgggtgtatccgggcgcgccggaactgctggcgcgattgcgagtcgcaggaaagcgcgttgtgcttgtcagcaacgcgcaatcctgctatacgcggccggaactggccgcgcttgggttggatcgggcgttcgatcgcatcgtcatttccagtgaggtgggcgtgcgcaaaccatcacccgcaatctttcgtcgggcgcttgagaccgagcatctgacgcctgaccgcgtgctcatggtcggcaacgacgaacgtgcggatatcctgggcgccgcgtcggcgggcatcgccggcgtctatctgcgcaccgagatctcgcccgccagcgactcgcaggtcagtgcgcatgccgccttgtcgctggccggccccgattatgctgaactattgcaatacctgacatagcctaataaagcccccgctggcgggggctgtcggcaaagccgactgggagtggccgccggggcgccacacaactcccacagcccaaatgatcacaacaacggaggaacacatgaacgaagtcgaaatggagaagacgcggcgcggcgagcagcgccgtcgcaagggactgtccgtgttccgtctcaaggtgattggcgtgatattcatggcgctcaacgtggcgagcgtcgcgatactgcctgcgctggtgggcgacccgagccaagacatgacagcgctgaccgcgatcgtactgtgcgcggcggcttcctggatcgccgtgccgatttattcgtggctgttgttcgatggctaccgtcatacgcataacgcatgggcgtacgggctgcgactgctcgtcgtggccgtgatcagcgaggtgccatacgacctgattatgaccggcgagcccttcagcctgagcgtgcagaacccggtgttcggactgctcatcgccctggtcgtgctggcgctggtggactggctggcaaaaaatacccacggcgccttccgttggacgctgactgtgctggtcattatcgcgggcctgctgtgggatttgctgctgcatgtgggcgtagatcagcgcgtgctgtacacgggcgtgctcacgctgtcgttcgtgatggtgttctacttcctcaacgcacgcgagaattcgatgatgttcaccgccgggctgctgggcgcggtgatgtgcatcacgcccgccatcggcgtggccttcctgcactaccgcaacggcgagcagggtttcaagcaaccatggaccaagtgggcgttctatgtgatctacccggtactgctggtgtttggcgcgttggtggcggcgtagtctcggaatcggccggagggagagctctgaacgggccggcggcccgcggaagatacagcatcggcccttggccgattccgttggtcgattcctcccctacgccatctccccaaacggcatatccgtgctgcgtggcacgagttgcgcctcgatcacctcatgcggggtgtccggcgtctcgccggcgatgagtttgagcgctttttcggccgccgtgcgtcccatcgcatacgggtcctgcctcatggtggtcaggttgatggtgtcggcgtacgggctgtcgtcaaagccgacgatcgagtagtcgcgcggtgtgcggtgcccgtatcgctccagcttgagcaccagcggaatcgccatcatatccatctggcagcagatggcgtccgggaacttgtccaacgccagcagcgcggacagcgcggagtcggcgaaggccgggccgcgcggcaccgaaagcacctgccagttgatgtcgtggcggccttcggcgtcctcgcaggcgcggatgaagccgcgggcgcgcgcgtcgatcgaggaatcgagcccggccgcctcggagcaggggtagacgatgtgccggtgcccgaggttgatgagatgctgcgtggccgtgtacatgcctttttcgtcgtcgatgctgatggtggcgtcaaagccctcggaagacggcgtattgatgccgatgatcggcacatggatgcgctgcagctgctccacctcgtgcgggtcgatggcaaacgaggccacgaacacggcgtccacattgcgccggatgggcagctcggtgaagaactcatgtcggttggccgcggtgtcgatgtgctggaacagggagatgtcatagccggccgggtgcatcaccgattcgatgccggcgaacgtctgggtgttgaaccagctggtgatctcctcgttcatcagcatcgccacgcggtaggtctggccggacttcagtgccgtggcggagcgggagatgttgaaatcgagcttgtcggccacttccagcaccttgtgccgcgtcttccgggagacgagctcggggcgggtgaacgcgcgcgacaccgtggaaatggatacgccggccgccttcgccacctgatagatgtctgccttgcccatgtgtcctcctcgcatgaatcgtcgggtggagtgctgccagtccccagtgcctggcgatattactggcccttcgcatttgggtgtgtatgggccgtgcggttttattcggtgtgtgatcgaaaaagtgaagaaaaccgcgcggcttggttccgagtctagcgcgttcgacggccgggtgctgctcggtctggacagactcgggttgaacccggtctcgcaacgccacgtcacgtcgggctcgggcaccgccggcaacacctacgactccgccggcaatttccccgccgtcggatacaccaagggcgacttccacacctgcgccaagaacatcgccgactattccaacgccgacgaagtgcagaactgccgcctgagcggcctgcaagacctcgacaccagccaggaccatgtgcaagacaccatcgccgactatctggccacgctgctggacatgggcgtctacggattccgcgtggacgcggtcaagcacatcgccgcgcaagacgtggccgccatcaaagccaagctcgccgcaaagaccggccgggacgtggacggcatcttcttcgaacaggaggtcatcggcaacggcagcgaagcggcgtcgatccagccagtcaactacctcgccaccggcaaagtctccgaatccacttataacaaacgcctgcctgccgtgttcggcggcagcatcaccgtcgcggcgggcggcctggacgccatcggcggaccgacttgggtagattccgataaggcggccgtatgggtgaccaactgggacaccgagcgcaacggctcctcgctcaccacccgtgacggcaccagctacctgctcgccaacgccttcatgctcgcctacgattacggccagccgcacatcttctccggctactactacgccagcgtcgacgacggcgctcccggcgcccccgcacctccgtgccggacatgacctgcccgactgacggcaccttcaccgccactgtggccaaggactcggccgtcgccctatacgccggcgcgacgcccgcaaactggaccggcacccggaaatacgatccgtccgaccccgcctggttcaccggcgaaacaccgcataagggcgatgacaccgccgccaagtccgccgattccgcagcgtccgccaagtcaggcgacgccaagtccggaaaggcaacgtccgatgccatccgccgcgccgcaacgctcgccgccatcctcctgcccgtcatcgcctgcgtcacgttcatggcgatagctcgcaggaacggcaaagcccagtccgacaacagcggcccgaataacgactgatccggccccactcagccgcgcatccgcggcgcggtggcgctgcgcttcatgcggaaccgccactgaccaaggccctgatgcctatgcctgccatcggctgggtgccggctgacgggcatgctaagtcttccgccggtcccctcatcgggaatcgacggaagactttttgtcgttgcgatgccgtgccttccgattccctgagagggggtgcggggcggtgtcaggagcgcggcggggcggtggtcgatcgcaccagcagctggacggggaaggtctcgtgggggatttccggctggcgtccctcgatgaggtcgagagccttcttcgccgcgcagacggccatgtcgtagggcttttgccgcaccgtggtcagccctgcttcgctggagaacgtactgttgtcgaacccggtgatcgacacgtcgtcagggaccgcgatgccgttgcgctgcaacttgaacagcaacgagatcgcttgggaatcctgatgaaagcagattgcggtggggggattgtcactggcgagcagctcggagagtgcggcgttggcgatgtcgtcgccggggtcgacggcgacgatgcgaccgtcgacaccgtccagctcatcgaccgcatcgcggaagccagagatgcggttgcgcgaactgaacccgagcgtggacgtgaactcctcgtacatgtacatgatgcggcggtggctgagcgccgcgagatggcggacgatcagcttgatgccgacccggtcgtcgatgctggccgacgcggtgaaatcgctggacgtgatgttgatgccgatcagcgggatgcgcgtcgtgttgagccgtttgatctccgaatggctgatcgcgaacgacgagacgatcacggcgtccgcgttgccgcgcaccggcagctcgtcgaagaacgtcctgcgcgcgtcctcgtcgccgatcggatagacgaccagatcgtagccggcgttgcggagcacctcgttgagcccctcgataagccgcgccgtgaaccattctattttgccgctgcccaccagcagtgccacgcggtaggatcgcccggatttgaggattccggccgtgcgtgagaccgagaagtcgagctggtccgccgcgagcatgaccttggtgcgggtcttttccgacaccatctcgggtttggagaatgcacgggacacagtggctgtggatacgcccgccttgcgggccacgtcttcgatgctggctttcatgcgttcctcccgtctgctgcccggtacgttgccgatgtggatgcggctcattgtatgacccgatcgttccgccactcgaaggggcgggtgtcggggcggattcatatatgcaacattgtagggcattgcagggcaaaatggaaactgaatatgtaatggtttacatttgcgacacgccgaagaaaaaacctatgtgcacgctcacattgttgcaatgtaacgggttgcaaatgtaatgggttgtagatggtgggcaaccgacttgtcaaacaggctcgacgatcgtattctgttgcttgtcctcaaggatctacaaggaagtaggaagaaccatgaaccttaagaaagtatgctccgcagcgattgcaaccgtgagcattttatctctcgcggcgtgcggcagcggcaacaccggcactggcacgaccgacaccaacgccgacaagggtcttgatgtaatggggcagaccattcagtacgatccgaaccaccttgtcaacaacggcaagccgatccagctcgagtactggagctggggcagcaagggcgtcgacccggtctacgcgatgatcgagaagtatcaggagatctacccgaatgtgaccatcaagcccgtcaacgtcgcgtgggacgactactggaccaagcttccgctggcgctcaagggcaaaaacgggcccgcgctgttcaatgtccacaactcctgtgactccctgatccgcccgtacgcggccaactacgacatcgacacggccgcgttggaggccgactactctaccgccgacgtacacgaggacgacaacggcaaggtcaagtacatcgactccgtgatcagtaccggcagcatctattacaacaagaccctgtggtccgaggccggcctgaccgacgacgacatcccgaccacgtgggacgagttcatcaaggtcgcccagaagctcaccaagaccgacggcggcaagatgacccaggccggcttcaacttcaacggcgacgcctactccgccatctaccagggcctcaactaccagaagggcgaactgctgttcagcgccgacggcaagaaggccaattacgacaacgcgacgaccaaggagaacatgcagttcctgcaggacctgtacaacaagtacaaggtcggatccgtcgatttcggcaacgactacacccagagcttcggcaacgggcagactgcgatgatctacgcctggggccatatgggaggcacgctcaaggagaagtacccggacatcgactacggcgtcttcgccaccccgaccttcaccaaggacaccccgttcgcatatgaccgctacaacggcgaatccacgccgggcgtcaatggcaaccagaccaaggaacagcaggccgtcgcgcaggacttcatcaagttcatcctcgccaacgacgactacattcgtgtggcggcggccgaactcaactccttccccgcgaaggtgagcctgcagaaggatgaggacatcctctccaatccgatcatggccgctctccagccgcgcgtcgaccgcctgatctggcccggcccggcgcccgccacagttgaaaccagcggcaaggccgcattcgagaacgtgttccagaacggcatgagcatcgataaggcgctcaaggaagcgcaaagccagatggacaccgacatgaagagctccgacttccagtcgatggaaagcaagtacgccttctacgacgaacacaagtaggccaagccgggccgttcgccctcttccctgacaaccggccggcattggccggaccccgggccgcggcagggcgtttcctttcctcctccctgctgcggccaccaacctctttcgatacaggagcattagatatgagccagtccatgatgcaatccaagcgaggcgagatccgatgaaaagcaagaacgccgccggatccgcgctcagccgcatttttaccctacgcaacatcgcagtcacgttcctggtggtgtatttcgccgtcttcctcgcctacccgatattcaaggcgttcgccggcagcctccatgactggaacccgctggtcggcacatacgaatgggtcggactcgccaacttcgcgcagatcctcaccgacaagctgttctggacctccatgctgaacaccgtggtgttcgcgggcgtctccaccgtcttccgcatcgtgctcggcctcggtctcgcgctgttgctcagctccaagctcgtcaagtgcaaggacaccctgcgaggactgttctacatgccgaccatcacgccgctcgtcgccgtttcgttcgtgtggatgtggatgttcgacccgcagttcggcatgatcgaccgtgtcaccggccttgacatcaactggctgcacgacaccaaatgggccatgcccgcgatcatcatcatgacgatctggaaggatttcggctacgcgaccgtcctctatctcgccggcatcatgaacctgccgcgcgacgtgtacgaggccgcgtccatcgacggtgcgaacagcgtgcagaccttcttcaagatcacgctgccgctgctcaaatccagcacgctgttcatcgtcatcacctcgctgatcagctacctgcaggcatacgtgcagatcctcgtcatgaccgagggcggcccgggcacctccacctacaccatcagctacctcatcttcgatcaggcgttccagaagtacaacttcggcgtcgcctccgcgcaggccgtcgtgctcttcctgttcaccggcgtactgacgctcatcatgttcaaggtttcgggagatacggatctgtcatgaacaagaaacgcaacatcgtcggttggatcctgaccgcactacttttcgtcgtcgccttcatcaccgtcgtcccgttcatctggatgctgatctcgtcgttcgccccgaacagcgagatcgtcaaggtgaccggcggcctgttccccacgccgtccagcgtcgagaactacgtgaacatccaggagaaattcaactttctgcgactgtttgccaactcgctgttcgtggccggtctcaaaaccgtcatcgcgatctacaccagcgccgtgctcggattcgtgttctccaagatgcatttccgcggccgcgacctactgttcggcgtggtgatgagcaccatgatgatcccgtgggccgtgaccatcatcccgcagtatgagatgttcaccaactggggtctgcaggatacatactcatcgcttgtgatccccggcctgatcagcgccttcggcatcttcctgttccgccagtccatcggcggcatctccgacgagctgatagaggcggccaaactcgacggtgcatccgacacgcgcattttccacagcatcatcctgccgatgagccacaacaccatcgccgcgctcgccatctttacgttcctgtggaactgggaggactacctgtggccgttcctgatggtcaccgacgagaacaagcagctgctcgccgtcggactgaaggcgttcaacggccagtacggcactgattacggcggcctgttcgccgcgacctcgctggcgatcgtcccggtgatcgtggtctacatgatcttccagaagcagttcatcgccggcatcgccaccggctccggcaagtagccggagcagcctgagacggcctgccgggccggttgggccatcggcctgagacggccccggtctgaatcggcctgagccggctgccggccgggcacgcgttgcggcttcccaccctgaccgggaggccgcaaccacataccatgcaccatagttgaatacagcacaacgtactttctcgcgaagggggagaaccatggcaaagtcgcctgatccgaaagatttcacagtggatgcccgtcccgtcatgcgcggggagaacgtggtggccggcgattgctggcgcatcgggctgatcaccgattcgctcgtacgcttcgaatggtccgatgacggcacgttcgaggatcgtcccacgcagacggtgctcaaccgcgatttcggggaggtggtgtcatacgccgtcaccgaacgtgacggccgcgtcatcatcgacaccgcggccctgaccatcgtctacgaccagcagccgttcagcaaggaaggcctgagcgtggtcgtcaaaggcgtggccgacacccagttcaacacctggcactacggcgacgcccagcgcggcaacctcagaggcaccgcccgcacgctggacgaagcggacggcgccatcgagctcggcgacggcgtgatctcgcgcgacggctgggccgtcatcgacgattccgccgccaacatcatcatcgaaaccgacacagtgaacggcaaggcgaacccgttcggcacctgggtatccccgcgcgccaccgccgaaacggacttgtacttcttcggctatggccaccgctacatcgaggccgtacgcgacttctatcgcctgaccggccccacgccgctcctgccgcgcttcgccatgggcaactggtggagccgctactaccggtacacgcaggacggctatctggccctgatggaccgcttcaagcgcgagggcatcccgttcaccacctccgtgatcgacatggactggcatcgcgtggacgacgtggacccgaagtacggttccggctggaccggctactcgtggaaccgcgaactgttccccgacccgccggccttcctcgccgacctgcaccggcgcggcctgcgcactacactgaacgtccacccgcgcgacggcgtgcgcgcgttcgaggacgcctaccccgaagttgccaagcgcgtcggcatcgacccggccaccgaggagaacgtggaattcgacctcaccagcccggacttcgtggacgcctatttcgacatgcaccaccgcatggaggccgaaggcgtcgacttctggtggctggactggcagcagggcggcgtgacccgccagaagggtctcgacccgctgtggatgctcaaccacatgcactacctcgactcagggcgcggcggcaactggccgctcaccttctcccggtacgccggccctggctcccaccgctacccggtcggcttctccggagacacgatcgtgacctgggaatcgctcgccttccagccgcagttcaccgccaccgcttccaacatcgggtatggctggtggagccacgacatcggcggccacatgttcggctaccgcaacgaagagctggaggcccgctggtaccagctcggtgcgttcagcccgatcaaccgactgcattcgtccagctcgccgttctccggcaaggagccgtggaacttcaaccgtgacgtgagcgccgcgatggtggacgcgctgcgtctgcgccacgcgatgatgccgtacttgtacaccatgaactaccgtgccgccgaagccggccgtccgctggtcgagccgatgtactggcagaacccggatacaccggacgcctacgaggtgccggacgagttccgcttcggcaccgagcttgtggtcgcgccaatcgtctccccgggcgatgccgccgcctgccgcggccgcgccgacgcctggctgccgcagggggagtggttcgacttcttcgacggccgccgatacgtctcatccgacgccgccggccgccgactggaggtctggcgctcgctcgaccgcacgccggtgttcgccaaggccggcgcgatcgtgccgttgcaggacgtcgcggaatccggcgaagcgatcaactctatcgccaacccgcaggccctgcgcgtgctggtgttccctggtgccgacggctcgttcgtcatgcgcgaggatcgcggcacgtggggcgccaccagcgccgacaccgcgatagcgttcacgtggggcggggccgatgcgtcgcccagcgccttcaccgtcgtgccggttaccggcgatacgtccgccgtacccgagtcgcgcgactggacggtcgtgttccgcggcgtcgcgccggtcgatgcggccagcggcgtgcgtgcatggtccggcgaggctccggtcgaggcaacggtggcgtacgacgaggcgaccatgagcctgaccgtgtccgtcgtcggtatcagctcggctgccagtctgcgcatcgagattcccggcggtctgcgcatcgccgacaatccggtcgaatcggacgcgatggacctactgctgcacgcccagatgctctaccgcaccaaggagctcgcgctgcaggcggtccacaagctcggcatcggcgcgatcggcgccctgcgcaccatgaaccgtggtccgcgctacgccaacgatttctggatcaccgacatgcccgatgcggtggccggcgcgctcgaagaaattttgctgcgcagctgagcccggttgcagttttctgcaacatccgggtgcgccccggtatgcggcgataagtttggcatggttgccgaagagcgtggcataccgggtgcagtgcgtgggatggccttcgcgattgcactcaccgtgcggtcagtggaaaggaacctttcatgcacaaggtgaaacagcacaagggcgtcgcggtggccgccgcggtctgcgcggtcgcgatggcggcctcgctcgcgacccacgccggcgcggccggggaccggcgttattgactggctggcgttatcgagtgattggcggtatcaattagccggcgttattgatgagccggtgttgtcgattagccagcgttatcgaccggcactgaagcatgcagtacccactgcccgcgtttctcccgtacatcccaatccccgtgcgcatgcagcacacgctcccgatagtacgcaagcccggaatgccgcccctcaagcgtcgtgccaccttgacgtgggcggtccgtcacatcaatggtgacgcggtcctgagcggcggaaaccagcaccacgtaacgctgcgtcggatcggcatacctggcgatattgccaaacaattcccgcagaaaatcggcgacaaacactgtgtctgagttattcagcgcatcgatgccccagcgacaataacgtcgccgacacaccccatgcgctgcaatcgcgcgccgccgctggcaagtctgatggcaaggccgatggcgcgcccggtaacaaggctgatggtaaggctgatggggcgcccggtaacaaacccgacggcaagcccgaaggcaagggcgacggtaagcccgatcagcacgatgccgggcgctcgccggtggatttcggcggcgatctgtggcccggtgacgccatcaagcgccatatcaatcagcagcacgtcggtatgacgactgccggattggcattccaaaatcgccacggccggggaagtagtgctccatacgtcaacgatgcggccatggatatgggtcgaagtcgccagccgcgcgatgcaatccagcgcacaggcgtcgttatccagaatgccgatgcggaaagtcgctggtggttcatgcgctgattgagtcgcgtccgacatgactccatacactagccgctccgccccgctccagtcaccccttgcagttttctgtataagtggattttggctccagacgcaccactccgtcatcgccgtcagtcactcccaaaaaaacttgagccaaacatactcaactttttgtgttgaaattgggaatagaacttgccaaatggaagttgagtgatgtaggctcaagtttggaaggtccaagagacgaccaatcggaacttgggcaaagaacgtaagaacaaacgagtaattaaggagcacacattatggcacgcgcagttggtatcgatctgggaaccacgaattcctgcatcgcaactcttgaaggtggcgagcccaccgttatcgtcaacgccgaaggcgcccgtaccacgccgtccgtggtggctttctccaagtccggcgagatcctcgtcggcgaagtggccaagcgtcaggccgtgaccaacgttgaccgcaccatctcctccgtcaagcgccacatgggcactgactggaccgtcgacatcgacggcaagaagtggaccccgcaggagatttccgcgcagatcctgatgaagctgaagagggacgccgaggcatacctcggcgagcccgtcaccgacgccgtcatcacctgcccggcatacttcaacgatgcccagcgtcaggccaccaaggacgccggcaagatcgccggcctgaacgtcctgcgtatcatcaacgagccgaccgcagccgctctggcctacggccttgagaaaggcaaggaagacgagcgcatcctggtcttcgacctcggcggcggcaccttcgatgtctccctgctggagatcggcaaggatgacgacggcttctccaccattcaggttcaggccaccaacggcgacaaccacctcggtggcgatgactgggatcagaagatcatcgattggctggtttccgaagtcaagaacaagtacggcgtcgacctgtccaaggacaagatcgcgctgcagcgtctgaaggaagccgctgagcaggcgaagaaggagctctcctcctccacctccaccagcatttccatgcagtacctggccatgactcctgacggcaccccggtgcacctggatgagaccctgactcgtgcgcacttcgaggaaatgacctccgacctgctgggccgctgccgcacgccgttcaacaacgtgctgcacgacgccggcatctccgtgagcgacatcgaccacgtggtgctcgtcggtggttccactcgtatgcccgccgtcaaggacttggtcaaggaactcaccggtggtaaggaagcgaaccagtccgtgaacccggatgaggttgtggctgtcggtgccgccgtgcagtccggcgtcatcaagggcgaccgtaaggacgtcctgcttatcgacgtgacccctctgtccctcggtatcgagaccaagggtggcatcatgaccaagctcatcgatcgcaacaccgccatcccgaccaagcgttccgaggtcttctccaccgctgaagacaaccagccgtccgtgctgattcaggtctaccagggtgaacgtgagttcgctcgcgacaacaagccgctgggcac

SEQ ID NO: 2060 - DNA, 8879 bp, Unknown
  R17_18m  MAG No. k141_53493
acgatgttgtagagcgaggtgacccactgggcgtcggtcaggttaatgccgatgtcgtcgatgatggtggggatggagacgttgacgatcgagctgtcgagcacgatcatggccaatcccagggccatcacccacagcgcgccccacggcggcgcctgggtgggcagcggcgacgaggccgtcggattcgttgaagagatcgaagacgcatcggcctgagtctgatgctgagatcgggatgcatgatccataacggggtttcctctcattgccatgattgcggcgaccgacacgcctatgcgccattcacggtacatccgcggcctagaccgtctcgccggatttcgcgggacattccgggcgttcagccatgggcgtaacctcggcggatcactgaagagaggagcaccaaagacggccgcactattccagatgcgtcatttcgaaatgaaagcccggcagaacgccggaatcgcaacgatcgacaaatcgccagacgatacagggccgggctctcgctcaggaaacagggcatgtccagcgcccatttaccggcgtcggcaatgacggcatcgccgccaccttccacgtctcctcccgatgaccgaatcgctaattcccgcccgccagaaccccattgcatcgtgtagacgggatatgggataatccacaaggtgcttttgcgtaggaccaaggcaccggcgatgacacgggacaaccacaacagcgaatgacgcacaacgggccgtccgggacacccccgtaaacggtcgcgtcgttttccattggtgtcattacggggtccaagtcccgcaaaacgttggaaaatcagcatttcttgaacgataaggtaacatatggctgagtttatccaccagatagttcgtagtcactgagccttgctattccaacgtttttcccgcatgtcccgtgacacaacagcatgtcactcatcggctacgaatcggcttgtgtcaaagttgcgtcatccgacgctaatccgagacccagcattgctagaatcgatgtaagtgatgccgacgcgacggcattccacatcacggaagattcattcactttcgatgaggcaaggaggcgagacatgacgaagctcgaacgcaaccagatcgatttctccacgtttatgctgtatcggctcgccgagcattggggcaagtccgtgcccgacacctatcgcattctcgataaggccaacgctatcgacggctaccttgtcccctgctacgacatgctgcacacactcggcagcgaatacctcgtcaacgacctgacggactacgtgcgcgagcggggaatctgcatatgaggctgtaccacggttccgacgtcacaatcgaaaagcccgacgccatccacttacgcaagaaccttgatttcggctcggggttctacgccaccagttatccgaagcaggcggaacgctgggccttgcgacgttcattgcgctcgcatggcaaagcgctggtcaacgtgtacgaattcggcgaaacggcgaatctccatattctgcgtttcaacgagaacgacgccgaatgggttcgattcgtatgcaactgtcgtcggggcgggcagcctcccctgggaactgacctcatcatcggaggcgttgcggatgacaaggtctacgcggccatagacatgtacatgcgtgagctatgggacatggaacgcaccctgcaggcccttgccttctacgaacgaaacgaccagtaccgcttcctcacatcccggtcgatcgcagccctgcgatacgtcgagacctacgaggtgaaacaatgacgatcacgccacaaaccctgacgaagctcgaaacgctacgcaaggagcatctcgaatccgatctcatcgcgctgatagccgaccaatacgacatgacagccgccgatgcgatgaaactctattattccagccaactcagccaacaggtggccgacggctcctacagcatcgaacaactcgacgcgcgctacctactcgacgaccttcaacgatacgagccgcaactcttcagaaccgtcaacgcgactgaatagggcacggctgccgagttccgacacgagcaccctcgcatcccatcacattccgtagcgacgcggtgtggacgacaaggcaacagctcgtcccgttactcggacgcggcatcacgacgatcagcaaaacacatcggcaatgccaagcgtgaggaattggacggaatcgcccccagcggcacaacccacgagctacatctcgcctactcccctgcgtcgggatcgtatttgagaatgtcgcccggctcgcattccaaggcctggcagatattggccaacgtggtaaaccgaatcgcgttgaccttgttgtttttgatcttggataaattgacgttagtgataccgacctgctcggcgagatcgcccagtgagatgtgccgcttcgccatcatcacatccagttccagaacaattttgcccatatcaaccttccctgaatcgcgcaatcatcagagcaggccgtcgacgtcatgctcaagctcggcgccgtatgcgaagaattgcgccaggcacagcacgacgagaccgaaggcgatcggctgcatattcacgaagaattccaccttgcggctccccaccacgagatcgacgacaaccatgaaaatggcgttgatgatgggggcgatgatggatagttcgccgatgcggcggacgcgttgcacgttggccttggtgaagggagattcggtttcgctggtactgaagatcagatggatgtttctgaacaccacagccatcatcccaagcatcgccaccatggcgattgcggcgacagcgaaaccacgggcgagcacagtggcatccgatgccacaggcagcagattcgggtccccaacgataaacagattcccggaatccaagccttcctgaacccaccgcaccagcggagcaccggcaacgaccagggcgaccagcatgcccgcatacaccgccgttgcgatccagagcatcacttccacaatcttcgcgatgaccttgaccgccgcgttaagcttcgttgccttcatcgttatcacttcctttgacaataatgaaaatatttattatttgataattttttatcgttttacgataattattttatatcagacgaatactttctatgcaatgctcaaagcatcggcgtgttccgcgatcgaaagcacctgcgccatgcgctacaaaccgatcaccgcaatatgcaacctgccccgcacctcgtcaatccactgttgcggcatgacgatgggatatgggataatccacaaggtgcttttgcgtaggaccaaggcgccggcgatgacacgggacaaccacaacagcgaatgacgcacaacgggccgtccgggacacccccgtaaacggtcgcgtcgttttccattggtgtcattgcggggtccgggtcccgcaaaacgttggaaaatcagcgtttcttgaacgataaggtaacatatggcagaattcgtatttcagatgatcaaggcccgcaagtcttacggcgaccgcgtgattctcgatgacgtgaccctgagcttcctgcccggcgcgaagatcggcgtcgtgggcccgaacggcatgggtaagtccaccctgctgaagatcatggccggcctggagaccgtgagcaacggcgaggccacgctgaccccgggcttcacggtcggcatcctgcagcaggagccgccgctggatgacaccaagaccgtgggcgagaacatcaagatggcgttcggcccgattgccgagaaggtcgcccgattcaacgagatcggtgaagaaatggccaacccggacgccgacttcgacgcgctgatggaagaaatgggcaagctgcagaccgagatcgacgccgccgacggctgggacctcgactcccagcttgagcaggcgatggacgccctgcagtgccccgatccggacaccccggtcaacgtgtgctccggtggcgagcgccgccgtgtggccctgtgcaagctgctgcttgaggccccggacctgctgctgctcgacgagcccaccaaccacctggacgccgagtccatcctgtggctggaacagttcctgcaccagtacaagggtgccgtcatcgccgtcacccacgatcgttacttcatggacaatgtggccgaatggatctgcgaggtcgaccgcggccacctgtacccgtacaagggcaactactccacctacttggagaccaaggccaagcgtctggagatccagggagccaaggacgccaagctcgccaagcgactgaagaacgagctcgactgggtgcgctcctcccccaaggcccgtcaggccaagaacaaggcccgtctggaacgttacgaccagatggagaacgaggcgcgcaacaacaagaagctcgacttctccgagattcagattccggccggcccgcgcctcggttccaccgtgcttgaagccaaccacatccataaggctttcggcgatcgcgtgctcatcgacgacctgtccttcacgctgccgcgcaacggcatcgtcggcgtgatcggcccgaacggcgtgggtaagtccacgctgttcaagaccatcgtgggcctggaaccgctgaccagcggcgagctgaagatcggcgacaccgtcaaaatcagctacgtggaccagaaccgtgaaggcctggacccgaacaagaacctgtgggaggccgtgtccggcggcctcgacttcatcgaggtggccggcgtggaagtgccgacccgcgcctacgtggccagcttcggcttcaagggcgccgaccagcagaagctgaccggcgtgctgtccggtggtgaacgcaaccgtctgaacctggccctgaccctgaagcagggcggcaacctgctgctgctcgacgagcccaccaacgatctggacgtcgagaccctggaatccctcgaaaacgcgctgctcgagttcccgggctgcgctgtggtgatctcccacgaccgttggttcctcgaccgcgtcgccacgcatatcctcgcgtgggaaggcgacgacgacaacccggccaagtggtactggttcgaaggcaacttccaggcctaccaggagaacaaggtggcccgactcggtgaggatgcggcccgcccgcaccgcctgcacaagaagcttgtgcgcggctgagatacgccggcattagtgccacaacgcgctttatacgtcgaaagccgtccctcaggggcggctttcccataattgcccccatgactgccccgccccgcatcccataaaatcccacagtcacctacggcaacgcaccggcagcgcagcagcaacgtagcagcaacgtagcggcaacgcaccgcataaccaaccgtttaccttccaaacagtctcgttacatttcgctcccggaactcttaacccccaccggatagactgccaaccataggttggaatacgataaccgaatatcgaacactgcagaacaggaatcgaggaacgccatggctcaggcaaccaccgtaactccattggaccatctggtgaaggtgctgaagttgggcgagccttccgcttaccgcaatcacacatacatcaatggcgagagtatgtacttccccactggccgcgtctacggtggccaggtcatcgcccagtcggtgatcgccgcgtccaaaaccgtgggcccttcacgcctgccgcattcggtgcatggctatttcattgccgccggcgatattcgtcaagacctgctgtttgacgtcgagaaccttcgcgacggccgctcgttctccgctcgtcgggtcaacgtcacccaagccgaggggtcgattctcacggccatcgcctccttccaggagaccggtcaggagggtgtggaatttgccgatccgatgccggaaaacctgcccgatcccgaaacgttgacttccgccaaggaactcatgcagccgttcgccgaaaagtcgccgttcgccaatttctatgtcgagaaatcgccattcgatatccgccacgtgacgccgaccgtgatgctgcgcgcagacaaggattccgccgagcatgattccggcaagcagatggtgtggatgaaggccgatggccacgtcgatgtgccgcaggtcatgcatcgtgcgatgctggcactcggctgcgatcaggtgatgatggagccggtgctgcgccgcgccggactgtcgatttccacaccgggcatttcctatgcgtccatcgaccattcgatgtggtggtatcaggatatcgatatcaacgaatggcatttatatgtgcaggatacgcctatcgccgcgcacggacgcggactcggcatcgccaaagtgtatgcgcagaatggcgacttggtggcggccatcgctcaggaagctatggttcgcgtgccgcaggagtagtgggaatcggcttggccgatggtgtggtttttcttcttctctcccccagtcggctacgcctacggcccctcgccagagggggcttatcacggattatcgcttgtaggcttgggctatgtcgctacggcgcttggcttccttgattttcgggttttcggggccttcgttcggcggtagctggcacaaccattcgccgataatgccgatgatcatgtcggcgatgcacaccacggccacgattgcgcactcggtgacggcgtgtgcatagaaatccgcctcgatatggctcaggctcatcacaatctgaccgccataccagccggcgagcgttgcgcccgccaatcccagtgccttagacagcaccagcgtatacaccgcgatagtgggattgatgaagctatgcggacgcttcttggggtcggtattcgcgtatttatgcacttgcagggccaagatcagcacgataacgcccagcacggccagcaatccggtcacaatccaaggcgcaccaatcagcgacagtcccgagctttcgccgtaggaggccagaccgatacccgccaacaggcccagcacagcaccgatcacatactgccaccatggtgttcgccgtgttttcatgtccggcctccttatcgttgcgttgctgtttgctgtttgcgaacggccctcgcgcctgggctgttcatcttgatttggttttcgtcactgccgtgcccggctgttcgaggccggataccggtccgtcaccgtctggtttctagcctaccgttcgtaactggttctgccatcagctcaactgttcgacagtatccagttgtccgatagcaatccgacctgtccggcatccggtgccatggccaaaaggaaagccaccgggtcgccgcccagagaagcattcgggtccatatccagccaaggtgccaataccgacgcatggttacgggccgacggccaaggaatgctgcagttgggctcgtcggaagtcacgccttccatgtcgacaaggtcaaggtcgactgccagatcatgaacactttcgatgctgcccaatacggcaatcaggtcggcgggcggcaacttggtttcgatttggatgaccgcgctcatcgcgtccgggccgtcgaaatggctgacatggtagagcggcgagatgccctgtacctgattgccaggaacactgtcgatggaaacgatggtttcacggaacagccgttcggcatcctgcgaggtggaatccagcgaaataatcgccttgcgtgagacgggtgccgactccgacgctgatttttgcttgactgcatgcccgccgagcatccagtcttcgctctcgagctgcacggcgttacggtccggtgcggcggccagcaaatcggctacaggcccctcatgggctccggcaagtttggcgttcggattcagcgccgcccagggagccagcacaaacgcgcgctgccaagcacgcggatggggcaatgccagatccggatccgcgctggtgatgccatcaaagtcgataatgtccaagtccaacggcctggaatcccaatgattctcacgaattcgcccatggttcgcctcgatgctttgcaacgcggcgagcaattcgtggctgcccattgtggtttcaagctccaccacggcgttcaggaaatccggcgtaccgtcggccatgccccacgcggccgtgcggtaaagcggcgaaataccggtcacctgtgtgccgagcagcgcgtcaatctcccgaacggcggctcgcaaggtggattccacctcgcccacattgccgcccaaggccaccaccgcgttatggatggcatgctcttcagcagtacgtccattatcggtggcacgcacgcgcgagatggagaccgatacatctgcaaaagccacgacgatgggtgcgtgaggcttgtgcacggtgacgtcgatggaggcgacggccggcgcatcggcaaggatcttatccgcgatacgttgggccagacgctcgatcaggtccacatgagggccttcgatgacagccgtgatgtccttggccacacggccgtaatcgatggtgtcgttgagatcgtcggattgaccggctgcggccagatcaaggtgcagggtgacatccacgacgaaggtttgtggccgttcgtgttcgaaggcgagcacaccgtgggtgccgttggcatgtacgccggtaagtgtgatggtgtccattggtaaggctttctgctcaaatgctcccctcagtcgccttcggcgccagctcccctcgtccgaggggagccaagacctagaagcaaccaaaaaacggagccaggggaatcatgcgtattcgcgccaggtgttgccggcgatgacggcggcgcggcttttggccacgtcgtgtacgcgcacggcccatgcgccatgttcggcggacagggcggacaaggctgcggtcacgtcatcgcgctgggccatgatcggcccatcagcaccggcagcgcccgcctcg

SEQ ID NO: 2061 - DNA, 21602 bp, Unknown
  R17_18m  MAG No. k141_53921
cctgattgtcgtaaagtgcgtctaagccgctacttatcagccatccggctccagtgccaatcgccgttccgacaaatgcgccgaccacggtgccggcaccggggacgatcgatccgacgaccgcgcccacggcaccgccaacggtcccaccgaggccatcaacggcaggcccgagaccctacgcggcatcgccctcggcttccgcaacctcgacaactacgtcacccgcagcctcctccacaccggcggcttcagacacaccatacaagcccacctataagcatcccccctacacaccaaaaccggaagagccggatgattccctgcaagccgatcacgccaacccgacccgacgactaatcagattgaggacggctgaattaagcttgtgccctcatgatacaacatgtcctgcgaccgacgccagacacaacggcagcattctgcccaccatagggcgtgtctttaaccagaaagtaccctcaaatacgttcagcaagatatatgcacgcagaacagcccttccgcattatcttatttgacatagagcatgccccttccattccacagaatcaagcaaataaacgagcggagagactggacacaccgcaaaacaatggcccaacccctccgctcgtttgttatggaaggaagagggatgaataagtatgtttacttcactgacttgatgaagacgatcagcaccgcgccaatcagcgagcagaccgctgcaagcgggaagagtgcgtgatagcccaccgaggaaattagcgccgccgcaacatcccacgcaccatattcaggacaaatccagtccgttgttgtccttggctttgctcaccatatcagtcaaatcggggtcgtccacagacaccgcgttctgctgactgagcgtcaacgatagcgagccattataggagtcgccgtattcgtccttgccggacacgcttatggcaatcgaattcatcagacgctttctgccgtagttcagatccacggtgatagtcggcatctccggctcttcatccgtgccgaaatcccagttgcgcacattatcgagcgcctgacggtactcatcttcagcatcgtccacgccggcatcctcgatttgctgaatcacccaggatttcagatgcggatactgcgcttcatgactgatccagtaattcacgaaatgctgagacaacgctttgatatcgatttggtacgacagctgcgtattgccggcagacttggcagacgatgtcttcgggaacagctggctgcgcacattcttatcttccagctccacgccgaaatattgttggatgaatttgctggcctcggccttcacctcggcagacgttttcgtgcccttggcccggtcgatgtcgttcgagtacccatcgtcgttcatcttgtccagctgatcgtagaacgtttgctccgcgccggtgatgtcccaagcaccgttcttgaccaacgcatccttgacgttcaatatcaagtccgccacatcactaccaacgccgttccttaagtcatcttcatattggtcggccgggcagtagatgtagtaggggtcgtcgtcatgccaaacgaatttctcggcgaatgcgcctttgtaccaagcgaaggtcgttgcatattcgtctgttttgctagtgaaggacgcggaggattcgttggtggttttgcccagcgaatacatgccagacatccgcacgtcaagagaatcgtcagtgatgctgtgggttctgagttcgtatttggtgctgcgcagagtggacagcgagttgatcgcgtcgaaggtgacgaccagcggattggtgggccggaagcccagcatcgctttgacggcggtgaagttggggatgatgaacgccaaggccgccaccagaatcgtcgcaagcaatgcgcagaaagcggcgatcagcttcttgctggatttgcgctgcggtgccaggacggcggttgcatcagtcgcctgatatgcggcaggagcgggaatcggcaaagccggcaggggaacggttggtgccggctgtggggcagcggacgcggcgtaaaccgatggggcaaccggcgcggctggtatcgatggtggtaccgcagacgccggcacagcaggtgccggtatcgacgcaggcggtacggctggcgatgcggccggtactggtgccgtcgcaactggtgcgctgtctacagacgctccacatgccgggcaaaatcgtgccggcccatcaactctatttccgcagtggccgcagtacgccatcgtgtgcctctctccctcaaatcggcttgattgccatcgcttcaatgttactcttcagcattacgcctcagccagcccctacgcgtaacgatacgagacgcggcagccttaatgcggttgttttgacgcgatgccaacatcgagctctggccaacgttctggtactcggctacatcttgctgcgagccaagaagcaggccatcgctcgcgccgacgaggccgaatggcggtctagcctcgctttaagcctcaggccagcacctccatggggtgataggtggcggtgtggtggccggtgatggggttccatacccgttcggcgaatgcgcgcagacgggcgacgccctcgcacagctcgtcggcatctccggcgtaggagaggcgcacgaagccgcgcccctcctcgccgaaggcctcgccggggaccacagccacgcgctcttcgtccagcagacggtctgcgaattcaccggagtcaaggccagtcaggcgtacgtccacaaaggcgtagaacgcgccttgcggttcgatcagacgcaataccgggcatccggccagaccgtccagcacgatctggcgcttggcgcggtattcctcgcgcatggcggccacgttatcttgcgggccagccagtgctgccacgcctgcgtattgcgccaaggagttcaccgaggagtgcatgagttcggcgattttgccggtctgttcgatgaccgcttcgggtgccagcaggtagccgatgcgccagccggtcatcgcataggttttcgacaggctttccaccacaatggtgcgctctttcatgcccggcaccgcggcgatcgatggtgccacggctgcctctcccccaagcgtttccccgaacgtttccccaaacacgaacggatggtaaacctcgtcggagatggcccaaatattgtgctgcttgcatacttcggcaatacgcgccagttcggcggcagaggttaccgcgccggtcggattgcccggtgagttgatgattacggcgcgggtgcgcggggtgatcgccgcttcgatgtccgccgcgttcacgcgcatgccgtgctccggacgcagcgccacggtgaccgggcggccgccgcacagcatcacttcggcgtcataggaagtgaagaacggcgagggaataatcacttcatcgccggtgcccaccacggctttcagcgccagaaacaggccaatcgtggcaccgtcaacggcttgaatctcggtttcgggatcataagtaagtcccttcacacaggcggagtaatcggccacggccttgcggtattcggggatgccaagcacgttggtgtaccgagtgcggccagcctgtgcggcctcgcaagcggctgccacgatatgcggcgcggccgtggcgctgggctcccccacggtcagtgaaatcgcgtcaggcacgcgctctacacggtcgaatacgtctcggatgccggagcgcgggatattcagggcttcggcggacaggctcgcgggctcggcggtcggcacagcaacccgaccggcagcaggcatagtagcaggcgcagcagcagatgcaacttcggacagagacatgttggaaaacttctgcatatcatccctcctcaatggaattatttcatcattctcttatttcaaaaggaattattacatccaattaggactttaaacgtaaacattccaccacacaacagaaaacacaggaagaactactgaaattaccaggcaaaatcggaaagccatcgcattccggcaacaggtacagtgaacacagagcacaacgaacggagaagacatcatgaccgcgattgacgagaccgaccagcgcatcctcaccatgctggaggccgacggccgcgccacgctcgcgcaactggcccaggcgaccggactgtcagtctccgccgcccagtcgcgcgtgcagaagctggagaagcgcggcatcatcaagggatacaaggccatcatcgaccaagagcagcgcggcttgcccatcagcgcgttcgtcaacgtgaccccgctcgactactcagccgaatcctcgattccggacaagctgaacaatatcgacggcatcgtctcctgctattcggtggccggcgcccccagtttcgtgctggtggtgcgcgtggcttcccctaccgcacttgaagaactgctcaatctcatccaccgcacggtgccggtaagcaccgagaccacgatgattctgcagacctacttcgcacactgaccgcgaacccggtaacctgcgcgccgaagacctgcggccacacaccccacaaaccccacaggtcacaaaaaccatacgaccccacggtccagccacaccccacaaaccccacagaccgcacgatccccaacagacacatctgacatcacccaagtccgcctttatgtccactatatgaacgtgcctccggtgtgatgcggcttccatttcgacccgattcacgcatagacagacatccaacaatcgcccgaaaaatctaacaaacggaaacttgagccactccataaccacgccgaaagctttcccgttatccgagcgagactctatgcagcaagggcctgcgcgcatagaataaaaccgtcttaattccctaccaaatcgaggagaatcatgctcactgacgagtacatcaagcgtgtctacgaccaggtcgttgcccgtgacggcgatcagccggagttcctgcaggccgttcgcgaggtcttcgagaccctgcagccggttgtcgagaagcacccggagtacgagaaggccggtgtgctggagcgcatcgtcgagccggagcgcgccatcaagttccgcgtggcctgggttgacgacgagggcaaggttcaggtgaaccgcggctaccgcatccagttcaactccgccattggcccgtacaagggcggcctgcgcttccacccgaccgtgaccgagtccgtcgtcaagttccttggcttcgagcagattctcaagaactccctgaccacgctgccgatgggcggcggcaagggtggctccgacttcaacccgaagggcaagtccgacgccgaggtcatgcgcttctgccaggccttcatgaccgagctgagccgccacatcggccagttcaccgacgttcccgccggcgacatcaacgtcggtggccgtgagatcggctacctgttcggtcagtacaagcgcatccgcgacgagtactccggcgtcctgaccggtaagggtctggaattcggcggctccctggcccgcaccgaggccaccggttacggcgtgtgctactacacccaggaagccctgcgcgtgctgcgcaacgactccttcgagggcaagaccgtcgtgatctccggctccggcaacgtggccacctacgccgctcagaaggctgagcagctgggcgccaaggtcgtcaccgtctccgactccaacggctacatctacgacccgaacggcatcaacgtcgaggtcgtcaagcagatcaaggaagtcgagcgcggccgcatcaaggaatatgccgagcgcgttccgggctccgagtaccacgagggcagcaagggcgtgtggaccgtcaagggcgacatcgctctgccgtgcgccacccagaacgaggttgatggcgaatccgcacagaagctcgtggacaacggcgtgaccgtggtcgtcgagggtgcgaacatgccgtccaccccggaggccatcgaggtctaccagaagaacggcgtgctgtacggcccggccaaggctgccaacgccggtggcgtggccgtctccggcctggagatgagccagaacagctaccgtctgtcttggaccttcgaagaggtcgacgccaagctcaagtccatcatggaagagatcgtcgccaactccctggccgccgccaaggaatacggtcacgagggtgacctgatgctcggcgccaacgccgccggcttcgtcaaggtcgccaacgccatggttgcccagggcgtgctgtgacgcttgcctctgagcagtactaagcagtagcgtaatgcccttgcttcccgtgaggaggcaagggcattgctatatgtacaacgagcaacaagtgctatcccccaaatacgtaagcccgataacaacttagcttccacctccataaccccggaactcaccaccgtcgatcagcacatggatcagcgcgctggaccatggccgacgtggtcatcaaagccatcaacggagtctcttcaccgcgcgtgatgcacctgaacaccgatttggtggtgcgtgattcggcgtaattgccacgtggctgtcggcaggactctagataccgcgtcacaatcacccagtaatgcatcacgcagtgtataactcttccgcggaaacgaacaccattcgttcatcatccatgtagcgggttcgcgtggactcactcaccggattcttggtgaacagcataagccacgcattacctgcctgatagccgcggactaagccagcacgctgatggagcttttcaatagcctccgtttcgttgaatgaattacgccatttgcattcaccgaacagaatcgttttatcgagcgaatccgcagcaatcacatcgatatcggtttgctcgtgagcaatcggatcattgccccaccatttgccgaactgagtggcaacaaaggggaggttgcccatagcgttgtttcgaataagccattgcaggcaaatcgtctcaaattgttgaccaacataggtatcaaacgctggtccaaaagcgagtctgctcgtaacctcctcgctgatattaccatccaaaatgctcatgttgcgccccacaaagcggaaccaatatgcaaagaagggatcgctcaccacatacattcccttgcgcgatttactcggatcttcaccaaacggcacttttcgctcaattaagcgcaaatcgaccagcgttttcagatatgctccaatcgaatcagatccgacacccgcatgttcagcgataagctttggcgaggaattaccacccgcaatagattgcaatatcgaataatacgatgccggttcacgaagctcctgacgcaacagcatcataggttcctcacgcagtacgcccaagttgtcgaacatcaagcgcagcacattggattcaaagccatcggcttcctgtatacgggccagataatatggcgtaccgccgaaagtcgcatagtattggaccagttcttgcggagatgtgttcgttagaaattttgccgcatccgcatagtcgaatggcaggagtcgaatctgtgctgtacgacgcccgtatagcgggcttttacgccccaatacgtcgttttccatgaatccctcgttactaccggatagaatcatcgtcacttttgtggcgaggaatccatggtcaattgctatctgcaacatggagggtaatgctggctcggcggcagccgcataagggaactcatcgaatacgaacaccatacgttcgtcagtctgtgcagcacgttcagcaacaaacgataacgcatcagaccacccgccaaacgacggggtggaatcaggcataccaaagaacgacaatgccgctcttgagaaatcttcaagattcatcttggcgctttgctgtatggccgtgaagtacagcacgcgtttatctttgacaaattcgtcgatcaacgccgttttccctacacgccgcctaccgtacagcaccaccatttcgaatgaatcactggtaaacagcttttccagcacttgtaactcgtgctctcgtgcgacaaacattgcagccctccgatccgcttaccgcccaataataagagtatcatggttaatgcaatcacgattaccttaattatgatactgataattgttgccctaccgcgaggaggatcttccttccgctgtcaaaacgaaagcccaacagtccagactgacgagcagcaacatcggcagatcaaccgctgacgccagccagcctgacagcacaaatcagcctgattgcaggcatataggcactagttagcgaaaccggctcttcgcattttggtgcgtaggggccgtgcggtttgattcggtgtgtgattgaaaaagtgaatgaaaccgcacggcccctacacgccaaaaccggaagagcccataaagtcccctcagtagcgccaacctgccagtcctttggcggaaccacaccacatagaccttcctcaacggcgccaagctgccacacgctggcagaccaacaccgctgtgtgcattctctgcgtcggcggcagtccaaaacttggcccagcaacgacgcttgctgtgcccagcgtcggcagagggccaagaattggacgcaaacgacacagaacacaccctcagcgtcggcagaactccaagatctgtaccgctgacgacggtaagccctccacagcgtcgtcagagatacaaaacctgtcccaacaccgacgcctgccacccccagcgtcgccggagtcccaagtctcggcccagcaacgacgcctacgaaccccacacataagaaaccgcacctccgatcatcgaatctgaattacttcagtccaacaaccggggtgcggttcactgaggggagttctgccagtatagctatatcagtcgtcgccgagcgtgacgtgcacgccgccgaccagcgagctgaccacgttgtagatcagtgccgcaatggtggccagcagggtgaagatcaccacttcaacaatcgagaagatggtgacgccggagaccacggtggtaagggacaacacgttcttgagatcgaaaccgcctgcatcaagaccggtggaagacacaatctgcgtaatctggctgaatacaccgaccacatcaagcagcacccatacgatcgcggaggcaacgacctgaataatcgccacggcgatggacagcatgaacgtcaccttggccacggaccaagcatccacgcgggtcagcgacaagctcatgcggcgagccctgggggcgctacggcgaggtgccggacgcacgggagtggcggcacctgaagaaggcaacgtggattcttccggatcgctggacacggagcgtgccacgcggggagcgtgctcagtaccgatcagcggctcgacatgatcgttctgcgtattgccgactgccggcggtatgatccggggctcgttgtcttcgagattctcgctcatcgtttctccttaacaggcttggcggtagcctctgctgtatgcgaggctaccagcttttcaggacgctgctcacgcctcgtccgcgttgttcacattctcgccggattgtgcggtctcggcggtgccgttcgccgcggcatcgccactgtcctcgggctcgtccttctcctcgttacgggcgatggagagaatcgtgtcgcccttgtcaggcttggcgaaggtaacaccctgggtgttgcgcccggtgcgcttgacctcgtccacgttggaacgaatcaccttgccggacttcatgatggccatgacctgatcgtcttcggacaccacgagcgcgccgaccagggcaccacggccctcgaccagttgcacggccttgatgcccaagccgttacggccctgcagacggtattcgctgatggcggtgcgcttggcgaagccctcgttggtcaccacgaacaggtccttgtcggagtcgccagggaccacatccatggccagcaggctgtcgtcgttacggaacttcatgccctgcacgccggcggtctggcggcccatcggacgcagctgctcgtcgtcggcctggaacttgaggctcatgccgagcttggagaccaggatgatgtcatcctcggcgttgcacagcgcggcaccgatgagctcgtcggcgttctcgccattctcgtcggccatgaggcgcacggcgatcaggccgccctggcgcggggaatcgtactcggccagcggggtcttcttgaccttgccggaacgggtggcgagcaccaggtacttggccacctcgtagttcgggatggacagcacggtctggatggtctcgtcgggcgcgaactgcagcaggttggccacgtgctggcccttggagtcgcgcgaaccctcgggcagctcgtaggccttgatgcggtagacgcggcccttgttcgtgaagaacagcagccaattgtgcgtggaggtcaggaagaagtgatccaccacgtcgtcctcgcgcagcttggtgcccttgatacccttgccgccgcggtgctgggcgcggtattcgtcggccttggtgcgcttgatgaagccggagtgggtcacggtgaccaccacgttctcttcggcgatcaggtcctcgacgttcatctcgccggagaacggcaggatcttggtgcggcggtcgtcgccgtacttggccacgatctcgtcgagctcatcgccgatgatcttgcgctggcgttccggcttggcgaggatgtcgatgtagtcggcgatcttgcgctgcaattcctcatgctcggccacgatcttgtcgcggttcatgcgggtcagcgtgcgcagctgcatggccagaatggcgtccgcctgcacctggtcgatgtccagcagccccataaggcccgtacgggcggtgtcggtgtcttcggaggcgcggatgagggcgatgacctcgtccagcatgtcgagggccttgagatagccctgcaggatgtggtcgcgctcttcggcctcgcgcttcaggtacgcggtgcggcgggcgattacgtcgagctggtggttcacccagtggcggatgaaggcgtccaggctcagcgtgcgcggcacgccgtcgaccagcgccagcatgttggcgccgaaggtctgctgcagctgggagtgcttgtacaggttgttcaggaccaccttcggcacggcgtcgcgcttcaagaccagcacgaggcgctggccggtgcggccggaggtctcgtcgcgcatgtcggcaatgccctggatcttgccgtcgcgcacggcctcacgaatggagacgacgaggcggtccgggttgacctggtagggcagttcggtgaccaccaggcacatacggccgttgatctcctcagtgttgaccacggcacgcatggtgatcaggccacggccggtgcggtaggcctgttcgatgcccttgtggccgaggatggtggcgccggtggggaagtccggtcccttgatgatgcggatcaggttttccagcagttcctcgcggctggcgtccgggtggtcgagcgcccagtggacgccgtccgccacctcgcgcatgttatgcggtgggatgttggtggccatgccgacggcgatgccggcggaaccgttgacgagcaggttcgggaagcgggccggcagcacggtcggctcctgggtcttgccgtcgtagttgggcacgaagtcgacggtgtccttgtcgatgtcgcgcaccatttccatggccagcggggccatgcggcattcggtgtaacgcatggcggcggccgggtcatcgccgggggagccgaagttgccctggccgtcgacgagcatgttgcgcatcgaccaggactgggccatacgcaccaaggtgtcgtagatggcgaaatcgccgtgcgggtggtacttacccatcacgtcgccgaccacgcgggagcacttgttgtagccgcgatcggggcggtagccgccgtcgtacatcgcgtagatcacacggcgatgcacgggcttcatgccgtcgcgcacgtccggcagggcacgctcgacgatcacggagagggcatacgccagataggactcgcgcatctcctgctgcaggtccttgcgctggatgcgttcgccggtgtccatcaggccgtagtcggtggtgtccgcctcctgcgggctcaacggctccatcgagccgtccggcgtgaactgctcgtcgccggtgttgttttcatctgccactgttgttcctttagttgtctaagtccgttgtgtacctccctctgacgagggaggttggaggattccgttacgcatcgatccaacgcacgttcttggcgttgcgctggatgaagaggcggcggggttcgacctcatcgcccatcagcatcgagaaggtctcgtcagccgcggcggcgtcctcgatgtgcacctgcttcagaatgcggtgctcggggtccatggtggtctcccacagctcctggtagctcatctcgcccaaacccttgtagcgctggatgccttcgcccttgggcagctggcgtccgttggccttgccttcggcgagcacgcggtcgcgctcggcgtcggtgtacacgaagtcgtgcgggcccttggtccacttcaggcggtacagcggcggcatggccacgtacacgtagccggcggtgatcatcgggcgcatgtagcggaagaacagcgtcaggttcagggtggcgatatgcgcaccgtccacatcggcatcggccatgatgatgaccttgtggtagcggaccttggagatgtcgaagtcctcgccatagccgccgccgaccgcggtgatcagcgattcgatggtgtcggacttcatcatgcggtccaagctggcacgttcggtgttgaggatcttgcctcgcagcggcaggatggcctgcgtgatcgggttgcggccctggatggcggaaccgcctgcggaatcgccctccacgatgaacagctcgcactcttccgggttggaggactggcagtccttgagcttgtcgggcatgccggcggactcgaagatggacttgcggcgggtgttctcgcgggctttcttggcggccagacgggcgcgggatgcctcgatggccttctggatgatgttcttggcctcgttcgggtgggcgtcgaaccagtcgccgagcttgtcggtcatcacgcgctgcacgaaggtcttggcctcggagttgccgagcttggtcttggtctggccttcgaactgcgggttggtgagcttgacggagatcacggcggtcaggccttcacgcacgtcgtcgccggagaggttctcgtccttgtccttgaggatgcccttgtcacgcgcgtaacggttgaccagcgaggtcagcgcggcgcggaagccctcctcgtgagtgccgccctcggtggtggaaatcgtgttcgcgaaggtgtgcacggcctcggagtaggcggtggtccactgcatggcgagttcggcggagatgccgagcttcaggtcttcggcctcgaagctgatgacgtcctcttccaccggcgtggccttgcgcaccttgaccagatagtcgacgtagtccttgatgccgttgaggtactggtaggtgacggtctggtgctttgcgccgggctcgtccgcggcgtcgccggccacctcgtcgccggcctggtcattctcacgctcgtcggtcaggctgatcttgaggcccttgttcaggaaggccatctgctggaaacgggaacgcagcgtctcgaagtcgtagatggtggtctcgaagatcttcgggtcggcccagaaagtcacggacgtaccggtggactcgccttcggtcatcggctcgccctgcttcaagggcgcggtggggtgctggtcgatgtacgtctgggtccagtggaagccctgacggcgcacttcgatgtccacgcgggtggagagtgcgttgaccacggagatacccacgccgtgcagaccgccggacactgcataaccgccgccgccgaacttgccgccggcgtgcagcttggtcatcacggtctccacaccggagacgccctcgccgggcacctcatcgaccgggatgcctcgaccatcgtccaccacgcggatgccgttgtccggcagaatggtgacctcgatatggctggcgtatccggccagcgcctcgtcgaccgagttatcgacgatctcatagaccaggtggtgcaaaccgcgcgggccggtggaaccgatgtacataccggggcggatacgcacggcctcgagtccttcgagcaccctcagatcggaggcctcataatgctcgggggccatggattcgtcaagttcgccttcggtcaattccgcattgttgatgcgttccgcagccgccttcagctgctcctctttgctggtttcgtctgccaacaggcttccttccgtgactacagggtcaacctccgtcatgaaggtcattcacggaggcgatatggcttacgaggcccgtaaagggctcttctggccatttgaccatactgcatgtgattttactcgtctaacccgacgagcgccatagcgaggcttctgcgaatttgtttggtatcttggctaccgccgccgagcccatttgcgcgtgtatccggcggccggtccggtcacgcgaatctcggcgatggtcaatcctttgagattgcgacggatggtatcggtaagttgggggataaggtaggtcagctgcgtggcccagaccgtggattcggcacggatggtcagtacgccgtccgtgaaatcggcgactgccgaatggctggcgatggcctgccccaccacttggtcccaatggttgcgcaattgcgcaagtttcatattcgccgcccagacgccattgccggcgatggtggtcatcacgctgcccagttcagccggatcgcgccccggtttgccgaagttttcgatggcctcttcacggcggcgtctgtagtccttcaaggtcgccccgcgacgggagagccgctcgaatatttcggccggcagtttggtctcgtccaggttgagttggcgggcgatcggcgggttcatgacactttccgttctacggacgcgctgtccaccgcgggttttccgtcatacttacccaaactctcgttttcccgcgaatcggacaaattgcccagagttggcagtattacggaagcgggttcggccagtgtggccacgtcgatacgatgggccgattcatagtcgggcacatcgccttcagcggccacggtaatcagcacctgatcctgttttctggcgaaatcaagaatctgcgtgcgccggctgtcgtcaagctgggcgaacacatcatcgagaatcacaatcggctgcaatcccaaccggtcacgcacgatttcaaacaatgccattttcaaggccaacgccatcgtccacatctcgccgttcgaagcgaactcgcgggcgggaataccggccaactcaaggttcatgtcatcgcgctgcggaccgataaggttcacgccgcgagccatttcaccggggtagatgcgttgaaaatgctcgctgatctgcggatgtggatcgtcgaacatcagcacttcgtcgaatgaaggcgcatatgtgagcgtcacctgctcgccggcaccggccaagtcggcgtaaatcgcggcaaatggctcggcaagcagaccgatcacatgagcgcgcatacgggtcaacgccacaccggcttcgatgaactggccggtccagatttccaaaccgctcagaaccgcatccatcggctgtccattgttggcattggcattcaattgcttcaacaatgtggcacgctgtttggcgatgcgcgtgaactgttgcaacgtctgcatgtatccgggctcgagcagagccgcagcctgattcatcatgacgcggcgtgctcccggatcgccggacaccaatcgctgatcttcgggagtgaaggaaacgctgggaatcttgccgatgatatcgcgcatatacagcgacgaccccgagttgatgcgggctcggttggcaccacgcgcatgaatcgacgcttcatacgtagtggtttgaccggcatcatcagcgacgttcgcgcggatggtggccgtggtctgcccgcgttcgatcagcggcaacgtgctggacgtgcgatgactcgatccggtggacagcacttcgacggcttccaccagattggttttgcccaagccattcttgccgaacaggatattcacgcctggtacgaaatcgaccactacttgactccatgagcggtagtggtcgagtgcgagacgggagatgtgcattagcgaatcgttggaaattcagggatctcagttgttgaagcgcatcggcacgagcaggtatcggtagtccatggactcgtcggaatcagcttcctgctggccgttgaactcgaccggcttgaccggggtcgtcatcttgatgcgcacgaatggttcggtcacggcggacagaccctccttcaggtaggacgggttgaatgccacggtgatgtcgtcgccatccatgtcgatgtccagtgtttcgttggcctgggcctcgtcgaccgatccggcggacagcgccacttcctgaccggtgaaggtcatgcgaatcggagcattgcgttcggcgaccaaagccacacggctgatggcgtcgagcagatcctgcttgttgactacggcctgaatcgggtattcgtcggcgaacaggcggtcgaccgccgggaattcaccgtcgatgagctgggaggtggagacgcggccggcgttttcgaagccgagcagcgtcgggctatcggcatcgaaatcaaggcggatgttctggtgctcgtcaagagcacgggccacatccttgagcagggagccgcgaaccagcgtggtggtgtcgacgtccgggttctgcggagtccaagtgaaggtggcgcgggccaaacggaagcgatcggtggaggtcatgacgaccttgtcgccttggaattgcatgcgaacgccggtcagtaccgggcggttttcttcgcgggagacggcaacgcatgcctggttcactgcctgaacgaaagtcggggcatcgacttggccgagcatggccggtaccacaggcagatccgggtactcggtgtcgggcatgagctgcaaggtgaacttcgacttgccggacgtgatggtcagcgtggagccgtcggtgaccaggtacgttttctccgaacgcagcgatttggtgatatcggccagcagcttgccctgaaccagtatggaaccggcttcgtcaacgccggcttcgatgtggtggcgagcggaaatctcgtagttgaaggcggagaattgcagcgttccgtcaatggcttccagcttgacgccagcgagaatcgggttggagggacgtgcgtcgatgactcgggaggtccaggctacggcgtcggccagggctgcagtatcgatttcgactttcatgtgtgattgttcccttcgtcggattggctgagaaatattctagccgttaggtggcgaacttacgtacgatgggtgactggctgttactgtggcgatgatgcttttcacgtaactgagtaagtaatcgtcgtaataaggccggtggatagtgtggataagtaggggtgagccctacaaatgcaacggttcataagtccctgaaaattgtggacaaattctgcatggcttgtggataagtgggcgagttttccacagccagttcgtcgaatttgagttttccacatcgaggtcgcggttatgcacgagttttccacaacaaaacagtgggtaatccacgagttatccgccgagtttacccacatctgtgcacaactgtgtggataacttttttggttttcgtactttcgcacggcgtgttgaaggctgtttttcgtcgaggagaatcgattctggagaccgttttcggcacttttttcgtctcgctcgcccaaacccgcaaaatcggtcctcagaatcgattctctcgtttcatgggtttttttgcgtgttccccttcgaaactcccctcagtcgtctgcgacgacagctctcctcacaaaggggagccatgaggaatctgatgtctcgaatccgttgcctcgacgtatccaccagaatccgcctgagcaaccaaaaacggcacttttcggactgactttccgaaaagtgccgtttttcgtctctcagaagcgttgtgtcagttggtgttgctttgcttgaggcgaaccgtgagctccataacgtagttatagatctcctgtttttgctgcattcggtcactgattcgagtgcaggcatgcattactgtggtgtgatcgcgcccgccaaagacctggccaatatccatcaggctcatactggtcatttcgcgagccagatacatggcgatctgacgaggaacagccacgtttttggttcgtgatttaccgacaagatcctcaaacgtcaggtggaagtacttcgccacctgactgatgatgtccgtgggcttgatttccacatcggtggtgaagaagtcctgcaacgtctgctcggccaaggcgcgggtcaccggctgattactcagcgaggccacggccgtaacacgggtaagcgcgccctcaagttcgcgaatgttctcggtgaagcgttcggcgatgaggtccaacacatcgctggggattttcgaaccgttcatcgaggcgatcatacgaagaattgcgattcgggtctccagatccggcggcttgacgtctacggtcaggccggattcgaagcgcgagatgagtcgagcctcgaaacccttcaaattcttgggtgccacatcggaagcaatgacaatacgcttatttgcctgatgcagtgcattgaacgtatggaagaactgatccaaggtggcttccttgccgccgaggaactggatatcgtcaataagcaacacatcaacctgtcggtatcgacggttgaattcagcaatctgaccctggctttggttcgggttttgcagcgcgtcgatgaattcgttcgtgaattcctcagacgtgacgtatcgaacctttagcccgggatccttgaccagtgcatagttgccgatggcgttcagcaagtgggttttgcccaggcccgatccgccatagatacacaacgggttgaaatcctgaccggaaccttcggccacggccagtgcgaccgtacgggcaaaacggttggaatcgccgggcacgaaggaatcaaacgtgaagttcttattgagatgagtctcgggatcgcgattcatcttctgctgaccgaccgggaactgcgactcggtggcgggcatcggttcccgcggtgcggctaccggctttgcaccataggattctttaccgaactcggcgacggtcggagaaatttccgaaggatatggctgcgccggctttgccgccgaaagcggttcgggctcggttttcggcacgaccttgaacgcgggaaacatattttcgccggttaccgtacgcaatgcctgaagcagggaatcgttcaaatcaccctgaatggcttgaagcgtatcgttgttgtccacacacagcacgatggtcgaaccgaagacgccttcaggaacaacgccttccaaccagcctttttctcgtgggctgagcgaagcgctgtgtttgagcaccgtcagcgtgtctgaccagatgtgggcggcctcgattacggggtcgccggaagcgttaaccatggtggccccttctatcggtgtggcgaaatctgtacaacagataatatttactctggtttagacaagttatccaccgtgtcgcgtgttgaaataactggattgtgaataacagacatgtaatttgtggataacttttggccgtgaatggttggtattccgccgattataagagatttgaggcgtgtctcgcaacgtgtcgaaatgtgaaaatactccgtccgttttgacttgagggtaggggtgagagtactttggtatagcttgactcacgtgagggcagcgcgaagcgttgccgaatagacctaggagcaatggattatgaagaggacgttccagccgaacaaccgtcgtcgccacatgaagcacggcttccgcctgcgcatgcgcacccgttctggccgtgcggtgatcaaccgtcgccgtgccaagggccgcaagtccctctccgcctgatcattccgatcagtgccacaggcatagtcgaggtggagcggcttcaaagccatcgtgatttcgtcaccgtgctgaaacgccggcgcaaagcaggtggcaaggatatcgtcgtgcactatttggtgcccgacgaccatcatgatgatgacgaccggacggtgcatcgccgtttgggattagctgtctccaaatcggtaggacatgcggtcacccgtaatacggtgaagcgtaggtttcgtgtattggccagagcccatgaggatctgctgcccgcgcattgcgatatcgttttgcgcgccaagcccagtgccgcgaccgcatcgttcgcttcgctagatcagcagatcgcgaaggcttttgccacagtggcgcataaggtggctgaggcatgacagcttctttcaaggcggtgatgattggtggggtgcgctggtatcaacagcacatctcggcaaacacaccgccttgttgtaagtattatccaacgtgctcgaattatgccattgaggcattggaacggtatggcgcgttcaaagggggagtgctcgccatgctgagattactgcgttgccggccgtggagtcgtgggggaatcgacgatgttccacaacggtattccattttttacagattttcgtggtcgaaggctcatgaagagccccgactgacaccattggccacaacccaaagagaggcccaacgatgaactcaaatgaatttctgcttgatagcgggttttggggatttctatataaaatcctgactcccgttgagtggttgcagacctggatcatgaagatcgtgcatgacttcttcgcgatgctgggcatgagcccgattggtgtctcatgggtgcttgccattatcatcctggtgctggtggtgcaggcgtgtatcttcccgctgttctgcaagcagatgaagtcgatgcgcaagatgcaggcattggcgccgaagatgaagcgcatccagaacaagtacaaaggcaagacggatcaggcttccaaggaggccatgagccgtgaaaccatgaaactgtatcaagacaatgacgccaatccggctggctcctgcttgcctatgctcattcagggcccggtgttcatgtccatgttctatacgctgtcggccattccctacattgccaacggtaaacgcggtgcgttgggcgcgttcgacgtagcaaccgccaagcaattcacccaaaccgatgtgttcggcattgtcagtgtgaccgataacttcacccgcgcatctactgcaggcaaggtggtcatcggtaccttcgtgttcctgatgtgcttctgcctgtggtttatgcagtacttcaacatgaagcgcaacatgcccgccgcatcgatgaacaaacaggccgagaccatgcagaaggctatgctgtggctcttcccggtgatgtacatcttctctggtgccaccatgccgttcgccgtgctggtctactggctgaccaacaacgtttgcaacttgtgccgtacgctgtggcaggtgtatgcattcccgacccctggctctccggctgcggcggacaaggagaagcgtgatcatcgtaatgagaatgctcgccgcgcaaaggccggc

SEQ ID NO: 2062 - DNA, 2608 bp, Unknown
  R17_18m  MAG No. k141_54819
gacggctgcacccgtctgcaggtgttcaccaagatcatcatcccgatctgtaagcccatgatcgtctaccaggccatcatcggcttcctgaccccgtggctcgacttcgtgatggccaaggtgatttgccgcacgcagtccaattacacagtggcccttggcctgtggctcatgctgcagaaggaatacatccagaactggtacgcgcgcttcgccgcagcagccgtggtgatttccatcccgatcgccatcctattcatcgtcatgcagcgcttctaccaggaatcgatgtctggttcggttaagggctgacgcgttaagcagacagcccggtgggctgtctgtagcatcagcctgagcgaggcgatagccgggcgaaggtcggattgagcctcgccgcaggcgagtccgtaattgcaggactgagccgttacgtagtggggtttaacttggctcccctctgaagaggggagctggcgccgtaagcgactgagggggagcaccagcttacgccaatactcccctcagcgaggggagccagaaagcgagaaaggaccgcaatggagaggccgatttccgtggtggcggtggcggactggacgcccgccgagctagccatgccatgccccgattatcccgtctaccaggatggcgatctcggcgcgttccccgacgccaagggcaccacgttccgtatctgggcgcccacggccaacggcatcaccttgcgcctgttcgactccggcgcaccctatgacaccgtcgagcccttccagtcccgtgaaatgacccccggcacagccggcacctggcagattcactgcgacggcatcggccacggcacgtactacgactatctcgtccgtttcccggacggcaccgtcaatcgcacggcggatccttgggcccgcgcggccggtgtgaacgggcgccgcagcatggtcgtggacctggcgcaaaccaatccggacggctgggagcaggaccgccgcccgcacatccccagccgtgacctggtgatctgggaaacccatatcggcgatttcagcaacgacgagcacagcggcatccccgaagaacatcgcggcacctatctggcgttcacccatccggacaccagcgtggacggcgagggcgaattccccacttgcgtggcctatcttaagcggctcggcatcaccgccgtacagctcatgccgttctacgactatggttccatcgacgaatcgattccgcgaaccgaccccaagcacggcttcaactggggctatgatccgctgaattacaatgtgcccgaaggttcatacagcaccgacccgtatgacggcgccgtgcgcatccgcgaatgcaagcagatgatccaatcgctgcacgcggccggcatcaaagtgatcatggacgtggtctacaaccacatgttctccaccgacaactggttcgagcgcatgatccccggttacgcgctgcgccgccgcgccgacggcacgttcgccgacggttcggcctgcacgaacgatgtggccaccgaacatccgatgatgcgcaaatacattgtggattcggtggtctactgggctcgcgaataccatgtcgacggcttccgattcgacctgatgggcctgattgacgtggagacgatgaacgtcatccgcaccgcgctggaccagctgcccgacggcgccacaatcctcatgcacggcgagccttggaccgcccgggaaaccgcgctcgaacccggcacgattctggccgacaagcgcggcatgccttacttgggcccgcggatcggcgcgttctgcgattccacgcgagacaccgtgcgcggccacgtgttctaccagtgggttcccggatacctgaccggtgccgccgccgattacgccgaggacatccgccatgccgaggatgcctggcgcggcacgttgcgcgaaaccgccagcgtggggcaggtggtccagtacgtttccgctcacgacgatctgaccctgtgggacaagctgtgtgcttcgatgcgccgagtgcccacggatgtcgactacgacgcccaggacgagtccagcacggatctgatacgcgccaaccgtttggccgccggcatcgtgttctccgcggccggtgtgccgttcatgctttcgggcgaggagttcgcgcgtaccaagcacggtgtctccgattcgtattgcagcccgtccgccctgaaccagttggattggcggcgggcgcagcgcatgggcgcgttggtgaatcattatgccgcgctgattcgtctgcgccgcagcaatccggcctactttggcggggcccgcatgatcgtgccgcgtaccgatgagatcgtggtgttccgtgtgggcgacgattgcgtggccatcaacccgaccggcgagccgcggactcagctggccaccgatctggagatgcccggcccgtacggcgaagtgtcgaaaatcgctcccgacgaatgggcctgcatctattgctccggtgacgagatgccaggcgaagtcgagaaccggcgattgcccctgccgtcccacaccttcactatctggcggcgcaatcgtgggtgaatatgaagcttgctcccgccggtgggggctgtcgaacagca

SEQ ID NO: 2063 - DNA, 35516 bp, Unknown
  R17_18m  MAG No. k141_54928
cataggagcctctatgacgctgctcctgcctaagtacatgaccaacttcttccagaacggtgtattccaggttccccagtggcccgtcattgccggaatgctgttactcgtcatcgtctcaggagctatatcagccctacagaactaccaactgcagagcacgggggaggatatcgtaagggatgctcgtctcgcactaagcaaacacctgctacgcctgcccatacgcgaatacgatcaacgcgactccggcgacctgctcagccgtgtcagcaacgacacctcacaactgcgtaatgcattcatgcagtgcacatcagcccttgcatcaggcttcatcaccgtcatcggttccgctgtgtttatggcaatgcttgacccaatcctattcggcacagcaatcaccctgctccttaccgtattcacgctcatgctgctgtccgctaaattcattgaacgagcaagctatgacagccaatacacgctcggcgaccttacctccacgctcaatcgtgatctcgccggtatccgcaccatacgcgcttcaaacggcttcgagaacgagaataaggtcattgccgccttaatcaaccgtgtccgcctgtccggactcaagatcgccagaatccagtcggtcatcaatccactggccacgatagccctgcagctcgcggctatcatcgtgttcggtctgggattatggcgcgtaaccacagggctgctatccgtcgaaaaacttacccagttcatcatgttgctgttcatcagcatctcaccgctcagccagattatttacgcaggctcacaaattggcaattcaatggccgcgatgaaccgtatacgggaaatattggatattcccgaagaaaaggaccatgacaccgtcgtcacaacaatcaatgaacatatgccgctggtacacagcagcccatgtcctccggcagtggaattccaacacgtctacttctcatatggctccaaaccaattttgcgcgacctgaacctctccatatcccagggaagcgttacagcactagtcgggccctcgggcgcagggaaaagcaccatcctacaacttatcgaacgtttctatgttccctccagcggaaacatcaatgtactcggtaacgacataacaacttgtgatcgagacgatttacgcagccatattgcatacgtggaacaggattcaccagcactgtccggtagcctacgcgagaatctacttctcggatcaacctatcgcagcgacgatgaatgccgacaagtactagagtccgtgaacctctcccatctactagaccgatctgacaaaggtcttgatatgcaggtaggagaaaacggaatcatgctatcaggcggagaacgccaaagactcgccatagctcgtgctcttctttccacggcaaaaatcatcctactcgacgaagccaccgcaaacctggacgctgataacgaacagcttgttacccaactactggaacaagccgaagaccgcactttcattatcgtcacccaccaactcactaccgtgcgcaatgccgaaatgatatatgtcctgagtaatggccatgtcattggagaagggaaacacgaccaccttctcaaaaccgttcccttgtactacatgcttgccaaaaacagcagcttgcgccgtccttaaaaacaataaaaagagacattctctataggtgccatcatctttggcattattttcccctattgagggtgtcatctctagatgacattttcgcacgtcttcttgctgctcattgtctcttcgatggatagtgggggtatcgaagtccaatacgcaggtgaggaaggtggataatggttcgacatttgaggggaacggggagcgatgcaatggcgtcggctccggtcgcggccgcggggctgtcgaagagtttcgagctgcgtaggggtgagacggtgccggtgctgaggcatgtggatttcacagccggttggggtcagatgacggggatcgtgggaccgtctggttcaggcaagtccacgctcatgtattgtctggcggggttggagtccgtctccgatggctctgtacgggtgctgggacaggaggtgacccgtatgagccgtgcccagtcggcgcggttccggcgtgatcatctggggtttgtgttccagtcgtataatctggtgccttcgatgagcgtggaggacaacctcaggcttccgttcacgctgcgcggtgcgaaatatccgtgggatcgcgcggccgggctgcttgaccgtctggggattctcgggttgcgcaggcaaaacgtgacgttgctgtcgggcggggagcagcagcgtgtggcgttggcccgtgtgctcgtcgccgatcccgagatcgtgttcgccgacgagccgaccggcgcgttggacaccgagtccggcgggcgtgtggtcgatgagctgcgcgcgttcgcggatcgtcctggtcatgcggtggtcatggtcacgcacagtcccgaggtcgcggtccgctgcgatcgcgtcgcgcggatgcgtgacggtgtgttggccgaggtcggttccgattcgtccggtcttgatgggcgggaggcgatttgatgcgtggcctgttgcgtgatttcagggatgcgcctgtcgtgtggggcgcggtattgctgctgctggcagtggtgcagtgcgtgtcgggcatggtgatggtcatgttgtcgaacgcgaggatggccatggcggttccggggttgcatggcagggcggtgatgttctcgatggagctgagcggccctcctctggtgccgatgatcgtcgtgggcatgctcatggtgcttttggtggtctcctcggccatccgtcagcgccgccgcgccctcgccttgatcgcattgcagggtgccacgcccggacagttgacgtcgcgcgtctgcgcgcaggtgctgctgttggatgtcgccgccacgctcgtctcgcttatcgtctcgccggcgctggcacgggggctctatccgttcgcgacccggcagttggaggcgaacgggttgccgtttctgccgcaggatgtgacgggcatgctgcgggcgtggagttgcggtatcgtcttcggattcgcgatggccttggtcggctcgctgttgacggtgcgcgtggtcggcggcatatcgccggtcgaggcgttgcgcgaggcggcgaaccctccgaaaacggtcggtgttccccgtcttgttcttgcctggatcatgttcgccggggcgttggtctcgctggcggtcggtctgctgaacgtgcggaagacatcgatggcgcggatgtcggtgcaggtcacgttttcgtccatgtcgccgctggcgtacggcaacatgatcgcgatgctgctgttcaccgtgtccgtctgccttgccggtccggccgtgctgtcggcgacggtgcgcatgtggacggcggtggtgcgtcttccctggccggcgtggcgcatcgcatgccagcaggctcgggccagggtgtgcgcgtcctcgtccaccatcattcccttggccgccggattgacgctgctcatgtcatatgagtcgctcacctcgaccatcaccgcgtggacgcggctgcttcccgcggggacgccgacggtggaggtgcccggtttcgcccgtatcctggcattgatcggcacatcgctggtcctggtgctggcggcggtgtgctcgggctatctgatcgcccagcgtggacgggagcttgacctcgcgctagtagccgtcagcggtggaacccaaggccagctcaacgccatcgccgccttggatgggcttatgattgtcgtcacctcgtccctgatcgcgttcgttcccagtctgctcgtatccgtctcgttctccatcggcatctggttgtcgtttgacgtgctggtattcggcatgccgtggctcctgtggctcgtggtcgtactcttgcttgccgccatggcgatgcttggttcgtggctcaccgcgcaacgtggcattcgcacatcgccgacggtcgtcatcgctcgtgcggcaggagaataagcaccaagcggatatgcatgcgagtatgtctgattgtgagtcgaggatatgggatacgggcgatgctccgctgggattgaggaaaccgggcggcctgccggtctatggattgccggtcgtggccacgctgttcatgctgcgcatgctatgggtcaccaggcgcgatgccgtcccgtcgtatcactcgtattgggccacgcacacgccaagcgtgtttatgctgatgctggccgccgtttttgccggcggcgtcgcgctggcatggcggtacgtgagacccgaatgggtgatgggcggagagcttgctctggcgttgctgctggatctcgccggcgtgggtgaatgggctccgatcatgccgatgattgcctattgggcgttgatcatgaccgtctccagtgatttgcggatcctgtgcttcggacttgcctcctgcatggtgctgggcagtcaggcgttcgccggagacggctggcggcaggccggatggtcgatctggcttgacatactgcccgccatgcttccgatagtggtcatcggcatgctgggttatgcggtccgcaaccggcgcctatcctccctggcgctccaacgcgaacgcgacgagcgtctgcgcgcggacttgctcgcccaacagcgggatgcggccgttcggcgcggcagcatcgtcggcgagatgcacgacagcgtcggccacgatctgaccagcatcatcgcattggcccaaggactggccgaacaggtggaaggacaagatgtggatccagaggtcgcacaggccatcgacgcgatccgcgacatcgccaaaagcggcctgcaggacacccggcacgccctgcgggccttgaccgccaccgatgcgaacctgcccggtattccgccgaccacaggcggtacgcagtcgcacgagatgaatgacaccgcgatcgaagagtcggcgcagcgatacatgtgggatgacatccgaccggtgctcgcacacgtacgggcttccggcgtgatcgccacattcaccgagaccggccgacgcagcgaggaccccgaccaggcggatctgtgcttccgggtgacccgtgaggccgtcaccaacgcggtgcgccatgcgcccggcctcgcgcatctgaacgtcacatgggatcacgcggcggatgggagcctgatcgcgaccatcaccaacgacggatcaacgaacctccccaagccttccgatggtgccatcggcaccggtctggcgcgaatcgcggacgccatcgcccgaaccgaagggttcctctgctacgggccggacagggcggaaaccggtgtctggcgggtgaccgcgatgctgacgtccgtccgacaagagaaaggcgtgacgtgggatgacgaacatcatgctggtcgatgacctgcaatacgcgaggctcggctacaaactcatgcttggcaaggcgagtgacatcgcgatcgtcgctcaggcgggcgatggccgacaggctatcgctgaaatcgagcgactggaatcggcaggaggcccgctgccggacgtggtgctcatggacgtgcgcatgcccgtgatggacggcatcaccgccacccgtgaaatcacccgccgatggcccgccattcacgtgctgatcctcaccacgtacgacgaggacgactacgcatacggtggactggatgcgggagccagcggattcctgctcaaagacgccagtgctgcagccgtcaaggatgcgattcatgcggtggcgaacggagacgccgtggtcacgccacgcatcacccggcagattctcgaacacggcatgcccagacccacagcaggccgcgaacaacagaagctgcgggattcgttcgcagccctgccgccgcgccaacgcgagatatgcacactgatcgcggaaggcatgaccaacgaggaaatcgcccgcaaactggtactggagcccgcgacgatacgacgaaccatcagtcgaatcctcttcaccttgcaactgcatgaccgcacgcaaatcgccgtcagctggctcaagtcccacgcatcacagcaagcaatgtcaatggtaagaacacgaagatatgtgtcatcttcagctgacaatccgctccaaacacattgaaatcaataagtaaggatacaacaatgaaaaattattaaagcatacaagagaaaaggaaaaatatgattggtgaagaagattacctcgaatcaattacgaaacaatctccattttttgtagatcacgcttctatgcttccatccatgaagcgtgaccattggattgcggaatctcttattcccgatacttggtatgtaacaagaagagaaccgtggacgtatgtaagctctccgaatggaaaaatgcgagtcaacggatggaagattcatttaagcgcaacaaaagagaacgcagaaaagattcttgcagaagtaatacaaatttgctgtaaatataatacaacattcaaatttcaaagttcacatagagattttctcaactgcaacgggaaggcagcaaatcgttcaggtagtgggaaattcatcaccatatatccatcaacaaatgatgaacttgaaaaaatagtcggtgatttatatcccctcatcaaagatgaaaaaggcccttatattcttagtgacattagatacaagcaaagtccaatcttctttcgatacggaggattcattgacctgcgtcgcgaggatgaaaataacgattatatttctatgatcccagaccaatctggaatactggtcgccgataagaggcttccacattttatacatccagcagagggaatcgacaagccaaagtgtgtagaaatatctctgaatgaatatatgaaaaatattcccaccgatttagataactatgagattaaagctgtacatttctcgaattccggtggggtatatcgtgcaaccaataaaaagaatgagattgcccttttaaaggaagcgagaccatatgccggtctagacgcacgccaacgcgatgccattgagagactatccatagaatggaagatgctcaatcttcttaaaaataccggcattgcaccaaaaccatatcgaaggtttaacgcttgggaacatggctacattgaaatggaatggcttaatgaaatcacactgaaccattggttgtcggaaaactatccctatcaatgtgaaaatgatcatactaatcagttgatgcaatatagaagtgatatcaatacaatcgcaacatcgattatcaatgctgtaaaaattattcatcgcacaggctatgttcacggggatattcatttaggaaacataatgattaatcctaaaacaatgtctatacactttatagattttgaggatggacgcaccttggactccaaggaaatatcagcacataatgctatgggattccatcccccattgggttgctccgctcaagaagcagattggtttgctgtttcaagggtactcgcatgtctatgctatgcaaatacctcgatttgcatgcttagcccagatcattggatcagagttaagaataatatttcgaaaaaatttggcatggaatatataaatctgttaaaggatgttgaatcacgttgcccatgtgcatctggagtttcagatgttccattaactccagatgcacatcttacacagtttacaccacgtttttcctttaatctgttatcacaccctgattccttgtcattagttaaaactgaaattattaatggcatttttcatacccgtcataaattgccaggaaaactatatcctggtgatgtaacacggggctccatttggggtgcaagtaacgtaagctccggcgcggcgggaatcctaatgagcctgcatagggccaactcaattatcaattcggatgacgtccaatggatgaaagacatgatccacggtttcgcgcaaagcaatcaatcggactttggattatatacagggctatccggcataggattagtcgcttttgagttgggagaattagaaactgctcacgaactattatttagcacatatgaacattggaaagagacacgaaatcttgaccttaatggcggactagccggtcaaggattagccctgaacagacgataagaggtatttccatgaggctattgcacttggacatcgtatagcgcaatggatggaatccaatcaaatcgcaagcataaaacaaggtggcctcctgcatggatggagtggtatcgcactgttttggttagctctaagtcgtattgacatcgaacataacccagcttatattcggcgtgcgcttaattgcatatgcagagatttagacaataccgttattgagccaaatggaatgcgaggaattaaggataagcacaataggtctcttccttaccttgcagatggttctgccggcctaatagtggcaatttccattgcacgaattgcactacatgatgattctcttttccataaagaatgggactcactcattgcggcatgttcatcatctcaatatgctttttccggactaaacaatgggattgctgggatattagttgcaaaccattttgcctcaacatggtcaccgcaaacaacacaaacaaataatagacttttagatgaattaaacgactatagtttgtcttgggaaaatacgctacaattcccgggagattcatacttgcgcctctcaagcgattattcaaccggatcagcagggatactaacagcattaaatgtccttacccataatctttgggatttattcccgctcccaaatgcaaaagatttgttctgcggaaggtccgcggaacaaaatagtagaaaggaacaaccatgaataaaatcatcgacatgcagtcgatcgaggaagtgaatgacgacgcggtgcatgacagtggctacagctactcgttctgcttcggtcgcccgagcagcaccagcggtttcttctgctgattcataaaggttaaaaatgagggggtgactcgttagggtcaccccctcatttacaccaataggagcgcttgaaatgtttaaagcaataggacgaatcaagggatatttatacttttggttaaatgacggaaatgatgtctggtgttgtcgttcaggaaagagagcgtccgaaagcgatatttttccttcccgtgattccaacatagcgtttaaatggactaaatgctttaaaatcaataagaatgattataagtctcttcagtcaattgaaatagataacaaatcaaaatatgcggcaataatagtgcaagatcgaaaatatccctactcaaatctgagggtcataaatatgcggacaggtattgatttcattaaactcaattacataggaaagggaagtataatttcatctgataattcatgcatatactatgcaaaaacagatgaatcatctggggcgatttcggaaatacgcaaacagtcacttacttcgattaaagaaaaccgttgtgttgcctcatttgacagcacggcttggcctactgttcacgcgacggacgacagaaaatatttacttgtatatcatggttctcaggttacaatcataagactcgcatcaaacaacgcagctgaaaaagttattgatgcatgcaatggaataggatcagtccataaaatcatgcataaaacaattgaatctcgtgagtttttctttggatactttgttgacaaattcaataattggtttttgataattataaacggggaagataatattaaaaagactgatacttggctacgaaagcaaattaaggtcgatgaaatcgaggatctttttttgcttgaaaacaaaattgtacttcaggttaaatttgatcaaaaaatacaaatacgatttctggatattaaagcattagtttttaaccataatcaggaatggaaaaatatcaccatacaaatgaaaaagcatatgagtttattaaagtttgtccgaccgattgaagtcaacaaacaatccgttccttacagcatagaatgtccggcttgcagaccctcaatacattatctcaatttctcaaaagaagaatcatctatagactactcatcatcaggcaacttaaatcatgtaactcaacaatataacatcctaagtagagatggagagacagagatacctgtaacaatcatttcaccaattagaaatccacaaaacaagatagttctagctgtttatggatcatatggaatcaagtttaattacaactatagccctctgattcaatccttaattgataatggaatatattttgcttatgctcatgtcagaggcggaggggagaagggagagaaatggcatcaagctggtatgggaatcaataaaattaattcgattcatgattatttagacgttgcaaatggaattaaccgattagtacatagaacaaaatgcaaagttattgggatgggagcaagcgcgggcggatttgttgtcgcctccgctctaaatgagaatccattgagctttgctggtatttatatatctgctccgttcatctcgccactgacggctatcaaagatgtaaaaaacccacgttggagaatggatatgttggaatttgggaatccggataacaaacgtgatgtgcagattttacgacatttatctcccttagaaaatattaagggtaaacattatccccccgcccttgttgccttaaatgagtttgatgttaatgttaacaactatcaaattcgagaatatattgacaaattgagaaaaactggagcaagcgtcgatttattgctaagaataggggcatcccattccgttttcaaggcttcaaatcacgaaaacgatgaaattaggtggattaaacgtatttagtatatatatcatatacctgtaataaataaccgccaacgagccgttcggattcatcgaccgcatcggcgtcaccatgtacgccggctacgtcacctgcctgtgccgccacctcgaaagctcgggtaaacagccgatgatgcgggacgccccccccccaaaaaaaaaccggatattctcgacaggcttcccgaaaccgttactctgctcgactggcatttcggcccgcgggttgacgacgggaaaatctgcccgttgccgggccaagcagatcatctatccgaccgtatgatgctggaaacgcactcctgccgcgcatcgatgacgtcaggaacaacatcacccacatggcccgctacggcgcgcataccatgcgcaaggcatgctggtcaccgactggggcgaccttgaccacgtcaacgacctgcacatggccattcccggcataatcatcggcacgcaggagacatggaaccccgaacacatcccggatgaaaccgagatgctccaccgcatctcccgactcgaataccacgacgccagcggagagctgcttgatatccccactcacgcaagtcattcggcctgcttccaatggaaccagctgatcacctggttggagctcgatgacggacaaggcggagtcagcaccgagatcctgcaaaccattccgggactgctaccagaaaacgaacggccggacgatgcgatccgcaccctccaggacgaaagccagataccgtcacttgcagaatcccgactgatgctgctccgctatctaaagcaccacatcacgctcgacgagacctcgggccatcttcttcgggtctgcgcccgacaaatcgccacgatcgtcgccgccacaggactacaggccacagcgaacgccgcggtactccgcatagccatcgagggacagcgacttctgaatcaggtcggtctccgacttgctccgatgccggagtcgtcgactccttgcagttgagtgccgcatctcagcatgacgatacggcgcgtcttgccgaagcgctggaaatctggatggaggcgtatgcggcgcaatggagtacggtcagccaaggctccggactccgtcggctgcaagatacggtgcgggagttaacggactacctgcgcttccaatccatctgatgctgcgattgtgagacttcgatctgtcagataccgatatgccgtgaaggaccaattcagatccctcacggcatttcctatacgaagatgtatcacgcatcgcgacagtgcatcaatgcggtctaggattcacgacttcgagtactagccatatcgcttataaatgattcagcgagcttgtcaaccacttggctctgatgcgaggcgacggtgagctgatagtaccggatagccaccttctcgctgacgtgtcccaattgattcatgacttcccgtaatgtcccaccctgaatcatgagtaatgttgcatgactggctcgtaatgcctggaacgtcagatcagggcgtcctgctttcaatcgggccttggcgaactggccgtccagcgttgtctgggacatgattcttgcacgcttgggcacgaacacagacgaatccggtcgggtcagatcgcagtaatcagaaaggtgctgtcgaataagaggaatcagcgtatccgggatgtgtacgttcctgatgctggattccgttttcgtcttaccgaattggagatcccctctgtcagcgtcaccgcgattcacggagcgtcggacgtgaagtatctgcctattcagatcgatgtcttgcacctgaagcccacagagttcaccacatcgcagaccacccactaacgtcgagaggaacacggacagtctggtgtaatcgggcatggcatccgccagcaggatcaattcatggggagtcaccggcggcacgttgatacgagcgggctgtggcgctgacggaatatggaatatgaagggattgaaggacagcaatggctccgaaccgtccaatccgcctcgggtggctgattccagtaccgccttcagccgcatgcatgagcgtcggaacgcccaccgtccttccgggtgaggcgcatcataccaagccttgataatggacggagtgatctcgttaagcggcaggtccccaagacttggcaaaaaatggccaatgtccaggtaaagattgcgacgcgtgccaccggcgataccattgccgtcgggcagccggtattcctcggcccatcgcatcacatagtcacggaacaacatattgcgttgtgtccggctcttttcctcgacggcttttcgtcggcttcgttccgttggatgaacccattcggcgatgccgttacgatggaggctgacaagatacttttcggcttccagccatctacgggcttcgagctcctgatccggcttgaactggcgttggacgcgtttgccgggttctaatggattcggatatcgaacctgccatgcgattagcatgccggttctgtcataacgggccagcacggttccccacttgcttcgcggaggcttctgcggatggtttccatgggaatgcctgattttcggcatattgatctccctcgatcgcgaaaaggcgcaccccgcgtgcgccttgtggggagattgaaaccaaggaacagtgtaagtgaatatgctgaaagagccgttgcttgtttttgtcatcttgagatgacaaaccgtccagggtatcttgagttcgactgcataggattcgatactttatatcgtggccttaagtctgagaatcatcttctggggctgaccctgaagctattcacagactgactgcatattgagaaaattatttgcctgaccccgatatgccttaatcgtgtaggaagacggactcaaaggagagaaatggctatatcaaacaccattgagttggctccgatgtggacgcttcttctttattgttcgatgattggatgcaatatctattatctgcattatcttgatcggcaccgatttcagtggattcctgcacgcttcttcgtcctgccgatacttatctcgatcgtctctgccgtttttgtaatgctgacatattgcgatgtcgcttattcagcaaaagcagatatggatatgagagatttctatatctcatatatccctttggtttccatcctgttgggaattctcatactcatggaaatcatatattccataaaaatttccctatccaagaagaagaatcgcaatgcgtaataatcgactggtcaaatcgacggcctccctcttgctcgccgtcacggtctccttctcctcggtaatggtggcctccgcgacggagacgacctccaccaatgcggctaagacgccgcaatatgcgcagtcacattatccttccgaagcggagattgaagcatatctcaatgatccgcaatacaagaaatatggtcgcaccagagaagacgtggaagcctacctcaaggctaacgctgaagaagatgccgctaccactaccaccatggaagcgggtttgtatagctcctggagcacggacctgttttccgatggatattggatgaatcgcagcggcgtatggtccttgtccattatgcctagaagagcgcttctatgggataccgaccgcggatggggacaggtttacgatcgtttccatacaagtagacattggacttactattcggcatgggctgacgcatccatgagaaaacagttcaattgtcatgctcagtatggaatgctaaagaccccttataacctggagccatcaaggtcagacgtaagtcccatcacttgcaattaggatttgtgtgggcggaacataagtccacccacacaaatcccatagaaaatcattgccatcctgcacttgctgtcgccggaacaccagcggaaaaacgccgcgtccaccgactgccggatactctggctctgctaaatcaaaattgacatcaaaaagagaagccaccctgtcaaagctggtttaacaaagcatcgaatatcaagtattcggctgcattccgacgtaagtaagaggatatgacattttgagctacataattcagaatttcatgtcctcatatatatacaacttgtctacaggcccgtcaccatgtggcgagtgtttcgatggtgtccaatccgtcctgacggtgtggttcgtcgaggttgtcccagtagggggagtcctcggtgagcttgtcgcgcaggagtttgatgcgtttgcggtcggtgccgctgtgcaggcgtgcgagctcggcatcagggtccgggatgagtgatgccagcgtagcggcgtcgtagaggtggcggtcaccgtagccggcgtggtcggcaccgtaggccgcgctcttgagtatcagcgcgccgagcaggtccgggatgcggattgtgacttcggtcccgctctggtcgtcgatgagtcggacctgcatgctgcgttccactgcctgcgcgccgcccggcatggacagcaccggcgcgccggcgatggtcgcatcagtcccgaggaacttgggcaggtggtcagcgaccagcaggtccacaatgtcgccgtttggtgcgctcatacgggtcgtgtatccggtcagcatgcccggctgcgtctcgaacccgcaggcggcgagaacaccgcgcagtctggcgatgccgcgtcggtcggccatgagatcggcgagcaggtcggcgtcggtggtgggacgcgcggtcaatccgcccatgatggcgtgcaactggaccataagcccgccagtaagcagccatgattccgacatgtctgctgcggcgaccgcgtatacggtgctccatggatgacccgtgttggggatgtggattgtgggaatcattcctgatgctccttgcggtggtggtcgtcgatcagctgttggaaggtttccaggccggcacggcgttccctcgggtcgttggattcggccaggtcggccgcgcacacgccgagaggcatcgatccttcgccggcggggagattgtcggtgacgtggagtcgcacccggacgggtgtcacgccttgcttcagccgacattgacggacgatgtcatccagagcgctggcggtgacgtagccttccaccacgtctgtggcggccagctggaatgagtccgccaatgtgccggtggcggcggagggacggatgagggtttcgaccttggcgaggttggagtccctgcaccagtattcgaccatcattgcgcgccgtcgggtgagacgagtcagattctcggcatccatctgcctcaggtagcctttgagccggtaccgttgctgccggcccagccatggcgcatcgagtccgctgagcatgtatagcgccccgaacgccatgtctggtgaataagggcgcccgtccgccccttgccactgtgattggcggcgtacggaatcctccgtgaccagcgagccgcctcccgcggaaagagattcaagccggccggcagcgcgaagcgcgctgacccgtcgttcgctcactccgagtcggcgggcggcttcccgccgtgtgagcagcgtccgattcgttctgatagccatattcctattgtatacagaactattccggattgggaatagttctgtatacaccgggcaacagggcacctcaatccgtattcgtccatatgtggtcattgcgctgctttgatgaagtcttcggcgagttggttgacgatctggttgcggtgtcgggcgacgatgcgctggtagtgcttgatggcgaccttctcgctgacgtggccgagttcgtccatgacctcccgcaaggtgccgcccttgagcatgagcaaggtcgcgtgactcgccctcagggattggaaggtcaggtcggggcggccggctttctccctggctttgcggaactgggcttccagggtggtctggctcatcaccgaggctcgtctggggcggaagaccatggcttccgggtccgtccattcgcagtgcctgagcagatggtcgtgaatcaggggaacgagcccgtcggggatgggcacggtgcgccggctggagtcggtcttggtcctggcgatgcgtgtcgaaccacgatccgcatagcccctgttgacggaatggcgcacggtcaggcgtttggtcttcaggtcgatgtccttgatctgtaggccgcacagctcgccgcaacggaggcctccgacgagcgtggcgagtatcaccgccagtctcgtgtagtcgggcatgctctccgcgatcagcttgagttccagcggcgtgaccggtggaacgtcctccctggcggatcgtggtgctggcggtatgggcaggatgaacgggttgtcgcggatcaacggtggggagccgtccatgcccatcttcgtggcgctggcgaacgccgccttcagacgcatgcatgagcgacggaacgcccattgcccctcggggtgcggtgcgtcataccagcgtttgatgtccgtcggcgtgatctcggtcaggagcttgcccttgaagcccggcatgaagtgcgcgatgtcgagatacaggttccggcgcgtgccgccggctatcctctcgccgttcggcagccggtatccttccgcccaccgggtcacgtaatcctcgaacgagataaggctcgcgcgcttcctgcggcggcgttctgacggatggacccattcctggatgttcttgcggtccagttccaccagatgccgttcctcttcgagccactggtgcgcctcgtgctccatgtccggcttgaactgccgctggaccttcttgcccgggcgtttcgggtccgggtagcgcacctgccaggcgacgagattgcccgcggtatcgtagcgcggcgtcacggtgccgaacctgctccgccgctccgacgacggccccgtactgtccttcttcgtccttgcggacatgatgatgctccttgctgaatccaggatcgatggcacgcataacggcctcgaaaaaatgccaccaaaaatgccaccaagtggccgaatgggctctcggcgagccattgcacctaaaaatgcacctacggcaccttaggtattgcaatcattggggtttaggatgattcgatcactcgtcacaggtagtttcggccatcagccgcatgaagatgacgctaaggagcaacaccgctcgcgtgtctactggaaggaggcgggaatcgttgctatacctaaaattcagattgataataagtaaatatacatttgaaggatttgccgtttgctcttgaggcaattgcctttcgtatccccctctctgggggtacttcattgaagacctcggtcatagcgaccgaggtcttttcgtattcgcgggaccaggcctgaaagcattcggcccgcttccctgaaggaaacgggccgaatgcttggactcgggtttcaacccggaaggcttcagtccagcgacttcaccacaacgacctcggtgggcacgttgcccgcggtggccttggagtaggggcacagctcctgcgtacgctcgacgagcttggcggcagcctcatcgtcaagatcgggcaggactacctcaatcttgcccttcaggccgaaggactcgccttcaggaccgagcgagatgctggcgcgcacctgactcttggccagcttggtggccgccacgcgctgctccttggcggcaagcgccaacgctccttggaagcaggcgccccagccgatggcgaacagctgctcggggttcgtgccctgacccttgccgcccatggcgaccggcgtgtccaggtcgaactccagttccggctcatggctcacggcgtggccgttgcggccgcccgtaacctgcgccgtagcggtgtagacgatttgcgatggttcgttaccttgatatgtgctcatgctttcatctcagcacgtgttcacgcccgccacaaggactgtcccaccgtagacgatgtgacatcatccacactgtgacttcgcgcacagagtcccgacaccgtcctcacctcgtttatcggcaccatgcgtgtataaccacatatggcattatcggcgaatatcggccggcagaccagttgcacaaggagaacatcatccacatggcagacaccgccaacaccaacgcctggttgccggcgctcaaagcggcgtttccgctgaccataccgatttgcctgggattcctgtttctcggcgcctcatacggcattctcatgggcaccaagggcttctcgtttgtatggccgatgtgcatgagcgcgttcatcttcgccggttcgatggaattcgtcacggtgaatctgctgctctccgcgttcaacccactcgccggctttctgctggccctgatggtcaacgcccgtcacctgttttatggactatccatgctcggcaaattcaaggggctcggctggaagcgtccgtacctgattttcggcatgtgcgacgagacctttgccatcaactccaccgcgaaaatccccgccggtatcgaccgaagctggttctacttctgggtcacgctgtgcaaccagctgtattgggtgaccggcgccacactgggcgggctgattggcgcgcatctgccgttcaataccgacggtcttgatttcgtactgaccgcgctgtttctggtgatcttcctcgatcagtggctcgccggcaagcatcgcgagcgactgtccaccgtcatcggtgtgctgacgtcgctggcctgcctgctgatattcggggccaatgatttcatgattccctcaatgatcgccatgctgatactgttcgtcgcgttgcgcccgcatctggatgtgttgcggccggccgccgacgccccggaagccacggcagaccgtgccatgagccacgcagcggaccagcagaaggaaggacagacgcgatgacgatgaccatctggcaaggcgcgctcaccatcgtgacggtggtgctggggacgatgtgcacccgttttctgccgttcctggtatttcccgaatccaagcagccgccgcgcgtcatcgaatatttcggccaagtcctgccctatgcgatgaccggtctgctggtggtatacgcactgcgcaacaccccgattctgaccggttcacacggccttccggaactcatcgcctgcaccgtcatcgtgctgctgcacgtctggaaacgcagtatgctgctttcaatcgccggcggcacgatcgtatacatgctactggtgcagctggtgttctgaggttgggctcggcttctccttcgttgatctctccctccggtcgccttcggcgaccacctccctctgtgagggaggtgctgaacgcagcgaagcggaggtagagacccgcggtcgtaagactgcgaaacacacagcatcggccacaggccgattcctacagctgcttcgccacccaatcgacgatgtacggagcgacttcctcaatctggtcgatggcgacctcgaactcgtgcttgccgccgtaccacgggtccaccagatcgatctgatcttcgcggccgggcttcggcttgggcagattcgggtcgaagctgcggtacatgtgcacttcggcgcgcttgccggccggcagcatgcgcagcagggcgcgcatgtgggaggcggtcatcggcaggaacaggtcggtacggtcgatttcctcacgtgagatgcggtgtgcgaagtggtcacgcggaatctcatcaccatagccacgttcgcgtaacacgcgcacggcacgcgggtcgatcgggtggctccactcctcgtcggacacaccgctggattccacgttcacctggtcgccaagaccgcgctcattaaagaagtgacgcagaatgatctcgcccataggcgaacggcagatattgccggtgcagacggtcattacggtgtagggctgggtattgctcatagctttgaatcaatcctcaatcgggcttcaccgggccgcacacggcccgaatgtgtttttggggtcgaatgaatatgaatccggctcatgccgccataaaggacacaagccggattcgcatgcttacttggttttgaccaagatacggaaacgataggaatcgatgccggactcctccttggcgggcgtatgccactcgcccacttcggcttcccgccacatcccggcctcgaccagcgacgccatatcgggcgcgtagctgtcggcatccacggtggcggccagatcagtcacataggctttgtccgcgaacggcaacgcctcggcgtacagctgggcgccgccgatgatccaaatctccgaacgatccagaccgtcgtccggaatcgcctcctgacgggccatatcgagcgcgtcgtcaagactggtgaccacagtggcttccggcgcacggtacatcggatcgtgggaaacgacgatgttgtcgcggttgggcagcggccggtacttgaccccaagcgattcccaagtcttacgacccataatcaccgggtgggagacggtcagctccttgaaatgcttcatatcctcggcacagtgccaaggcatgccgccattgaggccgatggcgccggcgcgaccttccttgtcgcgggcttcggcccagataagattcaccgagaaggtcttgggataatcgtcaccccagtcttcttcagtggcagacagcccggcagatccgggctcgggttcgtgatagccgctacggctactgtcatgctccatttcgcttactcctcctggattgcggaactgggccttagtgtagtggacagcgaagactcgaggcccgtcgcctccacagtcttcgctgtccacgaacaacgctcagaccgcaacaggtgccttaatagtggggtgatgctggtagccgacgaccttgaagtcctcatactggtagtcgaacagggaatcggccttacgaatctcgatggtcgggtacgggtagggcttgcggcccagctgctcaaggaactggtcgacgtggttgtcgtagacgtggcagtcgccgccggtccagacgaattcgcccggcttgagcccggtctgctgcgccatcatcatggtgagcagcgagtaggaagcgatgttgaacggcacgccgaggaacatgtcgcaggaacgctggtacagctggcagcttagcttgccgtcggccacgtagaactggaagagcgcgtggcagggcggcaacgccatcttctccacctcggccggattccacgcggagacgatcatgcggcgcgaatccggatgatgcttgatgaggtcgagcacattggagatctggtcgatggtgcgattcgggtcctcgggggtcggtgcgggccaggaacgccactgcacgccatagaccgggcctaggtcgccgttctcgtccgcccactcatcccaaatatgcacgttgtgctccagcagccagttgatgttggaggaacccttcaaaaaccacagcagctcgtaggccaggcccttgaagaacacggtcttggtggtcagcagcgggaagtacttcgacaggtcgaagcgcatctgctggccgaacagggaaatcgtgccggtgccggtgcgatcggacttcagcgtgccttcggtcaggatcttgcgcaccaggtcctcatagggcatcggaatgtccgtttcgggacgtgcggggatacgggagcgaatatctgcgagttgttcttcggtcaaagccatgtgcaccagtgtagcttaggggcataatagagaagtccgatgatgcgggagagcggccaggtgccgcgctcccccgctggcatggcgatgggccagatcgccggcggctgaaaataaaggagcagctatgggtaagcgactgtgggttgaacgcaacaaggacggttcgtgggatgcgttcagcgacgatggcgcgcacattaagttcggcaaggatcgtggccagttcacgccgggcgatctgatgaaggtcgcgctggccggttgcgccgcgctgtccagccagttcgccatcgaacatacgctgggtgagggcaagggtgccaagatcgtggtggatggcacgtacgaccccgagaacgacgcctacaccggtttcgaggagcaggtggtgattgatgcttctgacgccagcctgtccgaggaggatgccaacaagctcaaggaacgcgtcacccgccatatcgacaagggctgcacggtcaagcacacctacgtacaggagaccccggtgcgcatgaacgtcaccgtcaagcactgacgtactaataaaccgacgtactaataaattgagctccctctgatgagggagctcattgtatacccggactttactgcctgtcgggatcgatggtcttttcgatctgctgggcgacttcaggctcggctgcggacaccggaatctcctcgacgccggcaatctcctccagcgacttggtaggcacttcggcgggcgagctcggcacggtgtcgagacgcgattccgcagcctcaacatacttgcgtggcaccacgtacaccgggccggccgcatgctgcagcagtccctggctggtggagcccagcagcagaccggtgaagccgccgcgaccacgggagccgacaacaacaacatcgtgatcgtagctggccttggtcagtgcgctgacggccgggccggaaacgatctgcttgttgattttcagatcaggatgcgattcctgcaacggcttgatacgcacctcaagatcgtccttgtaggactccatgatggcatcctcgccatccacgcccttcaggttcggcacagcggaaatcacgtccagttccgcaccccagcacgtggcgaagtcggcggcaatgtccagcgccttcagaccccacttggattcgtcggagcctacggccaccttggtaatcgtgttgttcaggtgcatcaggttgccgtcatcatcggtgtacggcaccactacaatcgggcagtaggcgtatgccggcagcgacgaggacgtggtgcccagcagacgctcggccagaccgcccttgccacggttaccaatgacaatcagattgtagttacgcgacaattcgacgaacaccgatgccgggtctccggtaacaatcagtgtggcggcttcgacgccctgctcgtctgcgatggccttggccttggccagaatctcctgagcatcggaatgcgcggcgttatcgtcccccatcgccgtgtaagttgcatcgaacgaaacggcggcatagctcggcagggaatatgcgcagacaatctgcagcgtcagccccgcgtgctttgcataattcgcggcccaccatgttgccttgtaactggcatgcgacccgtcaacgccgacgagaatggccttgtcgttaatcatgacgacctccttgaagttattgtggcacgaataccgcgtacctccaacaataccccgcgacactcggtttggccggtatcctccgctcaaaaagaaatccgcgtatacgaaaaaggcacatcccaaaggacgtgccttaatacgaattcgcttaccgcataattcttgttacatcacgcggcgaatggaatatccagctccaccgaacacggaaacgttgcttattgccgttccctgcaccgggttcatagcattcatcacctgtccgttaccgatgtaaatggccgcatgagtaccattcgcaagaatgtcacccggcttggcatccgccaagcttgcgaccggagtacccacagtggcttgagcaccagaggttcgcggcagggagatgccaaactgggagaagacgtactgtacaaaaccggagcaatcccatcctgccggagtgttgccgccggcaacatacggatagccttggaacttcagtgagaagctggcaagctcagcgccagtgccagtcattttacccaagtcaacctgtggaatcgacgcacgctgttcagagcggctggctgctgcagcagcagcggactgggctgccgcagcttcatcagcggctttctgagccgccgcagcagcagcttccttctcggcctgagactcggtctgtggcacatcaagagtctcgatgccaccccatttagagttctcgtcaaccgaagtggaggtggattcggcgaacaaattcttcttcaccgaactcgccttcgggaaagaacgtgaggacaccatagcactcgtctgcgcggaatcggcagaggcaaacggggctacgcatgcaaacatggcacccgtggcgataaccgccactgatgtggaaataatattcttaacgttcgtcatcagcgccttaccttagcacacatgggtcgatttcataacaggaatgtcttttcgaagatgatgtcgcgggtgtatcactcggcaggagaacgcaacgggcctcggataccgattggcatccgaggcctgcaatatatcaatcaataagactgcgtcacgggatacgtaccacgatggtgagtttttcggtcatggcgctagcgagagccacgctgtagccgttccagccaccatggaccgcctgaccgttgccgacatacagcgccacatgatcgtagtgcgcgccgccattccatccaccggtgttggcataaatcagaatatcgcccggctgcagggacccgtctgtaactacgtggccaccgggaacattgacgtactcttcaggccaaccgtggaagttaataccacgggccgccaacgcttgactgaccaatgcggtgcagtccatgctctgtccgatcaaagaatacgcacggtcgacagaggcaccggcaccagcggaaaccgaaccactggcatcggaataagtaacagaagagcgagactcattacggctcgcggcgttggcctgcttctgggtcgcctgagcctcggcctccgtctgcttcttggcctcctcttcggcagccttcttggccgctgcggcatccttttccgcctgagattccgtctgcggcacgtcgaggttctcaatgccgccccaatcagcattgtcctcaacattcgtggcagtggcttcagtcgtcagatctttgcgcacctgggtgtacgaggggaaggacttggtggaagtcacagtaacaccctcagctgcagtcgctgtaggaacaaacataaacgagcaagcacaggagacaatcgcggcaacaatggaagaagctacagttttggtcttcatagaaccatcaccttacacggtgcgcattaactcgtacaggatggaagaaataaaacaccccggagctattgggatatatcggcgtgtcggcacaggtcagttcggactaatacgcggtcgcaacacttgaaatgtcatttcgcgcgaacgattgccgatagggcgacgtcacatccgaacagtaatcaccgaatgtaagccaatgaaatgaatcagtagtggacgtactggaacttaccggcttcggcggcgctgaacgtacgggtcgaaatcacacccaatcccttggcattggattcggagatctcaatggagccgtcggcattgatcttttccagaacggcaacatggccgtatgtgccatcggcattggcctggccaggagcgaacaccacagcatcaccgacatggcgaggagtgttgtccacccaatagcccagagcggaagctgacgccgcccactcgccaccattgccgaagttgccgctggaaggcagtcccagttcggcacgacgctggtacgcgtaccacgtgcactgaccccacggatagttgttggagttggtgccaacggcatggttcgggttgaagccagccggcacagcatcgccatcggcatccatgagagccgacaccacaggattgttcgcattattgcgattcatcagcttggcgtccaaggtgctgtctgaattgctcagcccccaaccgccttcattggtggactgtgcggtaacggaggatgaactcagatcagtacgtgcttcggaacgagaagccgcagtcacatcgctgatgcgcttaatctgcgtggtcgtcgtggccggatcagccacgaacgagttcgtggcgtctttattgttggaaaatgcgagagcacctgcggccgtgccgaccagagcggccagtgaggccgaggcaagaatatggctacggcgttcagcggcacgagcggcctcacgaatggaacgacgagtctggggagcgatttcattgatcttctcggcaatgaccggatcaagccccaaaacaacggcgtcgctgccagcggattgcaccgcgcgcacggcacgaacggaatgagaacccttgccggaggcaaacaatgccttcgctaagctgaacttctggcgcgagaccgtggtcgctttatgcgaagcatgcttcatactacgttaactccttggatgggttcggcggggtcctttcaacgaccccgtatgaccggcacaattgagtactgtacaacgaacagaggtcaatcctcaatgcgatcccccaccatccgggcatgtcaaacgatttacgtaaccgtgcggcagggtgaaaaactgccttgtttccgcccgttcacgaacctcactatccggttatcggaagaatcactaactcatgtcattccgacacaccgtagccatgatgtgctgcgtacattctgcactgcattccgcattgccgctactaccgcccggcaccccggaattccgcagtagccccgcagcaatcccgcacaccgagcattatccgcgatattccccaacactggtctacccttgaaaccatgactatcacactgagtattcccgagtcgctgaagccagaagatggtcgcttcggctccggtcccagcaaaatccgccccgaacagatcgccgcgctcgatgccggcgccaccaccctgcttggcacatcacatcgccaggcaccagtcaagcaactggtcgcttcgattcgtgaaggtctgcgcgagttcttccacctgcctgaagggtatgaggtggcgcttggcaacggtggcgccagcgcgttctgggagattgcctgcgcttcgctgatcacccgtcgcgccgcattcggcacgtatggctcgttcagtgccaagttcgccgcgtccgccgcgaacgcacccttccttgaagacccggtgctgttccccggcgagccgggcacttaccgtctgcctgagctcaccaagggcgtggacacatattgctgggctcacaacgagacctccactggcgtggccgccccgattcgccgcgtgcccggcagtcgtgaagccggtgccctgaccgtcatcgacggcaccagcgcagccggcgctttgcccgtggacatcagccagaccgacgtctactacttctcaccgcagaaggccttcggtgccgatggcggtctgtgggtcgccatcctctcccccgaagccatcgatcgtgcggcaggcgtcgaatcaagcgctcatctggaaggcgcacatcgctgggtgccgccgttcctctcgctgaccacggcactgaacaactcccgcaaggatcagaccctgaatacgcccgccgtggccaccctgatcatgatggaaaaccagattcgctggctcaacaacaacggcggcctcgcctgggccaccacgcgttgcgccaagtccgcatccatcctgtactcgtgggccgagcgctccgaatacgccgctccgttcgtcgtcgatgcggacgcccgctcgaacgccgtggtcaccattgatctggacgagcgcgtccaggcctcccagatactgtccatcctgcgagagaacggcatcgtggacgccgccggctaccgcaagctgggccgcaaccagctgcgcgttggcgtgttcccctcggtggaaccggctgatgtcatggccttcaccaagtgcgtcgactatgtggtcgagcacctgtgatggcggtctatgcctcgcatggccgaccatatatgccatgcacattgatcggtctcaactgataccgattgaataaatcgtagggagaggtgtttgacgcccctccctactcttactacagtgcatgagtatgaagttcgcgcctctcattgaccctgccgtccgcaaacccgcgcccaagcccgtacgggtggacctgcgtaaggtgtttgccatcggtaccggtctatggattgtggcgttgattgtcgtgctgattctgctggccgtgggctacagcgtaatgccgttggtgattatgtgcgtggccggtgtcattattggcttgctactgctgatttgggaatacttcgaccgctgggactaccgccgcctcggacagtaataaagttcactgcgccaacggcaacgtcaggctgaacgtactgccttgcccgggcgcgctccatacggtcacatcgccatgatgggtcagcgccacatgtttgacgatggccaagccaaggcccacgccatccgccgtgcgattgctctgttccgcaccccggtagaaccgctcgaagatgcgcgcctggtccttcttcgcgatgcccgcgccctggtcgatcacgcgaatcaccgcacggtcgccatccttgtctttggatgcggacacactgaccacaccattttccttggaatagccgatggcgttttcgatgagcttggtcacggcgctgtcgatctgatccgcctcaccattgatgactagatcatcgtcgcccttgatgttcagctgcacgccagccgcggccgcctgcggctccagtcgcgccaccgtggcctcgagctgttccataacgttcagtcggttggcggaagacggcgtaatcggctcctgtgcgcgtatgagcagcagcaaatcggacaccatgtggttgagcttgctgcagctggaacgcacctggcgagcatcggcagccacctgctgttcgtccagattgccggactccagcgaatcggcgagtttggccagagcttcagtggggcccaacaattgctcggatacattggtaataaacgagtcacgcacttgagcgaaacgaatcacgtcactgacatcggtaatcaacacgatgacgaactgctcgttgatacgccctacagtcaccttcagccagttggggcggtggacggactgcgtggcgacgtgatcgcccttgttctggtctgcgacgtaccgctccggagtatcggtggtcaagtcgaactggcgcttgccaccagacttgcgcgcctcgtgaatggcatccagcacctgctgctgggcgatggcgtcatctgacaccacacccaggcggtaggcggcgggattgcagcggaccacctcgtcgtgctcgtcgaccaccacggacgcacccggcagcatggacagcagcgtggcggtgtcgtcggacagatcgtcattgtcgtcatcatcggccagcggcgattccacggacactcgatgtgtcgcaaatcccacgatgagcgtgatgattcctaccacaaataaaacagccgcgacaataagagcaatcgcggcgacgagcggcatctgtgtcatgcccccattctttcacaccacacgccgggattgcggtttgccggcgcgccggtaacatgaatttcaggtgaacaacccaatgaacagtagaacaacttgaggttgccattacctacgttgaagtggggaacaagtactggaataatacactggtacaggttgcaataagcaagcatgaaaggctagagaaatgcgcgttattttcaacgaggagctgaagcaggttgctgacgacctcgaccgtatggcgcagaacgtgcgcaaggcgatcaaaggcgctggagaagccctgctgaatcaggacgttgaagccgcacagactgtgattgacggcgacatcgagattgatgccctggagtcctctgtgatcgaccagtgcgtcaagctgctcgccaagcagaacccggtggccaccgatctgcgtgtggtcgtttccaccatgcgtctggcttccacgttcgagcgtatgggcgatcttgcccgccacgtggccgaggccgctcgccgcacctacccggccgccgcgattcccgaatccgctcagccggtgttcgccgagatgatcgacttcctggacaacaccgctgaccagctggtggccatgctctccgatcgcgatgccaagaccgccgaggccatcatcctggccgacgacaagctggacaacctgcaccaccagaccttcgatctggcgctgtccgatgacatcacccgtcaacagaccgtggacatcgtgctgctgggccgtttcctggagcgtctcggcgatcacgccgtgtccgccgcccgccgtgtggtgtacatcgtctccggcttcgaccccaccaaggagccgacccgcgacgagggcaccgacatcgactgattggggcttgtcctcacattgggcgaataactgaacacttgtcctcctatggtttgaggaggatgcccgaaagcggcgatccggctacggctggacgccgttttttgttgcttctgggcggtacaccggcgtatccatggggcggcaaaacacccatagggcggtaacttgcccatggggcggtttgaaagatatgtgaaaccgcggaattaagccattctggcataccgccccatgagagttttaccgccccatgagggttttaccgccccatggggtaatcaccgccccatggggatttggcaggcatagcaaaggggagccacacattatgtgcgactccccttacagcttgtaccgtgttagcggcttaggctcacttctggccttgagcggcgacagcggcggcaccggcagcagcagcctccgggtccaggtactcgccacgcggcttgatcggcttgaagttctcgtccagctcataaagcagcgggatggcggtcgggatgttgaccttggcgatctcttcctcagacaggttgtccagcatcttgacgatggcgcggagggagttgccgtgagcggcaatcagcacggttttgccggccttgagctccggctcgatggcggactcgaagtacggcttcacacgctcaacaacgttggccaggcactcggcttccggaaccggatcgccggcgtagcgcgggtcgttgttctgggcgtactggtcgttcgggtcgatctcgggcggcggggtggcgtaagaacggcgccacagcatgaacttctcgtcgccgtactcttcgcggatctcggtcttgttcttgccctgcagagcgccgtagtgacgctcgttgagacgccagtcacgctgaaccggaatccacagacgatctgcggcatccagagcgatgttggcggtgttgatggcgcgacgcagcagggaggtgaacacgatgtccggaaggacgttcttctccttgagcagctcgccgccgcgcttggcttcggcttcaccctgctcggtcagcggtacatcgacccagccggtgaactggttggttttattccatgcgctctgtccatgacggagcagtactagtttataagtcatacggttcagtctacagccgcgtgcgcccaaacacgagtattcgtcttattatttcgctctcatagcgccacggcaaccgccagcaccaccgcaaacagcaaggtctggaagctggcggcgggcagagccgggcggaattgacgtttattcacgctggagaccatgcgcacaggtattccggtgcccgagagcaacagcaccgcaccccacggccaccataatgtaccgcacatcagcagggcgatgatccatgcgatgacgcagcacacaatcagcaacgtacgcgcgccggactcccccagccgtacggccagcgtgtgtttgccatgctcacgatcctcgtcgatgtcacggatattgttcaccatcatgatcaggcaggagaacaggccagccgccacagcacccaatagtccgccgacgtccaccgtgccgcacagcgcgtattcggtgcccaataccgcagccaagccgaagaacaggaacacgccgacttctcccagcccgacgtatccatacggatgcttgccaccggtgtagaaccagccggccagcaaggaggccgcgcccacggccagcaaccaccatgcttgggcgagcacgaccgccacaacaccgcatatgcaggcgatggcggcgcaaatcatcgccgcgaacagtacatgcttggccggtaccagtccggatgcggtcagtcgctggggtttgcctgatttcgattcgtccgtgtcacgcccggcgtcagtgccgcggatgccgtcggaatagtcgttcgcatagttgacggcgatttgcaggaacagcgcgactagcaggcacaggatggtcaccggccagaatcggtccatcagcaaggtctgctgttcacgggccgtggcgcaggaggccggttctggatatattgcgatgcaggtgcccgaccgctcgatatgcacgtacgccatcaccgccccaaccatcaccgacgcgatggaagtgaccaaggtcttgggacgcgcgccccgaacccacaagccgatagacataagcaatccctttcatatataactctggctcccctctctgaggggagccagagtatgcctaatcagccaacgagcggcttgaccagcgggaaggtgatggtctcgcgaatcgtggcaccggtcaaggcgataagcagtcgatcaatgcccatacccataccgccggccggaggcatgcccacgccgagagcctcaaggaagtcctcatcgatgtcgcaggcctcttcgtcgccggcgagtgcgtccttggcctgggccacgaaacgctcacgctgcacgatcgggtcgttgagctcggagtagccggtagccagctcgaagccgcgcacgtagagatcccacttctccaccacgccgggcttggtgcggtggcccttgaccagcggggaggtttcgaccgggaagtcacgcacgaaggtgggctcgtaaagcttgtcctcgtagaagtgctcccacaggtgttcgacgagcttgccgtggttctccacgtcgtcgcgctccacgccgagcttgtcggcgatggcgcccaaatgctcaacggaggtgccgggatgctcagggccgccgttcggcacgatttcctcgcccaatgcctcggacagcgaatcgtacatgctgatggtcttccattcgccgccgaagtcgtattcggtgccgtcgagcagggtgaccttgtgcgagccgtagacgtccatggcggtcttctgcacgagctccttgaccagctggccgatggaatcataggtgccataggcctggtaggcctcgaccatggtgaattcgggggcgtgcgtggcgtcgacgccctcattgcggaagtcgcggttgatttcgaacacgcgatcgatgccgccgaccaggcagcgcttgaggaacagttccggggcgatgcgaaggtacaggtcaaggtcgaaggcgttcatgtgcgtggtgaacgggcgggcggccgcgccaccgtgcagggtctgcagcatcggggtttcgacctcgaggaagtcgtggtcgtcaaaggtgcggcgcagggaggccacggccttggagcggttgcgcaccatgttgcggatgttctcgtccgcgatcatgccgatgtacggcttgcgggtgcgggtgtcttcgttcaggtccttgtgcagggccggcagcggctgcagggccttggaggcgatagcccactcagtggcgaatacggacagctcgccggtcttggaggcgatgacgcggcccttgaggtacaggtgatcgccaaggtcgacgagctgcttgaactgcttgagcgagtcggcgccaatctccttcttggagatcatgccctgaatcttggtaccgtcaccggcggacagctgcacgaagcacaggccgcccgcgttgcgcaggaacagcacgcggccagcaatgccgaccatgtcttcggtctcttcgccagcctcgagcttgccgtcatacttggcgcggaccgcctcgatggtgtcggtgacgtccaagtgcaccgggtagggggcgatgccggcctcaagcatcatcgcgcgcttggccacgcgcatctgcacctgctcggggtgagccagcgggccgaactccttgttggaggggtccacggcttcgtccagcgtggcaccggacttgatcttctcgcggatggtggcgtcctgttcgagcagcatttccgcacgttcgacggtgctcatctgcgggacggccggggtttcattctcagtgttttcggtattttcgacaacttcagccatgattcatcagtgtacgcaaggccggcgattatgagcccggcagaccgtacggccatctgaacacccgctcacatgacgcaaaaccggctctgcacaaggcttgagagacctgtacacacggcgaatccaccatcacgcaacactcgcgacatgccgatttgcattgtccaccaccacaatgtaatatctacgtctgttgccaaacgggctgtagcgcagcttggtagcgcgcttcgttcgggacgaagaggccgcgggttcaaatcccgccagcccgacaactggaccggattgttgagaaatcagcaatccggtttttcgtttcctaacccaacaatcagaccagcgatcggacagcggtaaacaacccgccgcgcacagcgacaaaccgcgtcgcggcaaggcccgtatttgttggcggaccaccgtaatatatcgctcgaatcaatcgattgccgcactgtttttgtaagtaatactgaagtaattagaggaaccatgaagaagagtctgcttgcactggcttcgggcgcgttcattctcggtgccgccgagttcgtgatgatgggtattctgccgcaggccgcggccgccaccggcgtgg

SEQ ID NO: 2064 - DNA, 3691 bp, Unknown
  R17_18m  MAG No. k141_56983
ccatattcgacttctatctgacacgtggcagatcggatgtcgaactgcgcgacatcgcaggggagccgatcgtcctgttccgggcggaacggggcagtgacggcggcgcgtatacggtgcatcgcaatggcgttttcgtgacgaagcgcccgaacccgtcggcgtagtcagttgcgacgaaacaggagggcggagccgcggacggttttgtgagacggtccgcggcctcaccgttggaagccgcggacttggatcatcagcaacggacgcgccgttgatttccacttccggagcaacgatggtgagctttgccgcgacgagatgctgcaggacggtgccgacgtacatggtgcccggattctcccttcgccgctgcgctgcctgccgcagcagatgttccacggccgcatcaacggaaagcgagttgtcggactccagcttgaatggtttgctggtgaagaacgcctgaattcgtttgacccggtattgctcgatctcggtgaattgctctgctgtcggacgtaattcattgatgagctcggcatagtcatgcatcagcgccatggtgccgcggctggttcgtcccttaaaggttgaaccgatagaaccgtcattcattactttttcaacgataccgacacgctcattcgattgtgtccaatactgctttctttctgcatgaacaacggtactcggcaaggcggtaacgatagtcgcaaaggctaagaagcccgtacataatcgtttttttgtagtgtttcagattttcagtagaatggcgacagccaaatcccgctggcttgctagtaaagcgttgtcctcggggggagttttgtttgttgttgaaagataacgcggcatcgaatagataggggaggcccggcatgggacgtcatcagcgtgcagaaacctccggactcatctccttcttgatttgcgccgtcgttggcgcggtatcgatgaacctgtacatggaatacgcgccggccatctggcagctgacgcaacgccgattcatggtatgttcgggcatcgtggcggcatgcggcgtcatttccttcattattggctatgcgcgcaaatcacgttcattgaacctcaaacatggttggtttgcgccgattcgtcgcattttcgaaatcgtcgccctttcggtagtgtatgcctcgaccattttcctgtcgtcttttgcactcatcggtgcggccaacgacatgatgggcaatgccatcttctccggctatatctccagcgtctgcgccgccttcgccggcgtggtggggtacatgacctttgtacaggcggagatgatgaacgccaaaactattgccagtctgttgccgttcttcgtcatctccggcgtggtcaccgccggcatgaccaccgacgacccatactggtatcacaacaacttttcgcagctcggcgacagaaccacgtttgcggcccgtatgttcaactccacgctgattcttgccggcacatgcatcatcatcgtcagctacttcgccatctccgaactggtgaccaccgaacggctacagcgcctctggcacgaccgcaccaacagagatccgaatcgcggctacgaaatcccacatttcatgctgcgcatctccattctgtccttcctgctgatggtggccggcctggcattcatcggcatcggcgtgtttcggtacacgccacacaatctcttgcacaatatatgcgccaaaggcctgccgttcgtcatgctgctgctgttcgtgctcctgccgtggcttgcgccacgcctgtccaaagcagtgatggtggcctccgacctgaccgcgctcgtatgcgctgcattctgggtcaatatgatgatgggtcacaacaccctcaccaatgtggaggcgttggctggtctggcgttcctcggctggttcatcgtgttctcgcgccagatcgccgccatcgaggccgatcgcgcggccgctcagttgttgcacgcgcaggccatcgaaggcggttttgagcagccgtcttccgcacctgatcagcagatcgaatcccgcatcgctgccgaccggtgaataatttgtttgatagatttggccttatgactgaacgactcacgaatctctggcctgccccgctcgccgcacagccgttgaacgctacggtaacggtgccgggcagcaagtccctatccaaccgctacctgattctcgccgccctcggcagcaagcccgttactctgattggcctgctgcgttcgcgcgacacggaccttatgatgggcgcactcgaagccctcggtgtccgctgcgacgtggattccgcaaccgacaccaccgtaacggttactcctcctgtatccggccgattccatggcaacgtcaatgtgttctgcggactggccggcacggtgatgcgtttcgtgcccggccttgccctgtttgcagatggcccagtgaattttgatggcgacgaacaggcttatgcacgtccgatgaagccggtgcttgatggtttggaacagctgggtgcaacggttgattaccacggcgaggttggccgtctgccgttcactattacgccgcctgcaaccttgccggctgcccaggcgcaggtcagcatcgattcgtccggttcttcccagttcatctccggcctgttgctgattagttccaaactgcctggcggtctgcacctcgcgcacacgggggagaagaccccgagcctgccgcacattcgcatgaccgtggccgatgtgaccggtgccggcggtgcggttgaggccgacgaatccgcccgcatatggacggttgaaccgcgcgcaatgcaactgccgagcaaggtgaccgttgagcccgatctgtcgaacgcggcgccattcctcggcgcggcattgatcgccggcggcacggtccgggtgcctcattggcctgaaaccaccacccagccgggcggcctgttgcccggatatctggagcagatgggtgccgaagtatcgttcccgaccatcggcggcgtgcgctattgcgaggtgaccggtgacggcaccgtgcgtgggctgggtacgttcgatttgacggcggccggggagattgcgccctcgttggcggcgattctggtgtttgctgataagtcgacagacatggttggtattggtcacctgcgcggccacgaaacgaatcgtctggaggcattggtcaacgagattcgtcgtgttgggggagcggctgaggaattgcctgatggattgcgtatcgaaccggtgccggcggagacgttgcacggtgccgtgatggaaacctatgctgatcaccgtatggccacgttcgccgcgatgctggggctgcgtattcccgatatcgaggtcatcaacgtggccaccacgcgcaagaccttgcctgatttcgtcggtatgtggagtggcatgctgaggcagtaaggggtcctgtgttctggtggaactcccctcagtccgctacgcggacagctcccctcagagaagggatccaagttatagggcctggatcccctctctgagtggatctgtccgccggaggcgactgaggggagtatgacgcaggggtagtggtctcatgaccatatacgaatgggggctgattccaatcggaatcagcccccatagtgttgcaacgagagattagtgagatgcctaacggcggttacttacttggcgaaggtgttgccgtag

SEQ ID NO: 2065 - DNA, 50724 bp, Unknown
  R17_18m  MAG No. k141_57460
aagccgatgctctgtgccatttcggtggcagcggccaggtcgaagtcgccgagcgcatcgatgtgcaggcgcttgacggcctccggatgttccttggcgatttcctcgacttcggtgccgccgttggcggtggccagcacgtcgaagtcgcgcgaggtgcggtccacggagatggacacgtaatattcgtgcaggatgttcttggcttcggccacaagcacgccggaaaccttgtgcccgtggatggtcatcggcaggatggactcggattcaagaatcgcctcgtcgcggttatgggcgatcttgacgccgccggcctgaccacgatgaccgatcttgacctgcgccttgattacgcagggatagccgattttgtccgccgcttcggcgacttcatgggagttctgggcaaagatggcgtccggggtgggaatgtcctgttcctcgagcagctgacgcgcctggtattcgtaaagatccatcgatccttccctgactatgtaattggtccggcatataactgtacacagtacatgccggaccttgaaaactaactgtacgttgggtgagacggaatctcaggccggcatcgcgatcagcgagctgctgggcttgccgccgagcttatccagaccgtcgagaccatcgagccgcatcacaaaactgaagcccaccacagtgccgcccgccttttcgataaggtcggcgccggctttggcggtgccgcctgtggcgatgagatcatcgacaatgagcactcgctcccccgcctgtacggcgtcggtttcgatttcgacgctggccgtgccgtattcgaggtcataggattcaccgatggtttcgggcggcaatttaccggccttgcgcacggcgatgaaacccttgcccagatgggcggccatggccgggccgaacaggaacccgcgcgattcgagaccggcaatggagtcgaattcgctcggggacaccggcagagccgtttcaagcgccttgagcagaatcttcaagcccttggggtcggcgagcactggcatgaaatcacggaagataatgccttccttgggaaaccccggtatggaacgcaccaaggacaccagatattcggcttcctgttgccctaccttgctcaatgcgtcgatggtgatgtccgactgtgccatagtgctcgccccttttatgcctttgcgatgcgatactcggatggtgctaccgaatcgaacagcttacttcgtcttggtttcgttgtcgtcaccggtctcgtcagcggtgtcttcctcggacacgacggacgcctcgatcggaacctgaccagcctcatcgttagccggagcctcggtgtcttcgtcgggcagcgggttgccgttctcgtcgacctcatcatcggacacataggccgggcgggtgtactcacgggcgatggcgttgaagccgaaacgcagcttggagccttcggagtcgatgacgatctcctcatactgctcgtcgacttcgacgaccttgccgatcacctggccgatggtgatgacctcggtgccgggctgcaggttgcgacggaagtcctgcttctcctgctgttgctgcttggccttcttggactgccaccacatcatgccgccgaacacgacgacgatcacgatgagcataatgtactgttgttccacgaaacaactccttcaaacgagcgacattgacgaaacgccgccaagtgtgcaaacaggagaaagtctagaagagcttgctgacatcatctttgggcgtaattcccaaatgctgccatgccttctcggtagccacgcggcctttgggcgtgcgaatcataaaaccttcgcgcacaagatacggctcgcacacggtttccacggtttccgattcctcgcccaccatggccgccagattgttcaggcccacgggtccaccgttgaagttgcgcacgatggcattgagcacggcgatgtccagccggtcgaggccttcggagtcgatctggtacagggccagcgcctccttgacgtcgtccggccgcaccacgatcaggtcgtggacgatggcccagtcgcgtacacggcgtagcaatcggttggcgatacgcggcgtgccgcgcgaacgcaacgcaagctcatgagcggaacccgcatcaaggtttacgcccagtacgttggccgaacgttcgatgagcttttccaactcctcatgcggatagaagtcgagatgtgcggtgaagccaaagcgtgcgcgcaacgggcttggcagcataccttcgcgcgtggtggcaccgatgacggtgaatcgcggcagggtcagcgggatggagcttgcgcccgggcctttgccgaccatcacatcgacgcggaagtcctccatcgcgatatacagcagctcttcggcggcgcgcggcagacgatggatctcgtcgatgaacagcacttcgccgacgtcgagggagctcagaatcgaagcaagatcaccggcatgttgaaccgcagggccggaagtcacgcgaatcggcacttcaagctcattggcaacgatcatggccaacgtggttttgcccaagccaggagggccggcaagcagaatatggtccggtggcacatcgcgtttacgggccgcgtccaggaacagttgcagctgggccttgagccgtggctgtccgataaagccttcgagaacatgggggcgcagctcctcgtcgctgaccggctcgttgccgatcggctgggaggagaccatgcgcaacgactcttcgttggcaccggtgtttgaggtaccgtaatccgttgtctcgctcatcagcggcccctatccatcagcgccaaagccagacgtagcacacgcggcacatcgtcggtggcaagcggcgtgggaatatcgttttcggcgcaagcctcggcaacggcctgctgggcgtcctgctgacgccagccaagtgaaatcagtccttcgacaacctgttccgtaccggtatccaccggagacttggatattgccgcctgagcggaagcaccctcgatctgactcaaatcaatagagcccttaagctcgaggatgattttctgtgcgcccttcttgcccagccccggagccttggccagcgcggtggcgtcgttgtcggcgatggcgtgggccagctgactcggcgtcagtgtggagagtaacgattgggccactttaggtccaatgccggagaccttgatgagttgcagaaaggttttcttggcgtcccgatccaggaatccatgcagggtaatggcatcctgagagaggttcatataggtgaagacgcgggtgtcttgcccggcgtgcagacggctcaggtcggtggcggacatgcgcacttcgtagcccactcccccaacatcaatcaatgcggtatcggtttcgaccgattcaacccgcccggtcagcatgccgatcatacaggtactccttcagggctccaggattcaagactcgaacaactgttcgaaagtatactacatgcctcggtcgtggttgatgcggcggcgcgtggatttctgtgcggcctcagcccactggcgttgcgcggcggtcagatgttgttcgcgttcgccgccctgcaatgcgcctgccgggcgcagcgcatggcaaatggccaaagccaaggcatcggcggcatcggcgggagtcggcattttggtgaggttcaaaatacgtgtcaccatacgctccacctgaatcttctgcgcctgcccgttaccggtgatagccagcttggcttcggtaggcgtatgcaacgccacgggaatattgcgttgcgcggcggcgagcatggcgaggccggcggcctgtgcggtaccgagtacggtgttgcggttggattgtgcgaacactcgttcgatggatacggcatcgggtgcgaagcgatccattttctcggacaggccgttgtagatggccagtagacgcagatcctgggtgatatccggtgaggaccgcaccacgtccacgtgaataaacgaaagccggcggtgctcgccggcttcgatcacgccgaccccgcaacgtgtgagcccggggtcgacgccaaggataatcacgaggattactcctcgtcgagctgggccatcacctcgtcggaagcggtccagttggagtagatgttctgcacatcgtcgaggtcatcgaggttgtcgatgagcttggacaccttgcgggcatcgtcgaggctcaactcgacctcgttcttcggctgcatgacctggtcggcggaatcgtagtcgaagccggcgtcctgcagagccttgcgcacggtgaacaggtcggacggaccggtcacaacggtgaacacctcaccgtcatcggtaacgtcctcggcaccggcttcggcggcggtttcgaacagcttgtcgaagtccacgccctcggacggcaccacgatctggcccttgcgctcgaagttgaaggacacggagccggaggtggccagggagccgttgcccttggtcagggtggaacggacttcggcggccgcacggttgcggttgtcggtaaggcattcgatgatgaggccaacgccggcaggagcgtagccctcgtagacgatgtcttcgtagttggcggcgccgtcttcagcaccggcaccacgcttgacggcacgagcgatgttgtcggccggcatggaggccttcttggccttgtagatggcatcgtacagggacgggttgccgtccgggtcgccaccgccgaggcgggcggcgatttcgatgttcttgatgagcttggcgaagagcttgccgcgcttggcgtcgatggcggccttcttgtgcttggtggtcgcccacttggaatgacctgacataatgctcctagcagtaataaacggatgatgtcaaacgaaacgattgtaggccgttaatcagacatacccgtgatgtttccgatgattgtcttgttatgcgtaccgataagaccggtcacgcggggtgccgcacctgtgttaggcaagcggcagatgatactgcggagccagctgttcgaatgcctgggcataggcttctcgctggtcggacagcagaataggcatggtgcgtgtctgggcgacgatgggcatgaagttcgcgtcaccattccagcgaggcactacatgctgatggaggtgagcggcgactcctgcgcctgctacttcgccctgattaatgccgatattgtaaccgtgcggacgggagacggtttccatcaccttcatggcgagggtggtggccttctcgaattcgaacagttcggcatcgtcgagttcggtgatgaatccgacgtgacggtacgggcagatcatgagatgcccgacattgtatgggtagaggttcatgatggcgaacacgtgcgtgccacgccaggcgatgaggccgtcttcgtcggatttcttgggtccggcgcagaacgggcattccttcgtcttgggcttggttgggcgatcctcgctgttgcgcagcacataggtcatgcgctgcggagtccacagtcgttcgaccgtgtcctcctgaggcggaaagtccgccggattatcgacacgcacgtcagtcattttcgcaccctttcttggctcccctctctgtggggagctgtccgtgaaacggactgaggggagtgcgagccatgcaggactcccctcagtcgcctacggagccagctcccctcagagaggggagccagtaccattcacatcactcagccacagcggcgttgaagtcgtcggcggagttcacctggacgcgcttcttgatgacagtgaggatctgctcgcgggccttgtccaccggaacgccgttgagctggctgccgtcacggaagcggaagctgaccgcgttgttgttcatgtcttcctcaccgacgatgaggatgaacggcaccttggacttggaggcgttgcgaatcttcttgccgaagcgatcgtcggagtagtcgatctcgcaacggaccatctcatcctcgagggacttgacgaaaccggccagatgcggggcgaactcgtcggcaaccggcacgccgagcacctgcacgggggccagccacgccgggaaggcgcctgcgtagtgctcgagcagcacggcgaagaagcgttcgatggagccgaacagggcgcggtgaatcatcaccggacgctggtgggtaccgtcctgcgcgatgtactcgagctggaaacgctcgggcaggttgaagtcgagctggatggtcgagacctgccaggtgcggccgatggcgtcgcgggcctgcacggagatcttcgggccgtagaaggcggcgccgcacggatcgtcgacgagctcgaggttggattccttggcgacctcggcgagcgtgttggtggcctcctcccagatctcgtcggagccgacgtacttgttcgggtccttggtggacagctcgaggtagaagtcggtcaggccaaagtccttgagcaggttcagcacgaaggtcagcaggctggtgagctcgtctttcatctgctcgcgggtgcagtagatgtgggagtcgtcctgagtgaggccgcgcacgcgggtcaggccgtggacctcgccggacttctcgtagcggtacacggtgccgaactcgaagaggcgcagcggcagctcgcggtaggagcgctgacgggacttgaagatcaggttgtgcatcgggcagttcatcggcttcaggtagtagtcggcgcccggcttggtgatgttgccgcccgcgtccttttcctcgtcgaggtgcatgggcgggtacatgccgtccttgtaccagtgcaggtggccggaggtctcgtacaggccgcccttggtgatgtgcggggtctgcacgaagctgtagtggtgcttgcggtgcatctcacgggagtagtcctccatcgcgttgatcacggcggcgcccttcgggtggaacacggccaggccggggccaatttcatccgggaaggagaacaggtccatctcggcgccgagcttgcggtgatcgcgcttggcggcctcctcgagacgggtctggtaggccttgaggtcttccttggtggcccacgcggtgccgtagatgcgctgcatggtcgggttcttctcggaaccacgccagtaggcggcggcggaacgctcgatcttgaaggccttgatgtagcgggtgttcggcaggtgcggaccgcggcacaggtccttccaaaccacattgccatcacggtctacgttgtcgtagaagctgagctccttttcggagatctcggtggcggcggccgggtcgaggtgtgcttccttgtcttcgatcagttcgatcttaaagggctggtcggcctcttccttcagagcctcttcctcagtcacggaacggcggcggaaggactgggaggacttgatgatgcgctgcatgcgcttctcgatgtccttgaggtcgtccggggtgaagggctggtcgacctggaagtcgtagtagaagccgtccttgatgacggggccgacgccgagcttggcgttcgggtagacttcctgcacggcctgggccatgacgtgggtggccgagtgacgcatgattgcgaggccgtcttcggagtcgagggcgatggggtcgacggtatcgccatcgttcagcggcgtgtacaggtcacggttctcgccgttgatcttgaccgcgatgatgttcttgtcttccgcgaacagttctacgccggtggtggttgcttccacctccttcgcttcgccgttgacggttatggagatggtagcttgcgccatgatttgtcctttgctatcggggcccacggtactaatgtgcaggcctggactggttaatcaacgtaggacacgataggttgggcgtgcgacaaataccaccagcatctgaaccaatacgaaaaaaacctcgccgaagcgaggtttcgttgtggagcggacaacgggactcgaacccgcggtctcaaccttggcaaggttgcgctttaccaactaagctatgtccgcaaaggaatccgccgtgagaagcggaatccagtgggcgatgtaggaatcgaacctacgaccccttcggtgtgaacgaagtgcgctagccgctgcgccaatcgcccgaatactcggttcttcagttatatccagtcgaattgcttcgactttcgtgggcgatacaagattcgaacttgtgaccccttccgtgtcagggaagtgcgctaccactgcgccaaccgcccgggtcatatttcatcccattgaattgcttcgccggtctgagaggtgggtacgagagtcgaactcgtctatacggctttgcaggccgctgcctaaccgcttggctaacccaccgtaaggtctgtcaactcacggacctagagcggacaacgggactcgaacccgcggtctcaaccttggcaaggttgcgctttaccaactaagctatgtccgcgtgtgtttccttggcgaggtctccctgccgaagcacgagtgtttactatacacacatgcgtgtagttcgtccagctgcggcgtgtcgcctgtaattgcatactctcgcttatggctaaagcgtgcgcttcgggcaatgaattccagttactctagaggtatgagtgaagcagcgaaggacaccggcgcagtattgatcgccgcattcgagggatggaatgatgcctgtcaggcggcgacgaacgcggtgcgccatctggtcaagcgatatgagtcccgcgagattcgtcatattagatgtgatgatttctatgactatcaggttgcccgtcctatgctgtgccatgttgcgggacgcaccaatcttatctggccgcagaccacgttctacgacatcacgttggacgcaggcaagcatatctatgcgcagatcgcccccgaaccgaactatcggtggaaggaatactgtagccagagtctggccattgccgatgagctggatgtcaatcggatcattacgttaggttcgatgttctccgattgcccgcatacccgtccgttgcccatcgccgtcagcgacggagactgtcaatgcgaaggagaccggtcgtataacggcccggtaggcattcctaccgttttggatgtggccgccgcgcagcaaggttttgctcattcctcgatgtgggtgtccatcccccaatatttgggcagcgacgaatgttctgccggcactatgcgattgctggatgcgttggacaagcatatcggcttcaccttcgatacggcagatctgaagcagaaagccgaacagtggaaggcgcaagcctcgatactggttcgttgtaatgaccagcttcacgattacgtggagcatttggagcacgactacgacttgcagcagaaagccgaggcggaggcttccttgggagcgccccaggccgaacaactagtcaaagaagcagaagcgtttctgcgccagatgggcaattagcccatatatggtgtgctcccgctggatgaacagccctgtgggctgttcatagcagtgcaccatgtgcacgtcgcacaaaatgtcgggagctggctcgcgtagcgagactgagggtggttctgctggcatattccagtgaccacccccagtcagcttcgctgacggctcccgccagcgggagcaccattatattggagtcgtctatcgacccgtcttatgccgcagccgccacggagggatcgatggccggcagcacgcccacaatcagcagcaaggcgacgaccacagccaaaccgatgcggtagatggcgaaggccttataggagaagttcgatacgaacttcaggaatccgatgatcacgatgtagccgagtacgaagctgatgaccatggctacgagggtcggcccccagccggggaacatcgcatcggttttgtagttcttcacggccttgatggcttcgagcaaacctgagccgaacaccgcggggatggccatcaggaagctcagacgtacagcggcctcacgcgtgtagcccagtgcgcgaccgacggtgatggtgccgccggagcgggacacaccaggaatcagcgccatggactggcccaaaccgaagaggaacgcatcacgatacgtcatatcattcatggttttgttctggcgagccttggcatccaccatccacagcagaatgccgaataccaacagcacggttaccgtaatccacaggttgcgcaacgaggtctcgatgacgttctgcagagtgaagccgaggatgataatcggaatcgagccgacgataatgttccagccgagtgtggcgtaattgtcgccgcggcccatgcgggccttccaatccttgccgttcttgccgaacaggcagctgaaccagtgagtaaggatattgatgatgtcgtgacggaaatacagaatcaccgcaagttcggtgccgatttggatgatggcggtaaacgccgcaccgggatcagagcccagcatcaaatcgccgaaaatacggatatgcgcgctggaggataccgggagatactcggtcagcgcctgaacgatgccgagaatgatcgcttggaaaaaattcataacccctcgtgatttctaagtatttgatgtgttatgacgatgaacaccctacccaagggggtgtagaacaacactaagaatcggtaacatccacggcttctacaatgaaagtggatatagtacgtaagcgacgaagggagcattatggccacgtatcgcaaaagcagggcattcgcaccggaaggattcttcgaatgcgagggtcgaggactcgaatggttgggagcggctcatgcgcagggcggcccgcgcgtggtgcaggtatacggctggggcaaggattatctggatatcgaacgtgtgggcagcgcgtcccccacgcctcaggcggcacgagcttttggtgcggctctggcccatatgcatgatgtgggtgccgaatatttcgggtctgcgcctgacggatataacggcacatgctatttcggaccattgcaggacccagtgaaaatggataccggcgagtggaccgacccgatcagctatttcgctgatggacgtctgcgcccgatggtcaaccttggtgtgaggcgcggcgagctggataagcgcgatgtcgaactgaccgagcgcgtgattgaagcgttgccggatctgatgggccgagccgcgtccgacaagccggcgcgcatccacggtgatctgtggagcggcaatgtgatgtggaccgccgattccgggcagcccgaggctgtgctcatcgacccggcggcacatggcggtcatcgcgaggaggatctggctatgctgcacctgttcggcatgagctatctgagcgaaatcaccgagggctaccagtccgtgcatccgttgaaggccggatggcaggagcgtatcacgctctggcagctctaccccatcgccggccactgtgtcttcttcggcggcggctacgtcaacgaataccgctccatgtgccgctccctgctgaagtaacagacttggctcccctctctgaggggagccaagaacgcatccactctcagctcagcgcgtccttcaacttgctgaagaagcctttcttttggccagcctgtggacgggatgcctgggagacgtgcgtggcgcctgaatcatgtgaggcggcgaactgttcgatgaggccgcgctcggtttcgttgagcttggtgggaatcagcacattgacgtgggcgatgaggttgccgcgctcgtccttgttgcggatgttcgtgacgcccagtcccttaagcgtcacagtgtcctcaggctggcagccggccgggatggacacggtcttctcaccatcgaacgtgtcaatggacagatcgtggccgagcacggcccagctcatcggcacctgaatccagcagtgcaggtcgtcgccatcgcgggtgaactgcttatccgccttgatgcgaatgtcgatgtacaggtcgccggcagcgccgccgccctcacccacttcgccctggttggccaaacgtagacgcgcgttgtcgttgatgccggcgggcacggtgacgcccacggtacgtgtggtacgcacacggccgtggcccatgcagctggggcacgggttcttgatgatggtaccgtggccctcgcaacgttcgcagggggcggaggtcatcatctggccgagcatggtgcgcacgaccttctgcatgaatccctggccgtggcagtcggggcaggtgaccggctgtgcgccgccctgggcgccggagccgccgcactcctggcacagggagaacgtgctgatcttgacgtgcgcggtgccgccgaacacggcggtcttcaggtcgatggacgcggaggccagggcgtcgcggccgggctgggtacgcggcaccgggccctgtgagccaccaccgaacgcggaaccgaagaacgtggagaacacgtcgctcatatcgccgaagcccgccccggagaagccgccggcaccggcgttcggatcgttcgggtcgacgcccgaatcatacatacggcgcttgtccggattggacagcacatcgtaggcgttgttcacttccttgaacttgtcctcgaattcagggcccgcgatgtcggggtggtacttacggctgagcttgcggtatgccttcttgatctcgtcgtcactggcgccgcgttccacacccagcgtctcgtaataatctgccacttgattgatcctttgtgttcgtttggtctgcgggtcattgtgccacagacggcggtcagtcttgggtccggccctcggagaggaaggcggtcaaatatctggctacggccctgacggcggccatagtggccgcatagtccatgtgggtcggccctatggagccgacgaaggcgatgggttccgtgtcgttcgtctggctctccgtctcggattcggtttcgggttcgcctacgggatcgttccccgccggttcgcccgccgcaccgctgcgcccatagccactgctgaccacggaggcatgcagtaggccgggggtgtgcatttcggagccgatggccacgcccacgccggatgcattcgtctcctcgcccaggttgctcatgagcttcatcagcacgacctgttcttccagcgcgtcgaagagcggggccagatcggccagggaccgggagtgggccaggtgcgaggtgccggacatgtacagttcgtccgcgcgttcgtccaatgccatcgattcgaaggcgtcggccagcgcgtcggccacgccgcgcaccgactcgtagccggcgctggcggcgatggatcgcacggtctccgcggatttcgatagggacagtccgacacattgttcgttgacggtgttggagagccggttgatctcgtccacggcgggcatggatgcgatggtcaggccgtgctgggccacgcggccggtgtcggtaatcaccaccgcgagcaacgtggtcatggcaacgggcaccatctccacgtgccgcaatgtggccttggccagcgatggcgaggtgactatggccacttgaccggtgatttcggacaacagtcgtgccgaacgctgcagcgcgtccttgagactcaccgatccggacaggaagctgttgatgccgcggcgctgcgcctcgctgagcggcaccacggtagcaagtcggtccacaaagtatcgatagcccttttcggtgggcacacgaccggccgaagtgtgcggctgaatcagatatccttcatcctccagagcggacatgtcgttacggatggtggccgaactgacgccgagatcatggtcgcgcgtcagcgaagtggagcccacgggctcctgagaacggatgtaatcctccaccacggcgcgcagcaccagcatgcgtcttgattgcgtcatgcgcgcctccttatatatgcatacatattcatatcagtcacggttcactcagggcgtaccccgacggtcggttcgccacgccgcgacacgcgggaacccagaaatattgcctctttcttggctccgccacgtgcaggtggcgcacttcaccttagaacattgtattagcactccttaggcttgagtgctaatgcgttcgtttgcagcgtagcaatgttcactgtgaacgctaacagaacacaaactaccaaaacacgccaaaattgcaccgcaacgtcgcaaaccgacgctagcatggtaatcgcaatgtgagggcgtcaagcgcccggcacaagccggatacgcggcccgaccaattggaaggaaagtaatccatgaccgaattcaaggagaccgagctcgacgagcgcgccatcaagatggcgaaggtcctttcggctgacgcggttgagaaggcaggctccggccaccccggctcccccgtctccctggcgcccgtcgcctacacgctgtaccagcacttcatcaagcacgatccgaatgatcccaactgggaaggccgcgatcgcttcatcctttccggtggccatgcctccctcacccagtacgtccagctgtacttctccggctacggcgtgaccctggacgaccttaagaacttccgtggcggcgctgccacccgcaccccgggccacccggagtacggcctgaccccgggcatcgaaatgaccaccggccctctgggccagggcttcgcctccgccatcggctttgcctacggcgagcgtttccagcgcggtctgcttgacccggagaccccgaaggaagattccccgttctaccacaagatttgggccatctgtggtgaaggcgacatcgaggagggcatctccggcgaggccgcttccctggccgccaaccagaagctcggcaacctgaccgtgatcttcgacgccaaccgcatccagatcgaaggcgacaccaacctggtgctggccgaggacgtgctcaagcgcttccaggcctacggctggtacaccgacgagttcagcttcatccagcccgacggctcctacaaggaggacatcgagggtctggccgacgtcatcgccaaggccgaagccgccgccccggaccagccgaagctcatcaaggtccactccctgatcgcctggccgaccccgggcaagaccaacgacccgtcctcccacggctccaagctgggcgccgaggccgtcgccggcctcaagaaactcctcggctacgatccggaggagtccttccacgtcgacgaagaagccctggcccacgcccgcaaggtcgccgatcgcggcctggaggcccacaaggcctgggacgagaagttcgacgcctggcgcaaggccaacccggacaaggccgccctgtacgaccgtctgaaggccggcgaactgccggaaggcttcgacaaggcccttgacgaccttgaggccaccttcgaagtcggcaagggtgtcgccactcgtggcgcctccggctccgtgctcaacgccatcgccgccgtcatgccggaactctggggcggctccgccgacctcggtggctccaacaagaccgacctcaagggcgctgccaccttcgccccggccgagtgcgccaccaagcagtggccgaactgcaacgagttcggtcgccagctgcacttcggcgtgcgcgagttcaccatgggctgcatcaccaacggcatcctgctgggttcccacacccgtccgttcggcggcaccttcttcatgttctccgactacgagcgttccgccgttcgtctggccgccctcatgcagatcccgaacctgtacatctggtcccacgactccgtcgccgtcggcgaggacggcccgacccaccagccggttgagcaccttgcttccttccgcgcgattcctcagcttgaggtcattcgcccggccgacgccttcgagaccgccgaggcttaccgttacttcttcgagaagaagaacaccctgcctggcgccatggttctgacccgtcagggtgtcccggttcttgccgagaccgctgccaaggccaaggacggtgtcaagaagggcgcttacatcctggtcgacaccgagggtactccggacgtcatcctcatggcttccggttccgaggtccagtgggctgtggctgccgccaagaccctggccggcgagggcgtcaaggctcgcgtcgtgtccgtgccgtccatggaatggttcgaggagcaggacgccgagtacaaggaggctgtgcttccggccgctgtcaaggctcgtgtctccgtcgaggccggcgttgccatgccgtggtacaagtacctcggttcctacggcaagcctgtctccatcgagcagttcggcctgcagggtgacggcgctcagaacatgatcgacctcggcatcaccgccgagcacgtggtggaagccgccaaggcctccatcgccgaagtcgaagccgccaagtgagcaactaagcaataattcaataattgttggctcccctccctgaggggagctgtcaggcgaaagcttgactgaggggagcaatgcttgagcccactcccctcagtccgcgttgcggacagctcccctctcccaggagaggggagcctagggcttgaatccaaggagaaaataaatgactgaagcaactcagcgtacgtccgacaacggcgtttccatctggctggacgacctgtcccgctcccgcattgagtccggctccctgcaggacctcatcgccaacaagaacgtggtcggcgttaccaccaacccgtccatcttccagaaggccctgagccaggtcggcccgtacgacgctcagctcaaggagctcggcaaggttgacgttgagaccgctgtccgcgagctcaccaccaccgacgtgcgcaacgccaccgacatcttccgcgagatcgctgaggctaccgacttcgtcgacggccgcgtctccatcgaggtcgacccgcgtctggcccacgacaccgagaacaccgccaagcaggctgtggaactctgggagaaggtcaaccgtccgaacgccatgatcaagattccggcaaccctcgaaggcctgccggccatcaccgccaccctggccaagggtatctccgtcaacgtcaccctgatcttctcgctcgagcgctacgagcaggtcatcgacgccttcatcgagggcatcgcccaggctgacgccaacggccacgacctgaagcacatcggctccgtcgcttccttcttcgtctcccgcgtggacaccgctgtcgacaagctgctggaagccaacggctccgacgaggccaaggctctggagggcaaggccgctgtggccaacgctcgcctggcttacgagctcttcgagaagaagtttgccgaggatccgcgttgggccgacctggctgccaagggtgccaaggttcagcgtccgctgtgggcctccaccggtaccaagaacgccgcctactccgactgcaagtacgttgacgagctcgttgccaagcacatcgtcaacaccatgccggagaagaccctgaacgctctggccgaccacggcaacggcgctccgtccatcgagggcacctacgaggagtcccacgccgtcatcaacaagctggctgagctgggtatcaacctcaaggacgtcactgacaagctggaggccgacggtgtcgccgccttcatcaagtcctgggattccgtgctggctgacgtccagtccggcatcgaccgcgtgaacgcctgagattattagctgatgcgcatttcgcgcattaactgattagctcacagaagctccgaccccaaccggtcggggcttcttacgtttgttgctacagtagtacgagcacatgagagaaaggccgaaccgtaatgaacaaacttgtcgcacgccagcggttggtgatgacctttaccttcttttcgatgttcttcggagcgggcaacctgatcttcccgccgtttgtcggagctcaggccggttccgcgaccataccggcggccatcggcttcatcgtctccgcggtcggcctgccgattctcggcgtgctggcggtcaccttcgccggtggcttcgacaaactcgccggccgagtctcccccaaattcgccctgttcctcggcttggcgatcatgctcaccatcggcccctgctttgcgattccgcgtacggcgaccacctcgttcgaaatgatggtggcgcctttcgtgccgtcctcctacggctggctggcccaactcatctactcgctcgtgttcttcacactggcgttcctgttcgcccagcatcccgaaaaactctccaaagtgctcggccgattcatgggaccgttgctgctggtgctgattgccgtcctgttcatcgcctgcctaatccacggtatcggtaccccggccaaaccgatgggcgactactccacaaaccagattgcacgtggcttcctcgacggctaccagaccatggatctgctcgccgcgctctatttcggcatcgtgatttccgcgaatatccgcacccagcaggtcgatgacgaatcgcaagtgcagaaggagaccgcgtatgccggactcggcaccggtgtgctgctgatcgtgatctacggcgcactgagctacgtgggcttggtgtccggcgccatcgccaccatcgatcccgccaaagacacgggcgcgaccgtgctcaccaatctcacctcgtccctgttcggcgcgttcggtaccgcgttcctcggtatcgtcttcgtcatcgcctgcctcaacgtatgcaccggactgatcggtacctgcgccacctacttccacactcggttccagaccgttgcagggagaacgttgagctaccgcacctggcaggtcatcttcaccgtgttcagtttcatcgtgtccaacgccgggctaagcgcgatcatcaaggtttccgtgccggtgttgtccgcactgtatccgatcgccatcgtgctggtgctgctggcgctgacccacaagtcgctcggcgcgcgattcccgcatgtctacttctggaccgtgctgctggtgggcatcgactccttcgccacctgcatctccagcctgatcaccgtcttcggcggctccatcggctggctggacacgacgctggccatgctgcccttgcagcaataccagctcggctgggtggtcccggctatcctcggtgttgccattggtatcgccgatgctccgcgacggtagttcttcccggtctgtgccggagtctggcggtcggtcggtgatggcggttgttgcgacgctcagcggtgccggtgtatcgttcgcaccactatatgagcgcatttggggcggcatgatgctgcatccgaactgtccggcgattggcagaatgacctactatctctcgggccaagcaactgacgactatggagtctgcgtcacctcaccactgtggtttatgacggtgactgcgctgagtgttgtcgcgattctctgtctgaccgttgcgggagtacagggcttttcgcgccatcggctctgttcccgttgccctgttctggtcaggtctcacgttctttacctacagctacaacactggtagacacaccgatttctgcccagcgctatcggcaactgacaatgcaggtcttgtcgcttattgcatcggccgtgaagctttgggactgctgaccgtcgtgttgtgcgtgctgccattgttctccctgctttcggcgattatggccatcacgttggctgcgcacgacgcgacaccaccggcataaaatctccttcatatcacgaaacaacgggcacccgttttgcgaggcattctatccgttccgtgtttcgcaacgcatgagacggcacatccattgaatcaggagtctagaccatatctcgccgaatcttgcggtaggtggcatagaacaggaagccggccacgatgccggaggtggcgtcggagatgggttcggcgatgaagatgccattgacgccgatccagtgcggcagcagcagcgcgagcggcacgagcaggatgatcttgcggaagacggccaagaacaccgactgtttggcctggcccatgccgacgagtgcgcattgcgcgcccatctggatgccgaagataccccagccgcagacgaaaatcggcatcatgcgggtcacgatgtcgatgaccgtctgttccgaggtgaaccatgaggcgaagaagacggggaatgtggcgaacacgttcgcggcggccgctcccctgacgccccatccgaacacgaaaatgaacacggggtcaagaaggatggatatgccggtgccgatgagtacggagaccatggccacagtggtttcgccaactgcagcagcacggtgagggtcagggctatggcgatgaggaacgcggcgctggtgccgaggatgcgttcggctttcttgaagttgccgcgcccaagttcaatggaggcgcgaggcgcgccgcctgcgccgatcagcgaggcgaaggcggtgacggccggcagaatcgggaagcagatgcccacgccggtcatcgccgcgttgcccacttcggggatgtgcccgatgaacagtcggtcgatgatcgtgtacgaggcgttcgccgcctgcgccacgatggtggggaccgacatggtcagggccagacggcccagcccggcatcgatcgtgttcgcctgtaccaaggatcagctctgccagtagtagctgaagaagtcggcgagctcccccatggtttcgtgcagcatgcccatgcgcggcaggtacaccacgcggaagtggtcggggcgatgccagttgaacgcgccgccgtggctgatgaggatgtgcttgtcatgcagcaggtcgagcgcgaactgctcgtccgagtggatgttgaagcgtttgacgtcgatcttcggaaagatgtaaaacgcagccttgggtttgacggcggtgatgccgggaatctggttgagcatgtcgtaaacgaggtcacgctggtcgtgcacgcggccgcccggcacgatgtagtcgttgacgctctggtggccgccgagcgcggtctgcaccacggactgggcgggcacgttcgagcacatgcgcatgttggcgagcatgttgaggccctcgatgtagtccttggcgatacgcttgttgccggacaggatcatccagccgatgcggtagccggcgatcatgtgcgatttcgacaggccggagaaggtcacgcagaacaggtccggggccatcgaggcgatggagatgtgctgcaggccgtccatgacgaggcgatcgtagatttcgtcggagaagatgatgagctggtgttcacgcgcgatgtcgacgatctgctggagcacttcctttgggtaaagtgcgccggtggggttgttcgggttgatgatgacaatcgccttggtgttgctggtgatcttggagcggatgtcatcgatgtccggataccattcggactgttcgtcgcacaggtagtgcacggcggtgccgccggccaggttcacgcaggcggtccacagcgggtagtccggggagggcacgagcacttcgtcgccggtgtcgagcagcgcggacatggacaggttgatgagctcgctgacgccgttgccggtgtagatgtcgtcgatggtgacgttcgggatgttcttcagctgcgcgtactgcatgatggccttgcgcgcggagaacaggcccttggacggcgagtagccttcggtgtcggtgagctggtgggccatgtcatagacgacttcgtccggcgtgcggaagccgaagggtgctggattgccgatgttcaatttcaggatgtgggtgccgttggcctccatgcgcatcgcctcgtcggcgaccgggccgcgcacgtcgtagagcacgttgtcgagcttgtgcgatttgccgaaggtacggcggcggcccacgggaatctcgctgtccgtcaggggcttggcggtgcccgtggcaagcggcgtggcggcgtgttcgccgtccgtgacgctgttggaagcgtccgagttcaattgcggggtggattcctcgccgcgcagccagttcgcgtcaacgtccagttcgctggccaggaattcgagcacgtcttcgcggggcatggtcttgccggccacgtattggctgatatggctcttgcccatctttacgccacgatgttcggcggcgtgcaccaaatcgacctgcttcaatcccctactgttcatcgcattgcgcagacgttccgcaaacaccgatacgctcatatccttatgcctccaaccgggagttcaatttatcttttgaacaacagttcaaagcatactcccggttcaacacaagttcaattttggcgtgttctcgagtctcggccggttcagcccaactgcgcttcaatccattgggcgacgccgtcctcgttgttgggcgggcagatctcgtcggcgatagacaacaccttggggttcgcgttggccacggccacaccccggccggattcgctcatcatgttgatatcgatgaggtcgtcgccgaaggcggcggtctgttcgagcggcacgtccagtcgttcgcacagcaggtgcagcgcgtgctccttgttggcctgcgggttcatgagcatccacatcacgccttcactaatggagatgtcgaagtccggcggaatcagcgcacgcagctcgttccactgttcaggttcggggaagatggtgatcttatccgccacgccttcgggcacgtcgtggaagttcgtatattggaaggcctgtgttttccaatacacgcgcacatcgaagttggtgtagcgcacgtcgttcatcacgatgccgagcttcaggccgggcatgcgatcgagcaggaacagacagacttcgcaggcacgccgtgaggagaagccaatcttgatcaaatggttctcatcggccggcgtggcacctgaggtgagcaggtcgaagtcggagtgggccgggtcgaaatcgatgagggcaccgttcagatagattacggcgtccaccggcagtttttcggcgaactggaggccggtactcaccggccgcgcggtggcgatggcgaatttcagtccggcatcgtgcgcgcggttgatggtgtcgatgctgcgctgggtgatgaaccggtcctcgaatacctcggcgtcgtgcagcaacgtaccgtcgaggtcggcgaccagcagtcggggttgtttcggtgtgatggcgtcgagaatcacagcagcccctcgcagtgttcacgcacgagttcggcggaatggtgcaatttggcctgctcgtcctcgctcagatcgagttcgacgatctcgttggcaccattggcgcgcagttcagtggggacgccgaggaacacgtcatgttcgccgtattcgccgttcagcagggtggagacgggtacgatgcggcgttcgtcccacaggatggtctgcacgatgccggccacggtggaggcgatgccgaagttggtaccgcccttggccgcgacgatctcatcgccacgggtgcgggtcttctcttcgatttcggtggtggacacggaggcgaaacggtcttggttgtcggccaggaagcgggcgaatggcttgccgccgagcgagacggtggaccatgcggtgaactgggagtcgccgtgctcgcccatcacgaagccgcccacgttacgcgggtcgaggccggtctcttcgccgatgatggtcttgagacgcgaggtgtcgagcgcggtgccggtgcccagcacctgggtgcgcggcaggccggaacgtttccaggcataccaggccatcacatcgaccgggttggagaccatgacgatcacgccgtcgaagccggaggccatgacgttgtcgaccacttcgcccacaaggcccacggtgaagccgagttcggccatgcggttggagttggccggcggcttgcggcccacggtgatgacgacgatgtccgcgtccttgcagtcggcgtagtcgccggcgcgcaccttgacgtggcggtcctggaattcgctgccgtcatcgaggtcgcgggcctcccccagggctttggcggcggagcggtcgatgagcacgagctcattgcacaggccgtgcgtgacgatgccgaaggcggcggtggcaccgacctggccagtgccgacgataacgactttgttgcggttcatagtgaccatggtgatgtcctttcgtaatactcgatagaacgcatacgacccatgaccgacggtaacggtcatgggtcgcgagcgacaagtctatatggcgtgcaagccgatcagccgaggttgaacttggtcatcatgtcgaggccgatgatcaatgccacccacaccagagcgatgataacggtccaacggttcaggttcttttcggcgacaccggaagtaccggcgttctgggtcagaccgccgccgaacatgtcggacaaaccgccgcccttgcccttgtgcataaggatgagcagggtcagcacgaagctgagcagcacgacgatgacttgcagcgtgatcttaagagcggtcacagggtacctccggattgattgaactgttgaccagcatagcgcacacacgggaaaaccgtggtattagttccgtgatttcgtggatttcagtgccagtcgagcgattttggcgagttcctcaacatccagggccgcccctccgatcaggaagccgtcgacgtcgggttgggaaatgagttccgccgcgtttttcgaggtgactgatccgccgtacaggatacgtacgctatcggataccttcgtgccaaaagtggtcttcaaatcgttgcggatggcgtttgcggcatcctgggcggattgcggagtggccaccatgccggtgccaatggcccagacaggttcgtaggccacgatgagttcggcggcttgttcttcgttgagatcgcgggtgacgtctcgtacctggcccacggcgaaatcgagttcaatgccttgacgtcgttcctcgaagctttcgccgacgcacaaaatcggctgcatgccggcggcaagcacggcacgtacctgatcgacgatattggcgtcatcttcaggatggtatttgcggcgttcggagtggccgacgatgacgtacgagcagccgagatgggcgatcatgtccgcggacacatcgccggtgaaggcaccttgggtggtcacggaaacggattgtgcgccgtaggcgacatggagcttgtcggcttcgaccagcacctgtacgctgcgcaatgacgtgaacgaggggaaaagcgcgacttcgcagcgtttgaagtcaaagcgagcgtcacgcaacagccataccagcttctgcacgaagtaagtggcttcaagatggtcgaaattcatcttccagttgccggccaccaacggaatgcgtttggacgccatatgtttcccctctaaaaaatacgtagctcccctcaaggaggggagctagaaaatggattactcaagcaccttcagaccagggagctccttgccttcgaggaactcgagggaagcgccgccaccggtggagatgtgggagaagccgtcctccgggaagccgaggttacgcacggcggaggcggagtcgccgccaccgacgatggtgaacgcaccggctgcggtggcgtcgaccagaccctgggccacggccttggtgccggaggcgaactcaggaacctcgaacacgcccatcgggccgttccacacgacggtcttggagtcgacgatcttgtcgtggaagagcttctgggactccgggccaatgtccagacccatcttgtcggccgggatggcgtcggcggcaacgacttccggagcaaccggggtgtcaccggccgggaagccggcgttcacggcgacgtcggtcggcagcacgagctcaacgccgttcttctcggcggtctcgatgtagcccttgaccttctcaagctggtcctcttcaagcagggaggtgccgacctcgtagcccttggccttgaggaaggtgaacaccatgccgccgccgatgaccagacggttggccttgtcgagcaggttctcgatgacgccgagcttgtcggagaccttggaaccgccgagcaccacggtgaacggacgctccgggttctcggtggccttggacagggccttgacttccttctcgaccagcaggcctgcggcggccggcagatcggcggcaacgtcgtagttggagccctgggcgcggtggaccacgccgaagccatcggaaacgaaggcctcgccgagggcggcgatcttcttggcgtaagtggcgcgttcgtcggcgtccttggaggtctcctccgggttgaagcgaacgttctcaagcagcacaacatcgccatcgttcatggcggcgaccttggcctgagcgtcctcgccgtaggtgtccttggccagcggcacgttggtgccgagcagctcgccgaggcgggcggcaaccggggccaggctcagctcagggacgaccttgcccttcgggcggccgaggtgggccatgaggatgaccttggcgccttcttcgcgcagggtcttgatggtcggcagagcagccttgattcgaccgtcatcggtgatggtggtgccgtccagcggaacattgaaatcagcgcgaaccagaacgcgcttgcccttgagatctccaaggtccttgagtgtcttcatgaatatcctttccttgacgaatcgcacgtcaaagtggccaattttgccactttgcatattacaggcattccggaacaaaacaccgcattcgcctactgactgaatgcggtgtttcgttacgtcgttgtcgggttacttgccttcggctgcgcgagccttctccgttttctcggcaagctgaagcagtcggcgaattcggccggcaatcgcatccttggtgatttgcggttcggcgatcttgccaagctcctcgaggctcttgtccacgtgatcgatgcgcagctggccggcctgacggaggttgtccggaatgttatcgccgagcacttcgaaggcatgctgcactttttcgctggcttcggcggcagccttggcggaacggcgcatattggcgtcatcgaagttggccagacggttggccttgccgcgggcctcgccgtcggagcgcttgccggtccattcgcgggccgaacgggtggcgcccatgagcttgagcatgcgttcgatggcgtcgggatccttgagggtcacgcgctcggagctgcgcagcgtgcgatgcttggcctggatgccgagacgacgggccacgccacacagggccatggcggcctcttccgtggggcaagcgatttccaggaagctggccttaccgggatcggataggaagccacgggccatgaaggcgccgcgccatgctgctttgatttgggcgatggatccgttgaccacttcagacggcagtccacggacctgctgcttgcggcggtcgaccagtccggtctgcaaagccaaggccactacgttgcgggtgatgagcaccacgtaggtctcgacagggccgttcggggtctgacgggtgaggtggttgacctcggcttcatgcccgaacgtgttcctcaacgtgttcttcagccattctgcaacgtcaagcgaggtgaatacggcttggataacgtatgtattctgtaccggtcgaagaccgccgccaaaacggatcatggccgcagcttgggccttgatcgcggctggtgaatcgccttcaaaggccgccaactcgcttttgacatcgtccagaagagccaagatctacctcctacagtcccgttcttctcaatgcttcaggcgcttcgtgccgttatctgctgtcatacggtcggaagccatcggctttctgtgatacctaatctggtggacaagcgaacccgtttgatacgtattatgggctttgctttctcgcagtgtggtcaccgaacgcttgcccgatgaccgctcgacgcctgcttacgatgagtgacgcttatgctgttctctcgcggaaacggttacgttgagcccatgtgcgcgtaagcggcgagccagctcttcgctcatcgccaccgaccggtgctgaccaccggtgcagccgacggcgatggttacatagtgcttgtcttcctgggcgtatccttccaacgcaatctcgatagctttctcataagcgtcgagaaattccttggctcccttgctggaaagcacgtagtcggcgaccggcttgtcgtgcccggtaagctcgcgcaggttgggaacccagaacgggttgggcagaaaacgcacatcggccacgaaatcggcgtcgatgggcatgccgtatttgaagccgaagctgaagatgtgtaccgccacggtggtggggccggaaccgagcatcgtctcgtagagtttggtggacagctggtggatgctcagggagctggtgtcaatgacccagtcggctcgctccttgaggtcttccagcaggtgacgttcctcaaggatgccgtcgatcagtcggttgccgtgctgcagcgggtgcgggcggcgcacggattcatagcgcttgatgagcacttcgttgctggcgtcgaggaacagaatatgggttttgacgccgagatcatccagatggccgagcacggcggccagctcgtcgaaatagctggagcgcacgtcgatgacggcggcaagcttgtggacgcccgaccccgatccggaaccggaggtggtcatcatgtcgacaagcgggataagcagtttgggaggcaggttgtcgaccacataccatcccatgtcttccacgcagtcagcggcatgagagcggcctgcgccggacataccggtgatgagcagcacctcgaaggcatcaagcggggtcggctggttgtccggagtcgatgtggatgtcgcggaattcgccggcgcattcgtggcggccgcctcgccggtatcgcggattgttgtctgttgactcattacaacgcctcctcaagagctttgcgcatcgcgatctccagctggtcgtcttcggtggtggtgtcctgcagacgctggtcggcatcgctgggcgggtcgtcatcccagataccggtcatcagcaatacctgtacgagagcttggtacagcagcatttcttcgccgccgatggcgtgaccgccatgagcgcgccaggcttccatgagcttggtggggcgtggatcgtagaccacgtccagcagcagtccggagaatggctcggttccggcattggtgagggcatccgcgacgttgtcggccgcatgtccgggaatcgtgttgatgacataggtggcgttgcgggctgcctcgagcagggcctgatcgtcgcctaattcgatttcgctgtacgggttatgcacgttgacgaacttttcggccactggtttaagcccggtgtttttcccagggtggcgggcggcgacgatgatatggccgatttcgggcatcatgcagcatgcggccaacgccgaagtggcggtgttgccattgccgaggatcagcgcggcgccgcttctcgatgcggtgtggtgttcgccgagttcgcgattggcgtggtcgaaggcgagttggatgccgatgacatcggtgttgtacagcttgatgcccggcttgccgttcggccaagcgggatcatcggtagccacgctccagtcgaataccgcggtattcgccaccttcagttccttggcccacagattttccggaacaccgtacggttggatggcctttttcaacggcatggtcaggctcaggccagcccacgtcgagtcgaggcctttgaggaaagcgtcgaggtcatcctctcccacttcgtgcttgtcgtacagccaatcgtcgagtttcagcgaacggtaggccgcgttgtggagcacgggtgacaatgagtgcgcgacgggtttgccgagtacagcgcaacgatgattggccatatcccctccttgatgtctgttcccatgctagccgacactttgcttcgaatatgtcaaccacaggccccgcaaccgaaaattcactctgggctgctggaccgggccggctcactgctcgtgcagcgcgttgtacagcgcttcggctttggcgtggccgatgcctttgaccttctcgaagtcctcgacactggcttcgcgcatggctttgaccgagccgaagtggttgagcagccgcttctggtagcttttgccgatgcctggaatctcgtcgagcgcgctgcgcagggcgcctttgcgccgctgttggcggtggtaggtgatggcgaagcggtgggattcgtcgcgtacacgctgcagcagatacatgccttcggactggcgtttgaggatgatcggatagtcgtcgtccggcacccacacctcttccaagcgtttggccagtccgcagacggccacgtcgttcacgccacagtcctcgagcgccttggcggcggccatgacctgcggcttgccgccgtcgaccaccaccaggttcggcttgtaggcaaagtgatgccggtttgtgttctgctggacgatgtcgggcgaggactcccgtgtatcgttctgcactccgtccggcaccgcgtgccccttgccactgatgtcggaaccgttctcaccattgtcgttaccgttcgcagcgattgtctccgccgccacggcagtggtcatcttgccggcagccgaggccgcgcgctgttccgcgtcgatgctttcgccggagtcgccggcgatgttgccgtgcctgaagcggcgggtgagcgtctcgtaaagcgcggacagatcatccaccgcgcctttgccgtccttgcctcggacggcgaagcgtcggtattcggatttcttggcgatcgcgtcttcgaacaccaccatggaggccacttggaaggcaccgcccacagtgttcgaaatgtcgtagcattcgatgcgcagcggggcttgcgcgagtcccaatgccttggccacatcgttcatggcctgggtgcgtgcgcccatgtcggagatgcggctcatcttgctgcgttgcagtgcttggctggcgttctcgttggcgcggtccataagctgcttcttgtcgcctcgcgaggccacgcggatggtcaccgcgcccccgcgcagattggtcagccagccttcgagttcctcgcggcgggccggttcgacgggcacgatgatttcgcgcggtaccggtgcgatgggtgccagcaggtccgcgcgtccggtggtctcctgacgggtgttgcgttctcgggtggcctgggcgcgtgccacagcgtccgtggccgtgatggtctgtgtggagccgatggcctcgcgattggtggagatggtcgcggccgactgggggtgattgtccccggcggcgtccgaatacacctgcaccagaaggtcggccatcaagtcggcgtcatcgatgtcctcaactcgttcgacgctccagttgcgttcgccgcgaatagagccggcgcgcacataaaaggcgtgcaccgaggcttcgagctcgtcgctggcgaagccgaacacgtccgcgtccacatcctggtcgaagacgacggcgttctgttgcaccacggtttccagcatttggatctggtcgcgcagtcgggcggctttctcgaattcgagttcggcgctggcctctttcatgtcgcgggtcaactgggcgatgtatggccgtccgagtcgtccggtcatcacgccgaccagctgttcgcacagccgccggtgttcgtccgcttcgatacggttcacgcagggtgcggagcatttgccgatggaggcgaacaggcatggccgtccggtcagttgcgccttgtggaatacgttggtggtgcaggtgcgtaccgggaacgtgcgcagcaaccggtcaagactgtgccgcaattcccacactttggcataggggccgaaataccgggtatcccgccgtttgcgcgaccgcgtgacccacacgcgcggaattcgctcccccgtgctgaccgcgagatacggataggtcttgtcgtcgcggaactgcacgttgaaccgtgggtcgaattccttgatccacgtgtattccaacgtcagtgattccagttcggtggcgacaaccgtccactccagactgcgtgcggtcagcaccatggtctgcgtgcgcggatgcagcagatacagcggctggaaataattggtgagcctgttgcgcaggttcttcgccttgcccacataaatgacgcgcccttccccgtcgcgccatttgtacacaccgggtttggcggggatatccgaggtcttgggtcggaacaggtcgcgagaatcccccagcaaaggtgccccattcgcattcaccttcgccgtcgtttccccggcgcccacagctacgctttccggcattaacgccgccgcggtcttccgccactcatccggactatgccgctcaatatcgttcgtcataatcctcctcgctattaagcaaaaccaatcatcagggattgggtgggttggtatgtgctgctggaccgtaaagacttggcctgagcggcccggagcgtgtccagcaacataccaccccaacccacccgaggtcagctgcaatggaaggctaaagcatggatttcaggaacttgccggtccatgaggattcgcattcggcaacctgttcgggcgtgccctgcgtgacgatggtgccgcctccgtcgccaccctccggaccgagatcgatcagccagtcggcctccttgatcacatccagattatgttcgatgacgatgaccgtattgcccttgtccaccagggactgcagcaccttgagcagcttgttcacgtcttcgaagtgcaggccagtggtcggctcgtcgaggatgtacacggttttgccgtcggatcggcgctgcagctcggtggcaagcttgacgcgctgcgattcgccgccggacagggtgggtgcgggctggccgagtcggatgtagccgaggccgacgtccacgagggtcttcaggtatcgggagatgccggtgtacgccttgaagaagtcggcggcctcctcgatgggcatgttgaggatgtcggccacggtcttgccgttgtacgtgacttcaagggtctcgcggttgtatcgtttgccgtggcagacctcgcagtccacgtagacgtcgggcaggaagttcatttcgatcttcagcgtgccgtcgccgtggcaggcctcgcatcggccgcctttgacgttgaaactgaagcggccggggccgtagccgcgcacctgggcttcgggagtcttggcgaaaagggtgcggatcttgtcccacacaccggtgtaggtggcggggttggatctcggcgtgcggccgatcgggttctggtcgacgtggatcaccttgcgcacctggtccacgccttccacgcgcctgtggcggccgggtacgatgcgtgcaccgttgagcttgtcggcgagcaccgggtagaggatcgtgttgaccagcgaggatttgccggagccggagacgccggtgaccacggtgagcacgccgagcgggaagctcacgtcgatgttcttgaggttgttctcgcgggcacccacgactttgagcacctgggtcttgtggatcttgcggcgcttggagggtacggcgatctctcgccggtgggcgatgtagtcgccggtgatggagcgcttggcttcgatgaggtgcttggcggggccggagtagatgacttcgccgccgtgttcgccggcgccggggccgatgtcgaccacccagtcggcgcggcgtatcgtgtcctcgtcgtgttcgacgacgatcagcgtgttgccgagatcgcgcaggtggtgcagggtttcgatgaggcgttcgttgtcgcgctggtgcaggccgatggacggctcgtcgagcacgtacatgacgccgaccaggccggagccgatctgcgtggcgagtcggatgcgctgcgcttctccgccggacagggtggcggccgcgcgcgagagggtcaggtagtcgaggccgacgtcgttcaggaagccgagtcgggccttgatctccttgagcacttcgccggcgatcagctgtgccgagccttcgagtttcaggccgttgatccaggcgagttcgcgtacgacgggcatgtcacatacgtcgaagatggatttgccgtccacggtgacagagagcacctcgggcttcagacgacgtccgtggcagacctggcagggcacttcgcgcatgtacgactcgtagtattcgcgcatggactgcgaatcggtttcgtcgtggcgtcgcatgagcgtgcggatcacgccttcgaagccggtggagtattcacgcaggcgtccccagcgattgcggtaggagacgttgaccttgaagtcgtggccgtagaggatgtcgtgcttgacgtcgtccggcaggtccttccaaggggtcttcatggagaagcccatttccttggccaagccttcgaggatgtggccgtagtactgggaggtcatcttggtgccgctccacggttcgatgacgccgtcggccagtgacttgtccgggtcggagatgatgaggtccgggtcgatttccagtttgaagccgagaccggtgcaggcggggcaggcaccgtagggggcgttgaaggagaaggtgcgcggctcgacctcatcgagttcgagcgtgtgcccgttcgggcagctgcggtgttcggagaacggctggcggcgggccgggctgccttcctcctcgtccacgaagtcgatgacgatgctgccgttggcgagcttgagggcggtttccaccgaatcagtcaaacgttggcggataccgtccttgaccacgagtcggtcgaccacgacctcgatggtgtgcttcttctgcttggtgagtttgatgtcgtcggacagctgtgtcatctcgccgtcgatgagcgcgcgggcgtagccgtcggagcgcagcagctcgatcatgtccacgaactcgcccttgcggcccttgaccacgggcgagagaatctggaatcgagtgcgctccgggtagccgagcagcgtgtcgacgatctgctgcggggtctgggaggcgacgggctcgccgcattcggggcagtgcgggatgccggtgcgggcgaagaggagtcgcaggtaatcgtagatttcggtgatggtgccgacggtcgaacgcgggttgcggttggtggtcttctgatcgatggagacggccgggctcaggccctcgatgaagtcaacatcgggcttgtccatctgacccaggaactggcgggcgtaggcggacagggattcgacgtagcgtcgctggccttcggcgaacagggtgtcaaatgcgagcgaggatttgccggaaccggacaggccggtgaacacgaccatacggttgcgtggaatcgccaggtcgacattcttgaggttgtgttcgcgcgcaccctgaatcgtgatcttgagatcgttcgggatgtgcgagatatcagctaccagcgaaccatcgtgttcgatcagcggcgcctttttgatttcccggctcaggaaggagtcgctggtcatcaccttttcgacgatgacctcaccgttcttgcccttgctggttttcgcgccctttgcgcttgttgcgcgccttgcgccagtccgcgttgccgccacagccacaccccaccttccatctcaccgttcccgcgcgcacggttatgcgcacgccaaatctgtcccaaggatacccgaacacacgaccaaattcgaacgcttgttcgatggcgtgtcaggccggaaaaccgaaccatagtatgcaaaattccggaccatcagtggaccgaaacgcaagagccggcccacgcgacatcaaccgtgcgcccagccccagtcaagctctatcccgaagacctctcctcctctgatttgccccggttcacatgtcaatcgtttgacgtccgcatcggggcaaaacccgctgtcccggttcgtgattttggcctgttttcgagaaccaggacattccagtttccacgaaccacataaaacgcgaacggaaacggcggaataaagccaatctcagaatcgccatgttgtcccgattctcgcatcaaacgattgacgcccataccggggcaacacaacatgtcccggttcgcgaaaaacacccgaaatcacaaaccgggacaacggattctgccccggtacgtccgtcaaacgattgatgttcgaaccgggacaaaatcttcaatggactccacggggatgccaagcttgcgtaattcgtcaactgcatcacgcatgggaatgcgttcctgttcgatacgccgataagcgatggttttgtcagcacacagtcgttcataaagacgtcgctccgccgattgaaggccgggcgtcggcttaggctcccgcatagcaatcttcgcgctgcgttcagtacgatcggtaccaaaatcgtcgtggcccggatcgagataacggaaccgcagttcggtcggccgttttgacagacccaacgtttcgacaccgagcagtcggcaaatggccttacgacgattggtttttgactcattcagccatttgccgctgaatcctgtcagtggaatctgtgcgacggtgcgcttcgcgatattccgccgccagcgtacgaccaaccacacgcatggctattgattcgtcaggaacgacgactttggagatcaactcgacagaggtgcctatggtgcgatgcttggttatgatttcgcaaccattcttgcttgcccattgccgtatctcattgttgttgtcatgcactgcaatcgcattggtttccaaaaatgcttggtccggcaatcccaccggcacgggaaatggccatgccggttcgatgtcgtacatatgtgaacgcatatgtttcttcacgcatgtggtgatcgcagcgatgtctttcatgccggccatagttcccatcacctgctttcgaacatcgtcgagtcgaaccgaatcgtcttaataccggcgacgccgggaatgctcattcggcaaccccgtcatccttcaatatatccgacgatgattcatcgtccatgtcattctgatgcagcacggcctcgcacagggaggtgaggccggtgtcggggtccttgtaggtcacgtaggccttggtggagacctcgaggatttcaccggtcttgctttccggggcggagacgatgacctggaatccgaggcgcggcagcaccgtgagggcgcgctgcgtgtaacggccgtcggccttgatgagcgcctcgtcaaggaacagcgtggtgtacgagggctcgctggtcaggccgccgccgagcaggtagatgagcgccgcgccgtatacgaacgaggtgagctcctgcaaggcgccgcccgaacggccgccggtggaggtgatgcgttcgtccggaccgtcggcatgatgcacgatggcgtagaaggacgagcggcagcgcgggtcgaggttgcgggcgccgtagcttttcacgccgttcgtgtccttgacctgcgcgagttcggcgcgcagcagcccgaccatcggcgcgcaggccgcgaaagccttgcgcgaggcgtcggaatcgttgacgtcggcggatttccaatcgttcagggtgccgatgacgcggatgagctgcgcccagaaggtgcgctcgggacggcgcacgtccgcatgcagggacaggctgccgtgcttggggccgaactgttggcccttgagcatggcgttgatgcggtcaagctggtcgtggatgtcgctggcatccgtgtcgatggcgcgtttgatggtcaggaagctcctgagcagctgttcgaggcagcgccggtattcggcgtcggtggcggcaaccacggccagctgggtgaggctggcgagttcgtcgagatagtaccggtagtcctccacgctggcggtcagcgaatcatcgtcggccgcgtagagcgcgatgtaggtgctcattttcgattcgacgccggtgcgtgcggcgtcggcctggccgttcagcaggttgatgcgggaggccatgtccttgccgatgccggcgatggtgcgtccggggaagctctcccccggcgcctgcgttcctgccgcgcccgcgccgatgatcatgtgcgcgcgcatggccgcgtccgccagcccggcgaatcggttgtcgtaggattcggcgagcgccgccgtgacttcgtccggcagcgggccggaagcggcgtcatcgtcattgtcggcggtggcaccggcggcgtccgtcgtgccggtgtcggcatggtcgcgcagccagatgagcgccgcttcgacggcgctgccggcgcgggccgcggcctggtcggattcgatgcgctggcgttccacacggtcgagttcggcgttcagttcgtcgcgctgtttggcgagttcggcgagtttgggatcgtttttgatggatgcgatggcgtcctgcgtgtccgtgatggtccgttgcgcgccggcgatgtcgatgcgttcccatgacgtgtaggcgagctggttggccagttcgagttcgcggtggaggttatcggactgtgttttggcggccgtgtagtcggtgtcggcttggctgagcgcgttgcgggcggcgtcgacctgcgctgcgagcgcgttgaggtaggtttcgttgacgaatccgatgacctgggcgcggtctttggtgccgtgctggccgcgtgcgccggatttgatctgaccgtcggcctgcacctgacggttggtgcggtcggtgtcgtcgatggcggtgacgcatagggcgtcgaatcgttcgtcctgggtctgcgagcgcagccagtcggcgaagggcgagtcgtcgcggtagcgcagtttgccggacagccagtcgccgtcctgttctccggtgagtatgttcgcgtgcgcgccggtgtcgtcgtagtggcgtgcggtgtccacgaactgccaggtgcgtcggggcatggtgcgcgggtcgatggtgctgactttggcggcgaagccctgttcgtggcgcttgtcgacgaggatggtctgggcgatgggcgcgtaggcgacgttcatggcgagacgccagtcttcctcgtgttcgttcacgtccatgagttcggccacgtacggcagttcggcgggggcgagtccggtggcgcggcagagcatggcgcgggtttcgtccatctgctgggagatgcgggtgcgctgggagcgttgccggtcgaagtcgcgttgcagtcgttcgaggtcgccgcgtgcgccggcccgtgcgttgatggcggcggtgagggcttcctcgcattcgccgtctcgtttgttgtattcgcgtttgaagttcacggcgttgatgcggcgttcgttccaggactgttcgttgccgggcagtgtctcgccgatggatgcgaacgtttgttcgattcgtgttcggttggcttgcatgtcttcgagggtgcggcgggcctggtcgagttcgagttcgagtcgggtcaggttgccgccgtccagaccctgcatctggcctcggatcatgtcgaggcgggtgcgcaggtcttcggttcggcggcgcagcagcttggcttccgcctcgctgttctgttgttcggcgcggtcggcgggcagttggacggcgacttcgccacgcatgcgggccaatgcccagtcgcgcagcacggccggcaccgtgccgtcgacggccggcttgaccggttcgaaggcgcgggccttgccgcgtgcggcggcgtattcgccgtaggcctgttggatgccgcgcagcgtgtccatgcggcgggtcttctcgtccatggcgtggaagttctcgtcgtaacgttcgtagtcctcgaccgtggtgcgggccaggtccagggcttcgggcacgccgagcacgccttgtttgaagatgtcgtcgagccgggagggcgcgtcggcggactggatcttgtgcagcagtcggcaggcggcctcgctcaggcccattgcgctccagatgtgtgtgtggaacgcttcggcgctggggaatgtgaggcagtcggggtaggtggctttgagctgggccggtgtgaacggggcgtcacggtattggtccatgcgcctggggtccacgggcttgccccagaccacgtactggcggcgcacgtcgccgcggccgtcgccgggcatcaggtagaggaatttggcgcaggaaagcacctggccggtggtctggttgcgataggtgtccacgatggcgccccacacgggttgcggcgcgccgttctcgtcgcgaccgcgcaggtagagcggctcgtcgccggtttcggtgctgcccacgccgaccatgccgcgcaggtaggtgtagtcgctgcgttcggagcggccggagttcgaggccttgttgaacggcgtgccggtcgggtacagcagggagatctgcgcgtcgaccagcgtggatttgccggattcgctggcgccggcgagcagggtcaccggcagcttgtggtccgtggaggggcggaattcgtggtagccctcataggagccccagttgatgagtcggcgggattccagcatccaccggtccgcgatcatctgcacgtctgtcgcctgcatcattcggctcccttctcgtcgtcatcgtcatcttccgtgtcgccgtcgccgtgttccgcgacgtcgagccaggtgtcggccagttcgcggtcgagcaccacgggcacgagcggcgtgatctggtacatggcttcgtcgtccaggcgcgccaaatacccgtaggtgatcatcgcggagacgatggcgccgatctgctttgccacgccttcctcgtcattgcgggctgccaggtaaccggcgccggtggcgagcgcggcgcggatctcctcaaagctgacgagccagtcggcggggtcggcgtgcacgttctcgtattcgaggacgcggatgcgcaggaaggcgagcagcgcggcctcctcgcgtttgaggctgacacgggttttgagcgagcgcagggtcacgtcgtcgccggccacgggcgtggcgtacatgatgcggtagcgttcgttgatcaccaagtcgagcaggtcgttgttcagggagcgtacgacgacgtcgcggttgtcgagcacggtgtcgtaggtgggcccgctgatatagcggtcgcgtttgagggcgatggcggccatgcgtgcctcggccggcatgtcgccggtgtcgccttcgaacagggcgtacgggttggcgttgtccatgtgctcctcgtgttcctcggccacggtcatccttcctccacaatgatgttcagctcgtccatgtcggccagcaccggtctagtgatccagtgccggggctcgccgtcgatcgatacgcaatgccaagtcgcggtatcgccgcgctgcgccggggccggctcggtggcgatgtcgctgtcgatgccgacgccgtcagtggacggctcgtcggcgatggcgctgccgcttacggctcccagcccgcccaggaagccgacgatctcgctttcgcggcgttcgctttcgggcagccggttgaagctggcggcgatgtccacgagggttgcgttggacctgtcatcggacctgtcaacggtcaccgggttgcgccggatgaggctgaccatgcgcaggagtcgggggccgccgctgttgaccatatcccgcagatcggccaccggagtcgcctgcggggcttcggcggcgaggtcgctcaggccgggtgcggtggcgcgggtcatggatttggccgggcgcatcggcaatggcgcgaacagcgcgtccgcggtggccgtgtcgtacgggcgcgaggcgtctcccatatgggttttcgcatccgcgttgaggcgcgcgtacagtcggttcaagcgggtgagcatcgtacggtagcgagtgtcggtttgctggcgcacgagccggctgatcgcctcgtcggagacgcgcatctggcggcgcacggcttcgatgccgtcgtagatgcgggccagttcgtcgcggatctggccgagcagcacgccggattcgccggccagatacggggttttggcgatggcgcgcagggcttcgtcgatttgctggcggccctcgtcggtgatgatcacctggaaggcgtcctcgaagcggcggccgctgtccgattcgctgaacgagcggcggtattcgtcgtggtagcgggtcaggttctcgtccacgctgatgtcgccggtctgcatgcgccggcgcaaggcgtcgccgttgtcccgctcgtcgagcacgagttcgcgcaggtcgatgggtacgccgcgcagcgtgttgtggatcacggcgatcacgtcctccacttgggcttcgctcagcgtggcgtgctgcttgccctgttggatgcgtttgatctcgtgcttgcgttccttgatttcacggttgaggagtttgatgcgctcgccggggtcggcggtcagctgcatgcgcgcgtgttcgatttccatgatgatgctgttggcctgcgcgccggacagggcgcgtgattcgtcttcgagcctgctcagcgcctcgatggcgcggtgggcgcgggccgtcaaacggtagaggaatcggtgtgtggccgcatcatgcgagttggcgagccaggcgtagtcgccttcgccttcacgggtcaggtcggcgaggatctgatgggcggcctcggcgaaggtctggtcctcgcgcggcgcatattcgccggcgtcggccagagcgttcagactttgcgcgaaccgctcctccacggtctcgcgcggcagctcgccggtgagcgggtcgaacgtggaacgcagcagcgacacgtacagcatcgcgttctggcgcaacagcaaccgcaggacgcccgtctcatacaccggtcgcagccgttccagctcccgcatcacatcggccacagcatgcctccctctgtcgtgaccgcaccatactagccgatagccgcgaaccacaccccgcccgcgccacgcgtgctctctcccgcccagcaccaatatgtcacttttactgcacatgtcatcatgtgcagtaaaagtgacattgaggctgcgcactcatggtgatcgttcactccagccgtcgcccctattcgccgcgcagggcctcggtcggggtgagacgggcggcgcgggaggccgggtagaggccggcgaggatgccgaccaggatggcggcggcccaggcgagcggcagggaggtccagtcgagggcgatcggctggccggcactggcggcgacgccgatggcagcgccggcgccgagcgcgatgccggcgaatccgccgagtgtggacaggagggccgcttcggtgacgaattgcatgcggatgttgccgggcgtggcgccgagcgcgcgtctcaggccgatttcgccgcgacgttccatcacggtgacaatcatcatgttggcgatgctcatgccgcccacggccagcgcgatcacgccgatcatcaggccgagcgtggtcagtgaatcgttggtggtgttgcgcgctttggataggtcggcggacgcggtgacggacacgttgccgccggccgggttggcggcgtgggcgagcgtgcggcgggtgccttcggcgtcgccgggcgtggtgcgcacgtagatggcgctgatccgtccgatggtgtcggcctggtcggggtaccggccgagcgcccattgctcgccgatgatgacggcggcgttcaggttttcagcctgcggcgtggggttcaggatgccgatgacgccgtaccatgcgttgtcgatgaggatgcggtcgccgggctcgttgacgccgagccggtaggcggcgtccgagccgagcacggcgacgggcaggtgctcgttgttcgcgtcgatgccatgaccttgggcgaggcttgctccgacggcgtcgagtgcgccgggccgcatgatggcgagggccagcgcgttgccgttggttttggggcacagcccgttcttgaagatctgcaccttctctggcgcggtgtcgaagacaccgacccgttcgacctgcggctgacgggcgatggttgtgggcgcgtaatccggcagcggaaccttctgctgggcggcgtccacgccgggggcgaccaccgacagattcgcgccaagcgcgtcgagttgggcgaggagcgctgcctggttcgatgcggcgatgccggacaacgccacatatgcggccacgccaagcgcgatgcccagcgatgccagcaccgtgcgggacgcccgcccggcggccccaacccaagccgcatgcatcaaatccgcaattcgcgtgcgtattggtttactcataggagtacgttcactcatatctctcccccagtcagcctttggctgacagcccctcgtcagagggggcttgattcggcttgtcgagttcggtgactaggccgtcttggatgtgcagacgcctggggaaacgtgcggcgatggtctggtcgtgggtgaccatgaccaggcttgcgccggaatcggccgccgtgagcagcaggtcgacgatggtgtggccggtttcgcagtccagcgcgccggtcggctcgtcggcgaagatgatgtccggccgtttggccagggcgcgggcgatggccacacgctgctgttcgccgcccgacaactgggccggccggtgatgcaggcggttccccaatccgacctgttccaacgcctcggcggcccgttgccgacgttcgccgcgcggcagggttgtgtattgcaggcctgtcatcacgttctccaaggcggatacggtggcgatcagatggaactgctggaacacgaagccgatgcgcgcggcccgcaggacgctgcgctgccgctcacccatcgcattcacatccccgccgtcgtatcgcaatattcccgaagtcggcatgtccagcgtgcccagtaacgacagcagcgtgcttttgcccgagccggacggcccgacgatggccacgagctcgctgcgatcgatggccagtgacgtatcatgcaatatctccagcacgctcccgtccttgcctggaaacgccttcgtcacatgctccaacgtcagcaatgccccatgctctgggccagcgggggcaaactcgatgtcgttcatgagaccaccaccttgtctcccgccttgaggccgtcggacttggtgatttgcacttgcgcgtcggacaccagcccgattgacaccggcacacgcaccaacttgccgccgcgtaccgcttcgaccgcatacgcgctgccggcgctggcgatcagtgcggtcaccggcacgatcagcgcctccccggtcgaggcatcggcgttcgggatgatgacttgcacggccgtcggcccgaaagccgccacctgcgactggtccgggaagtcgatgcgcgccgatggctgtgtggcttgcccgttgtcgccggtcttctgcccgccctgatcgaccgaggcgagcgtcgtttcgacggtggtgttgtccggcagcacgacctgcgccttgtctccggctttgaacatcgccgcctgcgtggcggtcaacgtggcctgcgcatgcagggtgacgcccgtatagcttgccgggctgacctgtgattggccgagtttcgcgttcaccgccgtgatgcggattggtgcggccgcggccagggccaccgtattcgggtcgaatgtgccggtgaccgcgtcgccggtcaggccgagcgagcgctgccattgccggatcgcctcgcgggtcagccagttgaaatgcggtccgacctcgccgccgtagaatccgagttcctgcaggttctgctccagttgcgtgacgtccgggccgtcggagacgccatcgccgatcgtccgccagaacgggcggtcgccgtggaacagcggcacgggcgcgccgtccatctcgtacacctgttcgccggtgttgatctgtttgccggccaccggcagttgggtgattgtgccggaagcggccgcgaaatcggaggcgtcatcgtattgcagactcgcgccgagccgggtctcggcgttgagcacgcccttggtcacctcctgcgtgcgcagcgtggacacatccacctgctgcgatcggccagtctgcccggtcgcggtgacgtgcccggccaacgtccacggcctcaccgccacgcacaccgcggccagtccgatcacggcgatcgccgcgataatcatcgtcacgattctgcggtgtttcccgaatctgcgcgcttccgtccgtgtcatgattgctcctttgtccgttatcggatggccgtctcattgctggggcgcggcttcggtggacgcgctgccggaggtgaattcggagaggactttgttgtagtcatagccgaattcctcggtggtgccagcgaaggcataggagatgttcgcgccatcggtcgggcattccttgaggaatcggcgcagttcggattcgcttacggtgccgggaatcgtgattgaggtgggcgtatcggcgtccgggtccttgacccagtcgaagcccttcttacgcgcggcctgggcgtaggcgagcgccgcctgcttgtcttccccggaatactggtgttgcggccccatgtccggaatgggctgggtgaagtcggggttcttggcctcgcagtcggcgtattcccgctgtttggattcgtagggtgagccggcgagcgccttggcgtccttgaacaccacccaggtgctgtcgtcttccatcgacgtgtaggcagcgttcgggtagagttgcgggccgtcgtcggatgcgctgaggctgttgccttgggaggcgaccggcttgccgtcggtgccgatcatgcgcagtgcgaccgcgtttttggtcggggcttgtttgcccgagccggagccggacgacacgccagcagccgtacgcgcgtcgaatcctttgccggtcaggcaggcggcgaatcgcttcgccgtggcgtcggtggtggtcgtcgcatcggaccgatcgtcggcacctgagcctgttccgactgccgccagcggtgacgagcaggcgcccagcatcgaagccagcgagagtgcggacgtaagcattgcgattcgccgtaccaggcgcgtatgagtagtggacattaccgtctccattccgtgagtcgattgtgacgacttccatccaatcgccctcaccgtggagcgtcggtaagcggacggattactttcgccttaccgtagaatcgggaaaatgttgggtgatgccattggttcgggaaggctcggaaggggacatgatgcggattctgatcgtcgaggacgaccgcgaactggccgccgcgttggacgacgcgctgcgctacgaggggtacgcgaccagtctggcaaccaccggcgtcgaagcgttgaagatccttgccggcacgaacgtggacatcatgctgctcgaccgtgatctgccggtattgtccggtgacgcggtgatggccaccgtcgccgcgaaccgcattcccgtggccgtaatcatgctgacggccgccgccgaggtcagcgaccgcgtgagcgggctggacctaggggccgacgattacctgaccaaaccgttcgcctatcccgaactgctggcccgtatccgcgccctgcaacggcgcagcgggaccagcaacgcgaccgcagccgtgctcacgcgcggcgacatcaccctcgattccacacgccggctcgtgttccgcgaccacgggcgcacgctcgtcaaactcacacccaaggagtacggcatattgctggagctcatgcgtgcggaaggcggatacgtgaccgcgcacgaactctacgatgcggtttgggatgagccgaccgccgccgacccgaccgacgtgatcaaaaccaccatctattcgctacggcgcaaactcgccgatcgcgaggccatcgtctcgacacgcggggaaggataccggctgcaatgaaggcgacgaacacggcgaaagcatcaggtcgtatacaggcgcttgccggcaaactgcggcccaaatcattccgcgccaaactgacgttggccatcagtctcgtgttcctcatcgccatgggatcggcgaccctcgtgcagaccattgtggtcaacagcatgttcacgtacgccacgacggtcaccgccaaaaaccctgagatgcaggtcgaaagccagcacagcggttccggcaccggcaaacgcccggattccgacccgcgaatgttttcccggggaagcggcacaggtctgaacgatatcactggaacatccagcgtcggcggcgatatgggcgacggtgactatcaggtggaatggggcaaggacgggtcgtataccatcaacaccccgtatggcgtctccgtgtggaaccaggacaacatcgccaccggattgcgcatcagcgcggccatcatcttcgtgttcttcgggatcaccagcattctgatcatctggctggtcacctcgcgcatgtcccggcaactgacctccatcagcgcgcaggcggcggcattggacccggccaaacttgatacgcgcatcgacgtgaatgggccgccatctcgccgtaggccccagttccggcgtgcgggcagacgcgggaccgaggattgggatcatagcacggacagccgcacggacggtcgagctgccggccaatcctccgaagtcacgcagctcggtgacgccatcaacggcatgctcgaccggattcaggccgcatccgaagcggagcggcggttcgtgtccaatgcctcgcacgagctgcgcacgccgattgccgcggtggagaccaatctggacgcgccgttggcccaggggcggttccccgaggatgtgcgaccgtcggtacagcgcgcactggatgccaatcgacgcggcgcgcaactggtgcaggcgctgctgaccttgtcccgtattcaaagcgagaccatcggcggcaagcaggcgggcgatgtgacacagatgagtcccgcatcaacggcacgcacatccacagatttgtacggatgcgtcggcaactcccttgcggatatcgacgatgccgccaccaagcgtcgcatcaccataaccgtgaacaaggccggcggcgacgcggacatgtttctcatcaccgccgacccggcgttgctggaactggcggtcggcaacctgctgcgcaatgccgtcgtgcacaacacggatgatgggtcgatcgacgtaaccgtcgtatcggatgaggatggaagcggaccccgtctgaccgtcacgaacaccacggatgagatgctgccggacgatctgaacgagctgacccaaccgttccatcgcggcgagaactcgcgtatcagcgccgtgcccggcgtggggctcggcctgtccatcgccagtgcggcatgcgaggcgatgggagccaggctggaactcggccaaccggccgaaggcgagttccgggtgagcattcggttttgatggaacactcaggctccccttcaaagaggggagctctattgtttcgcacgcaaaaatcacagacagactattgccttgcgggaaatcatcgttagattggcgagaggaatattgtcaatgcatacgaaacggaaaacatcgtgaccgcaccgaacacgcccgccgaaacctctgaccagctcaacaagcccgccaaatccggcaaactggaggtctccgacctcatcaccatcggcgtgtttgcggccctgtacttcgtgatggtgtgcatcgccacactggtgagcaccctgttcaccagcggcttcggctccatcttcctgcccgccggacgctcgatccgcgcgcgagactcttccttctgctggtggcgaacctcatgctgttcttccatgtagggctcgccacgcaaatcgtcatggtcgtgctgttcctgttgctcctgctggcggccgcccgatggcgaaccgcgttgaacttcggcgtgacctatgccgtactcaccgcgctgggaatgctcgaccccgatgccctgggactgccgtggctgcatgtggtctccgcgctggccgtgggcgtcacgatgatgctgccctgtttcatcaccgactcgcatggctcaacggcgtggccgaccggtacgtggtattcgacggcggacatatcgtgcaggattacgaggccgatgaattcctgtccctctcccccggctgcgtgaccgccatgggattgcgggcgtttgacttggaaccgtatcggcaccggattgcggccctggcttcaagcccggccgccgaagacagcccgttccgctggctgctggccatcaaccctctgccttcgcgcaaggcgttcgccgagggcgggctgctcagccacctgcatttccagtacgccaacgatctgcacacgctcgtcgccacggatgaggccaccggcgccgagaccttgcgcaatccgcgttggtacgcacaccatgtgctccaacgagggaaccaccgaggaccgttgcgccatcatccgtgcgttgcaccacttgcagtagatctggcaacatacggcggtatgacggctccccgctagtgaaacagcatcgcttcagtagccatgcgagtgcagatactcatcatcgaagccggaataatggccgatctcgtgcaacacggttttgcggatctgttggcgcagctcggtctgtgtcgagcatacgcgttcatgcggtcccttgaacagggtgatggcgtcccggcatcacgccgctgtagcccgtggttcgctttgtgatgggtatgccctcatacagtccgagcagctcaccgcacggattgctcattgtggccagttcgcgctcattgggctcgtccgcaacgacgatgccgacattctccagcacccgcgcaaaccgttcaggcaaatcatccaacacctgttcaatggcccgttcaaactcatcgtcactgatgtgcatactcaatccttcacctgttgcttggctcccacgataacagacatattccgggttccggcttcttgcgggtaccataacgttgcgcggaacgcttccaatcattcattaggtcgattcttcattcattaggtcatgaggctgcgatggtcggtgttggaatggcaccattccagtggtgattgtcagagctcaccgacctaatgaatgaagaatcgacctaatgaatgcgtccggtcatatctcattgtgaaaatgacccggtattgcggtattccgcaattgcacttccaacgattctgaagtattcatccagattctgcg

SEQ ID NO: 2066 - DNA, 5837 bp, Unknown
  R17_18m  MAG No. k141_57708
cagccgggataccgtggcctgcgagaagcctgatttctgtgcgatttccttcatcgtgaccatagttgagccttccacgcctcagtacgtaacaatacgcagtatttcagtaaataactttactacatagtgtaactcacgcccgctgtctatttagaagtgcaacgcccttgttcgttggttaattccagcagttcgtcggcgaatgcctcggggattgttcatatacgcggcccctaatgcaatggcctcaaccagcacgaatatgacgtgctggttgaggccattgagagaaactaccgaaaaccggtcagggcacaaatagctcacgaatctgggcggcggaaccgtaagacgcttgggcacccagaccggtagccgcatatgcagaaacgaacgaagccagctgagccgcttcacgcagctcaaagcctgaggccagtcctgccagcacggcacccatgaacgagtcgccgcaaccggtggtgtccacggcttcgaccagaaccggtgcgatgcgggtcaccgaagcaacagcacatgatgcatccagcaccatcgagccatcaccgccgagcgtcacaatcgcccggtcgaacccgagctcccgcatacgatcggccgcagccagccagtcgaatccggaccagtcgccgtcttcgggttcggcgataccgaacatctgcgccatctcatgctcgttgacgagcaggacatcggcaagctgcaccagctcgtccggcagcaccggcgtaaacggtgaattgttgagcagtaccggtacaccggcttcatgcccgatacgcgcagccgcggtaacggtctcgatcgggctttccaagcacaggccaagcacattcgccgaagtcaattcaccgcgcatcgcctcgatataatcaacactgacctgcgcattggagcccggagagtagacaatcgtgttctctccgttcgcgtccacggtgatgaccgtggtaccgctggcccccggtacatgacgcacgtgctgggtatccacgccggcttctcgcaatgcaccaagcaggaactcggcattggcatcggaacccaccgctccaaacatgtaaacagtggcgccaatacgtgccgcagcagcagcctggttgccggatttgccgccgggcaacacttgcagcgggccgccggtgacagtctcccccggtccaggcagacgctcggtgaccacggtgtaatcggcattcatcgaaccgacgacgcaaaccgtgccttggattcgatcaagtgccgcaagaatgtcagatgctgtcatagcatttcctttcgttgtcgttgacgaatagagccaacgatcactcgccgatctttttgcggatgacgagatagtagatcacgccgataagcggcacacaaccggcgaatacatgaggccacagcccgtatagaacacacaggcgaacagcgtgagcaccacgaagcccgagttcacggtgaaacctgcgccaataaagccaatggccatcgaattgctggtcttcgggtccgcccacggatcggcggtcacagttgcggtattggttgacatgcgaagtccttttactcggcgtgctcagcgagcgcggtaatacgggtcatgaattcgttcagggacttccggatgatcgagcagttcggtgatggcgagcgcgttacgcacacctttggtcaagcggcacgttgccgtaagtaccagtgatgccgatgagttcgacttccgggctgtccagcgcataggcaatggcaagcgcgtcgtctacaccggtgtcgagatcgagaatgagtttgttcacggtgtctgccctttcttggcaactgtctgttctctccattgatgacatattcctgccagcgtcatctggcaggaatatgggggcagcagctgcgaaaacgactactggtcggctcgttcaagcttggggatggcgaacgaagccagcagagcaaggcccagaagcacggccgacgcgatcattgccgccgagtaaccggcaatgccgcccgagaagctcgcgaatgcgttcatcacggcatatagcactgcatagctcaagcctgcgccgaggttgaacgcgcccgcattgaggccgggcaagtatcctgggttgtcgtccggcgacagcacaatgcccaaaccgttgagcatgatgttcgccgtgcccgcgtatgccacaccgagcaccaccgagataaccagcaaggcccatacgctcgggaagtgtgcaacgtatacgccgaacagcacgccgaccaagctgaccagaatgcccacgcggagcatgcgatggtagccgaacttggaggcaagcacaccggcgaccacgccgaagaccagaccaaccaaagcatatggggtcagcgtggcgaacgacaccacgtcggctcccaatccggtgccgaacttaccgtcctgagccaaggccggcacaacgccattcatgatggcgaacacgccggtcatggtgagcaatgtggtgagcagcaggccccaggtgcgcggctgcttgagatagtgggtggtgaccatcggtgcgggattgcggttctcgaccttccagaagatcacgaaggcaaccgcagccgctaccacctcgatagcgacgagcacccaattcgcgtcgccgagtttctggatttcgttgatggctagataggctgccaggaaggcgatgccaagaacgattgcaccggcccaatccatcttcggggtctctttggccgtgctttcatcggcgaacatcgacaccagcacgattgcgaccacggcgacaccgaccatcacccagaacacggaacggaagccgaacgtgccggcaagccagccgccgaggatggcgtcaacaccgccaataccgccgttcaccgaggtaagaatcgacatcagtcgcgcatatttggcatcctcagtcaccttggcgtgcagcatgatgagcgtcatcggcaccaccggtccgcatacgccctgcatcacgcgaccgaccatcagcatgggcacattcacggccaacgccgagaccacacagccgatggcggtgatgctcagcatgcccagcaatactttcttgcggcctgcgagatcgcccagtcgaggcaggaacagtgagaacagcgcacatgcggtgaagaagaccgtctgggtgaggctgatctgtgaactgctggtgttcagctcgcgctccatagtggtaagcgccggcgaaagcatggaagcgttgagctggaaagcgaagatcgccgccatcagcgcagccatcaaagcgacaatggacttgccgccctcatcaagcatttgttcggatttgactgtcgacatgactattcccttgtccttttacgcattcttcttcgtccgtcagccgatagcaacgatggcatcgacaatgagatcccagaacttatcgaagtcgagtttcaccgcgacctgcgtatggcattcctcggcggacggttccgggccacgcaggtcggcaacggtcatgcccagtgtcaggtcaccgtggatttcgacatccagcgggcaacggcgagtcgacaccacgctcggatcaatcagataggcgaccgtgcagggatcatgcaccggcggatcgatgaagtcctgattatcctgataggtcttgcggaagaagtccataagtccgctggcgaagtgcgacaaatcagtgccgatggcatcaatgcgatgctgaacctccggagtacacagcgcctgatgggtcagatcaaggccaaccatggttagcttccacggctcgttgaacacgatgtgcgcggcctcgggatccaccttgatgttgaattccgctacggcgctccaattgccgacgtggtatccgccgcccatcaggacgacttccttgacgcggtctacgatacgcggctccatacgggcggccatggcgatgttggtcagaggaccggtcggcacaagcgtgattgttcccggctcgctggccataatcgtatcgataatccagttcacggcatggccggaatccagaggacgggtgggaaccggcaattcaacgccatccaaaccggtctcgccgtgaatcgatgcggcgacctcctgcttgcggacaaggggcctatcgcaaccggcgtgcaccgggatgtccgtggccttcgccatttccagaacggaccgggcgttgtacgtcaccttttcaaggctctgattgccgcccaccgtggtcacacccactaggtcaattttggggttgcctacagcaagcatgatggccatggcatcatcatgaccgggatcgcaatccagaataatcttttccaccgaagtgctcctttgcttccataacagccgctgggtcatctctgactcccgatgatttaacgtttcatcatcggcttatctgaggataaaacgttaaatcactattgtcaatgcctcatctacctgcgtgtcaaaggtatccgcgcattcctctcgaagccgcttgaatcacacttccgctgattgattggcgacggacgcggaactaacctcacccacagattcgcgtttgatgaacatcgtgggcacggaatgcgtgatgccgccatccatggatcccgaacggatgcgttgcagcaatagctccacaccctgcttccccatcagatccgcctgttgggaaatcacggcgatgcgcggcgtcatcacggtaaacgccgaaatatcatcgaacgacaccaacgacatgcgttcgccaatcgccaccccgcggtcatgcagcagtccaatcaccgtgaacgcatccggcgaatatgcgcacaatattgcgctcacccctgcacccagcagcatctctaccgcagcggcacgcgattcataagtggagtcgcaagctgcgacaacgccatcgccgtcggcaagcaaatcggcggcagcctcccgaaacgcggtctctcgttcgtcaatactgaacgattcgagcgaaggatgagacatatagcccacacgtcgatggcccagacgcaccagttcttcaagagcctcacgaatgcccgtatatggatcagaaaccacaaacggcaccgactcgacaccgggaacgcgacgatcaacgaacaccaacggcaagtctcgttgtatcaacgattgcactccgggggatttcacaccctgcggtacgacgatagccccatcaatgcgttggcccaaaagattctcgataaacacatcctggcgttccacgctttccgaagacgtgccaatcagagtggagatcccatgccggtagagttcatcctccatcgaagcaaccaaatcggcgaaatacggattgcacaaatcaggaaccagcaagccaactgttttggtacccgacgaacgcatggagcgagcacgctggtccggcacataccccatttcttcgatcgttttcagaaccaattgccgggtctcatcagagaaacggcctttatcgtgaagaatctgggagacggcagcggctgatacaccagcccgctgcgcgacatccttcaacgtcacgaatgccatctcggcctcctccttgcgactcatatatcatcagaccacaatccaatgtacccttcccctcaccaatactcgcaattcccaccaagacttatgcttctcatgcacaacaaaagcggcatatgtcccctgagacatatgccgctttgtaatctcatcagcaaccaggcgaatttgccgtcaaactactccagctccaccgcgccggtgtagagctgatagtactcgcccttttgcgcgatcagctcgtcatgcgagccacgctcgatgatgttgccgtggtcgagcaccatgatcacgtcggagttgcgtacggtggacagac

SEQ ID NO: 2067 - DNA, 11186 bp, Unknown
  R17_18m  MAG No. k141_57725
caactaccagatttgcgcatacagatcgtaagacacatacttcggcagatcgtagacggtaatcgagaatggcgtggatcggccattgcccggccaatccacgaatgcgatatctccatagatgattgcgttctgtgcgttacgcagtactagggaaatcttgatttgctgtccatcagatggcttgaatccatctgccacggcgcggacctcgccattgaacgtcgtgccgccgtccctgttgtctattttggatattccactgatggggaaggcggcggttccctgagtcttggcgacgttgtatgtatccggattgagcacagtaaaatcaaccgtttctggggcggtgccttcgcctgcttgaccggcgtcatatacagtctgattcgggaatgccatattcagtgcttgcgtctgcgagaacacgatggaaccgtctttggcccgccccgtaatggtaatctgcggatactgcacctgctgggtcttactggtgttgcgcagggcgaaagcgtagtggacatacccttgctggtccgccgaccagccggattccactattttcagaggattgtcggtgacggtgtcttgattgtctccatcagcgccgtcagtgccgcctactccgcccgtgccattggcattgtcggttcctgacccgttcgaggagtgcccgccatcggccttatcggttgattggctgctggattgtgtcgaggaatcgggtgatgttgccgacccgataatgccaagttggcctgccaacacaatgcctcccgcaatggcggcgattatcagtgccgctccggcaatggaccacagcacgatggcgcgtttgctcaagtgcagacgccggaatagtcgagacgccgacgcgctgccgttcgttgttctcgttgatggcggatttgccgatgatgcgttcggtatgggcggattggactgggagaacagcgcctggcgaaactcttggacgctctgtggccgtttgctgggctcgaatgcgcacgcatagccgatgacggcgcgtagtcgagccggtactgcggcatcatcggcaagtcgctgctcgtagtcgctggcatcgggatatacgccggtcagcatgaatccgagtagccggcccagcgagaatacgtcggaacgcgcgtcggttttggcaaagccatattgctcaggcgaggcgaatccgtaggtgccaagcgccgtggtatcccgtgaacggttgcttgcctctgaccggatgcgcgcgatgccgaaatcgatgagatgcgcgccatcctgggccacgatgacgttggccggcgtgatgtcgcggtggataacgccgtgctggtgaagctcctgcacggcttcgcaaatttggtcgataagctgcatggccacattcggtgcaagccgcccgttttcctccgcaatttgcgcaagcgtgctgcccggcacgtaatcgtagacgatgacgaaccggtcgggcagctcgtacgtcgcttccacacgcggcagacgattactctggcaggcgctgagcgccgcccacacattgcgttgcgctaggggagagggaatcttcttgcgtacgaacgggccgttgccgtcaatgctcaccagttcggtgacgccggaaggtccgcgagcgagcgtacgctcgacatggtacgcatcgtcgatgctcatcgcatgcatcgcctgcttatcgtccatgtctctccttgatgccctcttacttgcgtctcactggtgagtgttgttgggccgaatgtcgtcaatcggccggtagcaacgtcgcctctcccatacgatacaactcgtcgtccgtggcgatgcggtcgaatccattgcgtatacaccagatgataatcgcgtcgcgtcgctgtttgcaccacagttcggaaacgcctgcaagacgaagtagccgttgggtttcacgtaatgtgcacttgagaccaagagccagcataatggcgtgatctcggccggggcggcttttgccggagaaaatgtcataaaccactgtggcgttgaggccggatgcccgcaccacgtcggctcgtctcaggtcatgggcttccatacggtcgaacagatagtcggtcagcgtgcgtgcgctgacgagtccctcatcgagatactgctcaatgctggcgctggcgagcagccgatccaacagttcctcggtcaaatgttcttcggggatgtctgccattgcccatgctccttgtcgctgtgttgcgggtgctgtgctgcgccatcgtacgcggttgctcgattcccagcgtacaggacgccgacttttcggaaacacgccgaaaaattcagttgtcagctgatgtatggcccgcgcgtgtcgccgacaatggtcgatgccatccgtgtaggtgcggtggcggaaaggatgttcatgcgcggtatcaagcatcgacaataaagctaatatgcatacaaaatgctaatttgcgtacataataacaacgccatacactggttcgatgtatcgcagagcaaagcgagcaataagaagggacgcaatgatgagcgaacgataccggcttgccatggcagtcggattgaccgtaacggttgccgggcttgcctcttctgtgctggtaatgctgctgcttaaggaaagaagggcatcatgacaacgccatttgatcaacaacctcagccggttccaccgtccgaaggcacgaatgacgcaccggaagatcgcgcgaatgcgcctaccgtgccgaatactgtaccggctggccaaccgaacgtagcgtctgatggtgctaccaccactccgatgactccggctacggcatcgcagcggcccgccggcgcgccatttgatcgtgtatatgcggtcagtccgcaacagctgttccaagttattcacgaccagctgactactggcgccacgtttaccttggataacgaaaacacccagaccggagcgttttccttccactcctatgatggggtgaactgcacgctaaccgtagtcccgcagggtgcggcaggggccgccattcgtctggaggcgactggaaacgaaagcgccaagcgcgttgatgagttcctcgccgctctggacaagcgtattggtgtggctcctgcacccgccacacatggtgccggtgctgccactggttttgctggtgccgctgcgcctgccgtgcttgctccgaatgcacaaggggtgaagaagacttccaagctggctgtgttcgccattatttggggagtgttgttcgtactcgcccaatttgtggatgtttctggccgatcctggggcggactgctgttcgccacggtgattccggcactgctttcaggcttcgccgtatacgtgacccgcccgagtggcaaggtgcaaggccgagtgctggcctgggtggcagtcggtatcaccgttgtgggtctggtaatcggtggcgtgttcgtaattcgtgacggtgcgaaggccaaggctgatcgggcggaattggaagcatcgctcgccaccaagtgcgaagcatattcatggccggagtcggatatcgcggcgctgctgccgcagccgaaatccacaaagggtgaaattagaagcgagtcttcggactacttctccatcgaggtgtgcggtaccgacgccaagcagtatgccgactacgtcaagtccgtgcaagacaacggtttcaccgtggactatagcaagtccgctgacagtttcaatgccaagaacgccgatggatacagtgtgagcgtttctcgtaacactgacgatgagaccatcatgtccatcactatccaggttccggaaaagaaggaagatacgtctacggacggcgacgccgcgaagcaggatgataagagcactgatacgggcactgattccagcgatgccaacaagcagagcgaccagtcttcggatcagaaggcgcagcagaacaccaatgacagtgctgacttcaaggccacgatggacagctacgaggcctttatcgatgagtatgttgccttcatgaacaaatatcagaaatccgacaacgtggtcagcatggctaccgactatgccagcatgatgaagcgttactctgagttctcccagaaggtagacgccattgacgaaaactccctcagcagtgaggattcggcctactacaccgaggtcatgactcgatgcatgcagaagctcgcatcggtgggccagtgatcagactggcgtatcgaggtaacggttttccaagaaaggaacgatgacggtatatgggtatacgcggcagacagtatacgccaatggatgagccggccttcaacaaggccatccccggaacggaggctctggccggggcgctgaaggacacttttggcgcattccgtagtgggcttgggattaccgaacccgtggtttcggtgaattgcgaaggttgtggcgctccgctttccggtcatcgcaaagaagtcgttcgatgcgaatactgcgatcgcgaaacgcagctataaccaacatgccagcataacggccggtcttgcgattgcatagtcgcaagatcggccatatgcatgagatatcgaggaaaaaacagatggcagttattaaggcgttcgccggcgcgctcggcggtacattcgcggacctgtggcgtgatatcatcaccgctggtccgttcacggaacacaccgtcgttgtgccgggcattccccgcggaagcaacaacgatcgcggttcgaatgaatacggttccgagggaataatcaccaatggttcgcgtatctatgtgccagagaatactgcggcgttcattttctctgaaacaggtatcgaaaacgtcatcaccgagtcgggcggttatgaatatcgcaacggggagcagagtgtgctcgccggagacggcatcggatcgttcttcaatcaggttgccgatcgattcaccttcggaggtcagcctggccgcaccaaatatgtggccttcgtcaacctgcgtgagattcgtggcatcaaattcggcacttctgcgccgctggtgtataacgaccggttctatggcgtcgatttggaaattcgcgcacgcggatccatgtcgctaaaggtcactgatccagttcgattcgttcgtaactttgtgcctgccactaccgtgtcgtattcattcgatgatgaagggccacgtaggcagattctgtctgaattcgtacagtcatttattgtggccatcaatttgctgtccaatgaatatcgtatttcgcaattgcccggcaagacgaatgacatcgcagcatgcgtgcgtggcgatcgggccaatgcaggtacgtggaatgatcgttttggctttgaagtgtccagtgtgggcatcgaaagtatcgagttcaccgagcaatcacgtcaactcgtgcagcagttcgcctcgaataagatgaatgttgccgcatacgagggcgtttcccagcaagctggcaatatggctgcccagcagcgcattgcgcaaggcatccaagacaacggctttggcgatggtggcatgttgctgggcatgaatatggcacaagccattaatcctatgacggccgccccggttcaagcgccggcgcctgcgccggcaccggaagccgctgctcccgcctctcacacggcatccatgtctgtggaagaacaagtcgaggcgatgaaaaaattgaaggaattggttgatatcggcattctctcccaagaagaatttgatgcaaaaaagcacgaaattcttggcctataaacggcgcattcatgcaactcgaaatagttgataatgagggaaacgctggtgcgatatatcggcgaaaacaatggatgaatatatcattgaataagcagtaattatcaggatggttggattcacattgacgtggttccgaccatccgcagatctgcgactacaagggagagaataatgttgaacaacagggttcgtttcgggaacatgaagcgtgtcaatcgtgcggtttgggcgttgaccgtgattcttatgatggttctgggtcttgtgcttgctggatgctcggggtcttctgacggtgcggacggcaaggaggaatccacatattcgaaaattgtcgccatcgccaagaaagggcgttcgctggccgatgtgaaagacgagctcaaggatgccggtttttcctcctctgattatgaggtgaaaagcgacacggacaaaatggtgctcagagcttcgaactgggttgtccaatccgtggaagatggggacaagcctgttatcaatgttcgtaaagccagcgatatagcgcaggaggaagaagcgaagaaggtagctgaggagaagaaagcagctgaagaggcagccgccaagaaggcagctgaagaggcagccgccaagaaggcagctgaagaagaggctgcaagaaaggccgctgaagaacaggctgccgcgcaggccgaggcccagcggcaagctgaggaggccgctcgacaggcacaacagcaacagcaagcgcagcaaaatgtgcattatgcgaattgctctgaagtccgtgcggctggtgctgctccgttgtatcaagggcagcctggatacaacggcaagttggaccgcgatcacgatggcgtggcctgcgagtaacggattcgatatttcggcgactcagcgcttgttcgggccgccgtccgggaacatcaagtaggtgatgatgccggcggcggttccactggccaatgcgccggtgatgacggcaagagcctgcatcgccgtgctgagcgtgggcttgcccgttgcggcagtctttgcatccttcaatgtggcggcactgggcttgcgtttctcggcaatggcattgtcggcagcgttgccaccgtccgtattgactggggcattgtcggcaacggcctcgccgtcctgctcttgggcgcgccgtttgcgaatgcgttgctcaatgggatcgtcgaccaaagtcttgatgatgcgtgccagatcgcggtcttcacgacgtgcgatttcggcgctgaacaccgtacgtaaagcgagatactgcagcttggtcatcgggcttttgccggtctccaagttagacaccgtctgtcgcgcgactcccagctcgtcggccagttgctgagtcgtccatccggctaccttgcgaatcggacccaggttctcctgaaacttatcaatccaccattgttcgatttcagacgccgccattacgcacctccttccacgctgtcaccagtgtacgttacctgtaccgaaatcaatccaaaaaacagtgttcatgtgaaattcactgcgtatttgcgctttcgccggcttaccgagattagccttagacaaggaataacagagtagaagcagaaggtatgcgcgtattcgatttcgacggaaccatctatgatggcgaaagcctgttcgacttgtacctgtattccgcccgccacgacccgaaagtgttccgctatatcgcccccgtgctgcggtacgcggtcaaatacaagcttggccgggccacgcttgaacaaatggaatacggcgtgggcaagatgaccgaaggctatctcacggaactgagccgatccaaacgggtggcgagcgtcgaacagctcgtggacgatttctgggaccgatattacgcacgtatcaagccttggtaccagcctgagtcggacgatgtgatcctcaccgcatccttcggtctgacggtgggggaggcctgccgcagactcggcgtgaggaatctcgtggccagcgaggtggatgtggagacgatgaaggtcacgtacctcaacttcaacaccaacaagaccaaacggttccgcgaactgtacggtccggacgccgtcatcgacgagttctacaccgactccaagttcgatcagccgatgatcgacatggcccggcatgcgttcatggtcaaggggaacaccattacgcaggtcaagtaggaaacagcagaaaacaacacaacgtaaccaataacgaaagaggaatccatatgagcatgccgctcgatctatacgtaatccggcatggcgaatccgaagcgaacgtcatcgtccaggcgggcgaacagggcgacaactccctgtatacgcaggacaacgtcaccgtacccgaccgctcctggagactcaccgccaccggacgcaagcaggccgactgcatcggtcgttggctggtcagccagcagcagctgttcgaccgttacatggtctcgccatacgtgcgcacccgcgaaaccgcagccaccatggccctgcccaaggccaaatgggaggagaaccgtgtgctgcgcgaacgttcttggggtgaaatcaacaccatcaccaaggacgaattcaaaaacaactacgcacgcaactggaacttcaagaataccgatccgctgtactggcgtccgccggcaggcgagtcgattgccgatgtggccgaggaccgtgtgcacaacatcctgacctcgctgagccgcaaatccgattcggaatccgtggtcatggtcacccacggcgacttcatgctcgccctgatgctcaccatcgaggatctggccgacgaggaattcctgcatcgcgccgactcggacgactggaagatcaccaactgcacctgcctgcactacacgcgccgcgacccggaaaccggccgcacctccaagcgtgtgcgctgggagcagaccgcccggcccgtgctcgacgagacgaccggccgctgggaggtcaaggtggagccgtggcgcgaattcaagcgcccgtacctgtccaatggcgatttggtggatgtggtgcaggccgtcgatccgcacctgctggagtattacggcaaatagcctttcccggaagagagacttcacaaaatcttcgtgagctagaatggcgcgtagtgcggctggttgtgaatgccgtgccccaagcgagagcgaggagagtagtaatgtccaatatcttccaatggcaattgcatggcgacggcaagacgctggcgcccggcgaggtcgtcgagcccgatgaacgtctgacttgggtgcgcaccgccggtatcggcgcacagcacgtcatcgccatgttcggtgccaccttcctggtgccgattctgacgggcttcgacccgtccaccaccctgttcttcacggctatgtccaccgcactgttcctgcttatcaacaggaacgtgctgccgagctatttgggctcgtccttcggcttcatcgcaccgatcaccgcggtcaccaccgccaacaagggcattgcggtcgccagcttcggcatcatggtcaccggtattctgctggccctgattggcgtgctcgtgcattacgccggctccaaatggatcgacatcatcatgccgcccgtggtcaacggcgcgattgtggccatcatcggtttcaatctggcaccttccgtgtggaccaacttccaagccgcgccggacaccgcactggttaccctgctggccgtgctgctcgtggccgtgctgttcaagggcttgctgggccgcctcaacattttggtcggcgtaatcatcggctatgtatatgcctgcatccgcggccaggtcgacttctccgccatcggtgacgccgcatggatcggcttcccgaagttccacctgccgcaggccgatttttccatccttcccatgttcgtccctgttgtgctcgtgcttgtggctgagaacgtcggccatgtcaagtccgtggcccagatgaccggccgcgactacgacaaccagatcggcaccgccctcatggccgacggcctgggcaccacgctcgccggcttcggcggcggctccggcaccaccacctacggcgagaacatcggcgtgatggccgccaccaaggtgtactccaccgccgcctactggtgcgcagccgccttcgccctgatcctgagcctgtgcccgaagttcggcgccgtgatcaacacgatccccgccggagtgctcggcggcgtgaccacgctgctgtacggcatgatcggcatgatcggcatccgcatctgggttgagaacaaggtcaacttcgacaagccgctgaacatcatggtggcagccatcaccatgattattgccatcggccaattcgcgttcactgttggtggcatttccttcaacggcattgccattggcacgatcgtgattcttgtggcctaccacggcctgaaggccattggcaaggcaaccggcactatcgccaaagacgatccggatattttgtagtgtgttttagggctactgggccgtattgtggctcagcccttttgcacaatggctcctaccttcacgggtaggagccatttgcgtgttccatggggcggtgctcgccttacgtggtggtagaacccatggggcggtaattggcccatggggcggcaaacatcccatggggtggtaaaaccctcatggggcggtagacgaaaatggctttattctgcggtttcacaatttcttcaaaccgccccatgggcaagttgccgcctcatgggcgagttaccgcctcatgggcgagttaccgccccatggggtcatcagtaaagagtgggatgacagcgtggcgagcatcaagcaaagtagggggcttacgctaagctcggaaagcttgcgtaatttgcgtaacctttgacatgaaaggccactgtgccccgtaataatttcgatgatcgtgacgattccgctgatttccagatgaacgacagcgcggaatcccgcccccttacctttggcgaacttggcgtacccggaccgctggtgcgcgtacttgcggcagatgacaagaagaccgcattccccattcaggccgacaccctgcccgattcactggccggccgcgacattctcggccgagggcgcaccggctccggcaaaaccctcgccttctccattccgctggtcacccggcttggctcctatgattcgcttggcgaaatcgcgatggaggagttccgcaacgaaatcaagcgccgcaagaaggccagcctggaagagcgccgcgccgacgacttcctgccgcacccgcgcggcctggtgctggcccccacccgcgagctcgcgaaccagatcaacgacgtgctgatgccgctggcccacacgttcggcatgaacaccaccacggtgtacggcggcgtcaagtacatccaccagatccgcgatctgaaggccggcgccgatatcgtggtcgcctgcccgggccgccttgaggacctgctgcgccagcaggcgctcacgctctcgtcc

SEQ ID NO: 2068 - DNA, 14274 bp, Unknown
  R17_18m  MAG No. k141_57855
attggcgaccagaacggcgcgtacaggccaagcgtggtgccgtccaccggaagaaaagcgacggccagcaacagccaaatgacgttgcgttcctgcgatgtcagaaatcgcaggaacgcccggtattgcggtcggccatgatggttgcccgcgtcgatggtgtcgttgcgtacgcatgcctggttcatgtgattctccctccccgtcaaccttactcgttcatcacgatgcgcggacaggggcatgctttccccgctgaaagtgcaatgacccgaacattgacaaggtcgcaccgagcccccatcattggcacattgtgcgatctcgtcgtggctggctgacgaaataatgctggccgaccggttacattggttcggtacagtggcggcattattggccactggatcaagcgatttgcggcagaacgacgaaagcgacacttgggcgaaaagaggcaggcatgaccacgaatcgaccgctcattgcggtgactccgctgatggattacgggcgcgatagtctgtggatgctgcccggatatatggaggcgataatgcgggccggcggtacgcccatcatgttgccgctgaccgatgacgccgacattcttgcacaatgtgccgaacggtttgacgcgtttctgtttacgggcgggccggatgtgggaccgatggttggtgcagcggcctccgccaccggccgtagcgaggtgctctctcctgagcgcgaccgaatggaatcgattctgctgccagctgtaatggcttgggacaagccgattctgggcatctgccgtggcattcagttcatcaacgcggcactgggcggcacgttgtggcaggatttgccaagccagcatccgagcgatatcgaacaccatatgaatccgccgtacgatgcgttcgggcacagcgtttccttggtgtccggcactcccctggcttcattgttcgcggggcagactgagattgcagtaaacagctaccatcatcaggcggttcgtgatgtggcccccggtctcgaagtcatggccgttgcgcccgacggcgtgatcgaggccctgtaccggccggcaagccacttcctgtgggccgtgcagtggcatcccgagtttctctacaaggtagatccatgctcgcaggcgatttttgatgcgtttgtggggagttgccgataacagcaaaaggggctgctccggttttccggaacagccctttttcagcggtagcagtcagcagactgatttagtcatcggtgctggcttgccagcgctgattggcgcgtgcggagaccgccgtccgaaggcgaggggcgtacgaaggtacgtcgaacctgaggaaaggcggtatacgctccgccaatcagtgctggttgttgagacggtggtacatctcggacagctccagttccttctcgaactggcgagcggtggtgttctcgtcgatgacggcgagctcaacaccggcgatgcgggcgaagtcttcccaagcctcacgaccgacggaggtggtcatgcaggtgtggtgagaaccaccggcggtgatccagcactcaacggcggtcttcaggctcggcttcggctcccagacggcgcgggcgcacggaagctccttgagggagccctgcggctcaacgacgtcgacgacgtccatgagcaggcggaagcgttcgcgaacgtcggacatggagaccacgacggcgtccttggtgggcttgccggagaagaccaggcggaccgggtcggccttgccgccgatgcccagcgggtggatctccagcttcggcttggcgatggtgccgatggacggggaaacctcgagcatgtgggagcccatgtcgagctcgtcgccctcggtgaagttgtaggagtagtcctccatgagggaggcgccaccctcaaggccgtagcccatgacggcgccgatgcgcacgaggacggcggtcttccagtcgccttcagcggaaaagccccagccgtactcggacgggaagcgctgtgggccaacgcccggcagctgtggcagagcgccgaggtcctcgaaattgtcgacgccggcggtgcagccgttggcgcgcatcatgttgaccatcgcggcctcttccttggcggcgatgaacagggagtcgtacttggcgtccagcagagccgggtcgacgtcgtacttggccttgtagtcctcgatgatctccttgacctggtcgtccttgacggcgtcgtacgcagcgacgagctcgttgacggcccaagtgttgatggaggcgccgaacacgcgctcggcctcggtcttgtcgccctcggtgacggcgacgttacgcatgttgtcgccccagcgcatgaccttcatgttgttggaggcatcccagccggcgcaggcgcgggcccaggtgccgaccttctcgacgacctcaggatcggtgtagtggccgacgacaaccttgcgcttgatgccgaggcgggagacgatgtaaccgaactcacggtcgccgtgggcggcctggttcaggttcatgaagtccatgtcgatggtctcccacgggatttccttgtggtgctgggtggccagctgcagcagcggcttggtcagcacttcgaggcctcgaatccacatcttggccggggagaaggtgtgacaccaggtgatgacgccgatgacgtttgggttggcggaagcctcgaccatgaactccttgacaccgtcggaggacttcagggtgggcttgaggacgatcttggccggaatcttgccggtgttgttcaggtagtcgaccatttcagcggagtgaatggcgacctggcgcagggcttcctcgccgtacaggtcctgcgaaccaacgccgaaccagatttccttgccctcgaaggggttttccataaccatagggttacttcctttacttctttgtttatgggggtttgtttaagtttcattcgccgaccgaggctcccctcagagaggggagccaagacaccaccgtgctggcggagtcagcgctgatttgatgtgtgtgcccgcaaggcgcggaaggcgaaggcgtacgaaggtacgtcgagccttccgcaacgcggcggacactccatcaaatcagtgctggccgtagacgttctggtagcggtcgttgagcttatcgatgtcggcctggtcgatctcgatgatgtcaccgagctgacgggcggcccacatggtgtgagcgacttcctcggtcatggcagcggccttgacggcgccttcagcatccttgccgatggtgaaggggccatggttctgcatgaggacggccggggacttcgggtacttcttgagggtctcgacgacacccttgccgatcgcctccgagccgatcagacggaacgggccgaccggcaccgggccgccgaactcgtcgcccatcatcgtcaggccgcacgggatgttctgaccagtggcagcccaagcggtggcgtaggtggaatgggtgtgcacgacaccgtagacgtcgggcatgttgcggtagatgtaggcgtgggaagcggtgtccgaggacggggcttcggcaccgtcgaccacgttgccgtcaaggtcgcacacgaccatggaggacggggtcaggtactcgtagcgcaggccggagggcttgatgacgaacaggtcggcggtgtgcagacgctgggaaacgttgcccgcggtccacacgaccaggttccacttgatcagctgctggtgcaggttggagacgacctcacgaacctgcttgacctcggcgcgaacctcggggccgtaatcagccaaagttgccattattggttttcctttccactgtgatggatggacgttttttcaaaatctcaaggacctctctcaatagagggaggtcagaaaggcttacttatcttcgaggttgatggtttcgatggcagcgtgctcgatgggcaggcccttggtgaagcgggcgaagaagtcctcgaaaccaaccacatcggaagccaccggcttctcagtggtggactgggcgtccttgaacacgaaaccatcaaggaagtcagcgaggttgctgtgatcctcgttggtgttccacaggtagttggcgagcacggccataccccaggcaccaccttcggcggcggtggacatgaccttgatcggggtgttgaaggcagcggcgagaatcttctgagccaccttcggagtggtgaagatgccgccgtggcccacgagagagtcgacctgcacgtgctcctgcttggtcatcacgtccatgccgatcttgaccggggagaacgcggagaacagctgggcgcgcatgaagttgccgagagtcatgttggcttcggggctgcgggcgaacagcgggcggccttcaggcagaccggccaggaattcgccggaacggaacggatagttcagcaggccgccgcagttggcgtccacgtcgtcggcgatggccgcgcggaacaaggtgccgtacagcataccggcatcaaccgactggccgatggccttggcgaactggccgaacaggccgacccaagcgttgaggtcggaggtgaagttgttggcgtggctcataccggccagatcgccggccggggtggtgaccaagtcaacctcagggtggagggccttgagcttgtgctccagaaccaccatggcgaagatggaggtgccggcggagacgttaccagtgcgtacgcgcacggagttggtggctaccatgccagtaccggcgtcgccctcaggcggggcgagcacgatgccgggattcagggcaccggacggatcgagcagcttggcgccttcctcggtcagctcgccagccggagtgccggccacgagcggctcaggaagcaggttctccagcttccacggctgggctgcgacctcaggcagagcgtcgaacttctcgatgaatgcggtttcgtaagtgtgagtggtcgggtcaatcgggaacatgccggaggcatcgcccacaccgaggaccttctcaccggtgagcttccagtgcacgtaaccggcgagtgtggtgaagtaagccacctcggagacgtgctcttccttgttgagcacggcctggtacaggtgagcgatggaccaacgctcggggatgttgtactggaacagctcggagagcttcttgtgagcttcggaggtgttggtgttctgccaggtgcggaacggcaccagcagttcgccggcctcgtcgaatgcgaggtaaccgtgcatcatggcggagaagccgatgtggccgacgtgcgtgagcttctcgccataggcggtctcgacgtcgttggccatggaggcgtaagcggactgcaaaccgccccagatctcctcggtggtgtagctccacagaccatcctccaagtgggaggcccagctgtagtcgccggaggcgatggtctggaagttgtcgccgatgaggacggccttgatgcgggtggagccgaattcgatgcccagcgtggtcttgccagcgcgaatcttctcggcgatgtgggcggcctgctcggccgcgttgtcggttgctgccatatctttcctttgccttggagcgccggcgctgttatccccttccttggggaggatgttagcgctcacaatttcaaaaaaacattctaccgataacctgcattcgacacaacttataccgtgtcacgcatcataacggtttgataacagcgccaatttaccgccggggagccggccccaaggaccgtcgagcacgcacctcggcgggaatcagccccatgccgtgctgggtggtcaggaaggtcggctcgccgccctcccccagcaagcgcagcgtctcgcgcatggcggccacgccgagcccctcgaaatcgggatgcacggtggtcagcggtgggtacatgttatccacgccagacatgtcgtcgaatccgaccacgctgatgtcttgcggaatccgaagcccatgctcatgcaacgcgcgcatgacgccgacggcctgattgtcgttcgcggcgacgaccgcggtgggcaacgccatgccccgacgcccatactcatcaatgagatgattcatgtgcgcatatgcctcagaggcatcccacgtatgacagcgcacgatctgtgaatcgatggatcgggaggcggcgagcttgcgccacgcatccagtcgggtgtgggcgtcgcgccattcgttgggaccggcaaaatacagagccgatttgtgcccgtattcgcccagcaaggccaccactttggccattgcaccccactggtcgataccgaccagtgcagtgcgacgcttgttttcggtggagataaggcccaatccctcacgcacggtcatttggccgtgggtggcggtgacgatgacgcgcggctgagtgactcgcgcacggcaggcggcggcgaacatcacgtcggtcggggtcaggaagatgaaggcgtcgacgttctgctcgttgaaggtgtcgcacaggttgtcgaattcggactgcatgcacaaggcctcgtggaccatcatcacgctcatgaacagaccgtgttcgcgggccatggattcgatggatgagatggaggaaatcgggccgaagaatttgaggcccccggcgatcaggcctatggtgcgcgaacggcgggaagccagtgcgcgcgcggagttggaggggcggtagccgagttggtcaatggcggcctggactcgcgcacgggtggcgtcggaaacgtccggcgagtcattgatcacacgggagacggtttggtggctgactccggcgagcttggccacttcgaacatggacggacgtttgcttggcttgcggccggtcaccatgctacctaacctcccctctggcggccggcatccgtgcacggccaggcttgtaccttaatcaatactgactttagcgcgtccacaacagttttgcgttagcgctcacactgtcgtgtcgcacgcggctcaggtcaggtgccatgagacacgatggagcggagtcggcccgtgttcggcgatggcggcacggtgtgcggcggaaccatagcccttgttatgagcccattcgtaggcggcgtaacgtgggttgctttgcgcgaggtcgaccatcagccggtctcgggtcactttggcgatgaccgccgcggtggcgacggtggcgcaatgctggtcgcctttgactttggtcgttatatcggctggaatcggcacgtccggcgcgtcgaacgtgttgagcgccttggtgatgtaatcgctcggcccgtcgagaattccggcgactttgggcagggcgcgaacgctttccccacaatttccaatggattcccctacggagtctcccggacgaccttccacaatctcccccgcagccttttttgccgtcaatccccctccaagccgtaagccaagttcgcgttcgacttggctgagcgcgcgcagggcggccacgccgagcgcataggtgatgccccattcgtcgatctcggtgttgctggcctggcctacggcgtaggccgcgcaccagtcgcgcagttcgtcgaaaatcgcctcgcgcctatgttcggtgagcattttggagtcggccacgccgtccggtacgccgaggtaggtccgcccggacagttcggcggaatcatcgccgtcaagcggcgccaaatcacaggcccagatggcggcgcacccgaccatcaccggaccggcgagcgcgccgcggccgacttcatcgaatccagtaataaggtcatagccctgggccgcaaggctgcgttccaagtcaagtgtcggggtaatcatgcgcggctcccatcgtctcacaatggttaggattcagacggtccaggttcaaatggttcaggattcagacggcccggaactcaatcagttcaaagactcacacggttcaaaaaagactcaggaattcgagccggaagcgtcagacacgtccttgaagacttcgtggtggtcatcaatcgcaccaagccggtcaagcggccagtatttcgcgattccgactccgaccacatcggagatgggaaccaagccgcgatcgccgtcatcctgatgatagcgggagtcggcggaattggcgcgattgtcgcccatgacgaacacgtggccctcggtcacggtcaccgagaacgggaaagcgctcgggtccacgccggggcgaatgtaggaggtctcattgatggccacgccgttgatggtcaccggctggcccgcgcccttgcattcgaccacgtcaccgggcaggccgatcagtcgcttgatgaggtacccgccaccgggagcgctgctctgctcctcgttcaaccagttgttgggatctttgaataccacgacgtcgccgcgctgcagatcgaagatcttgggggtgagcttgctggtcaccacgcgatcgccgggcaccatggtgtccatcatcgagcgcgaaggaatctcgtaaaagccgacggcgaaaatgcgaatcagcagcacgataagcacgggaacgccgcaccacaggaaaaagtcgcgtagggtgaagtggtcatcatccatcgatgatgctgccgcggcattcgcaccagcggaagaagcggcgtacgccgggcgcgccggtgccgggggaaccggggacggggcgatgccgtggtcggcgacttggaacgtacgggaatcgcgggcatcggcctcgtcatcatacgaggtctgattgctctccggattgtcggaaatcgggaattcgccgttatcctgatcgtcctgcataccatctcctcgcgattcatgctgccggatatgaggggtgccggcgcccgtccatcatacgtggaaaatacggaaacagcccgaaaccgaaacggttccgggctgaatttcacggtttattcgcgcacctgcatcatcaggcccacgattgcacccgcgaatcgactcacttagcggagttgtcgcggcgctcggcaatacgagcggccttaccgcgcagagcgcgcaggtagtacagcttggcgcggcgcacacggcccttacgcacgagcttgatggagtcgatggacggggagtgcaccgggaagcgacgctccacaccagtgccgaagctgatcttgcggaccacgaaggtctcacgcacgccagcgcccttacgagcgatcaccacgccggtgaaggtctggatacgggagttgttgccttcctggatcttcacgttcacgtcgacggtgtcgccgggacggaaggccgggatttcctcagccggcttcatgtgcttggcgtcaaaagcctcaacagcgttaaccattgttttccttcagtgctgccgcatatcagccacagatctggggccatccacgcgattgcgcatcacgtgcgttggcctgttctcgttatccctcgggtttgcccttgggaagcctgccgatccgccgaaagtcaggccttgcggccgttcggactggacccatggagacgtgggcttatgcggcggcccacttctcgacacagcaatcgtcaattgtacggattattgcggacagaatggctgcctgatggcattccaacaccaaggcactgcgacgtagttgacagacctgcaggcgggctttatcttgggagcgtcggtaggcgaggctaccgcagggatatgggttgctgccgctaacagtggagacactgcacgcaggtcagcagttcttgtcggatcaaggcatgaactaacgcaattccaccgccctgcgatgctgaagcttgaacgatggctcgaatcggcggattcgaatactttccgcccctcctgctggtcgcatggataccgacgatggtattgatctggcgtttcagcgcacggcttgaaggaggtgagagtccgatggacggtgattattccagtagttccgccgccggcaacagtcatagttgcggtggtgatgaccatgttttcttatattccgttatccggaagtcgggctctcgcctgtagtgttccttggctccccggataacccttgcataattcgtctttcctatgcatagggaggtcttttcatgaccatgttttcattcaatcgcgtcggcgcgcgtccaaatgcgtcggcccgcaacccttccaccgccgcgtccgaccgccagccattcgccgtgcgcctggcctccgacgtactggtcgcggccggtattctggcgctgttcggtctgatcgcttggattctgccggcgatcggcgaaccgatcggcccgaaaggagtgccatcacaagtcagtacgaatctcgccgacctgccgtattacgcgctgcgctcggtgttccgcatgctcgtggcactgttcttctcactggtgttcacgttcatctacggcacggcggccgcgcgctgccgccgcctgagccgcgtgctgattcctctgttggatattctgcagtcggtaccgattctaggctttctttcggccaccatcaccatctggatggtgctgttccccggctcgatgctgggcgtggaggccgcgtcgattttcgcaatcttcaccagtcaggcctggaacatggcgttctcgttcacccggtccctgaccagcgaaccaactgaactcgacgaggcggcccgctcactacagctcacacgctggcaacgattctggacactggacgtgccgaacgcgatgattccgctgctgtggaactgcatgatgagcgtgggcggcggatggttcttcctgaccgcctccgagatgatctcggtgaacaatcgcacctatgcgttgcccggcatcggcagcttcgtggcacaggcggcggccgaggagaatctcgcggccatctgctgggccatcgtgacgatggtgctggtggtgctgcttatcgacgtactgctgtggaagccgctgaccgcgtgggcggagaagttccgcattacgcaaagcgagtcggcggtgcgcaagaccagtgtggtgctgaccatcattcgtcagtcacatatcgatgagatggtggcctggctgttcaggcctctcggcgacctgttcgacacgctggcccgcccgttgggtcggaccggtggacgttgggcggcggacgtgaagtccgcacgcagccgcgcgcttgacgtggtattcacagtgctggtgttggcagcgtgtgcgttcggactggtgcagcttatgctggtgattcatcgcgatgcgggattcggcgagctcgggcaggcgttcgtgttgggcatggtgacgttcctgcgcgtggcgctgcttacgctcgtctgctcggtgatttgggtgccgattggcgcgatgatcggcatgaatccgcgcgtttcgcggtttatgcagccgattgtgcaggtgctggccagcttcccctcgaacttcacgttcccgttcgtcacgctctggttcgtggcatgcagcatggatatcaactggggcagtattctgctgatggcgttgggcacgcagtggtacatcctgttcaatgtgatcgccggggccagccagattcccgacgatctgcgtgagatgacgcgcagcttccagctggggcgctggcagcggtggcgcgatttgattttgccggcggtattcggctcgtgggtcacgggcggcattacggcggccggtggggcgtggaatgcctcgattgtctcggaaatcgtaagttatggacggcatacgctgaccgcctccggcttgggcgcgtatatcgccgaggccaccgaaagcggcaacaccgtgaggaccatcatcggtgtggccgtgatgagcgtgttcgtggcggccgtcaaccgcctgttctggaacccgctgcagcgcatggccgagcgccgtttcgcactgaactaaagacttaaggagaataatatgactgttgcaatggaaaccattcgttcgctgcgggcggtgaccccgcagaacaccatcatcgaagcccagcacgtcggccagcgcttcacggccgacaacggcaccgaactcaccgtgttcgacaacatctcgttcaacctgtacgagggcgagatcgtggccattctgggccgttcgggtgccggcaagtccacattcctgcgtgcgctggccggactggtcaagccgaccagcggcacggtcaagtatcgcggcgaggccctgaccggcccgaatcccggcatcgcactcgtgttccagaccttcgcgctgatgccgtggctcaccgtgcaagacaatgtggaactcggtctgaaggcgcgcggcgtaccacgtgcggaacgcaccaaactggctctggatgccatcgacatgatcggcctggacggcttcgaatcggcgtatccgaaggaactgtctggcggcatgaggcagcgcgtgggcattgcacgcgccttggtgctgcggccggacgcgctgttcatggatgagccgttctccgccctggacgtgctgaccgccgaaaacctgcgtcaggaagtgctcaagctgtggtcgagcgaacagcgcagcatcaagtcggtgcttatggtcacgcataacatcgaggaagccgtggagatggccgaccgagtggtggtgttgggctcgcacccggggcatctgattgccgatgtgcgggttgatctgcagcgtccgcgcgaccgtcacagtgtcgaattcgaggcgatggtggaccgactgtacgcgattttgaccggacaggcctcgcagcctacgcaacaagccgaggctctatcgccatcggcatcgctcacgaacgcacccgtcacggacgcatctgtcacggacgcatcagaccttcagcccgccaagaccatcgagaaaatcaaggagcatccgctgcccaacgccacgccgggcgggcttgccggtctgctggatgtggttgccgagcatcctcacggcatcgacttggcagatttggcctcggctctttcgttcgaggtggacgacctgttcccgctggtggatgccggtacgatgctgcgcgtcatcgtggtacgcgacggccatgtgcagatcaccgaagcgggcgacgcctggcataaggcggacattctgcgggccaagcaggtgttcgcctcactggcgatagaacacgcgccgctggtgcgcaacattgagcatgcactgcggaagtctgcggaaggcaagctccgcggcgagctcatgctggacctgctgcgcgcccgttacgccaacgacgaggcgcatcagcagttcgccatcgccgtggagtggggccgttacggcgaactcttcgattacgatgccgatgacgatctgctgagcttggatgaggcgaataagggcgaataagcgaatcagccacgtgagttggccagatagtgcctttatgcctgcaaacagatgccgaagcggaatatgaccatgttcgactcatctgactgacagcaatccgtatatgcaaagtgcccggcatccgaagatgtcgggcactagtcgtgagagagactccctcagtcagctacactgacagctcctctcacccgagggggcaccagaggaacgaatcagaactcgcgacgtgggcagtcgccagactgcccaccagacagcacagctgcggtcgcgcgaatcacgaattctgaccgagcaaagcgaatcagaattcgcgacgtgggcagtcgccaggctgcccaccaaacagcacagctgcggtcgcgcgaatcacgaattctgaccgagcaaagcgaatcagaattcgcgatttgcgcggtagaacttgatcaggctctgggtggaggcgtcctgggcggcgagggcgtcgtcgtcctgggagatggccggggtgatctgcttggccagctgcttgccgagctcgacgccccactgatcgtaggagtcgaggccccagacggtgccttccacgaaggtgatgtgctcgtacagggcgatcagctcgccgaccgcgaacggggtcagggccacaccgaagatggaggtggtcggacggttgccggtgaacacgcgggccgggacgatctcctccggggtgccttcggcgcgcacttcgtcggcggtcttaccgaacgccagagccttggtctgggcgaagtagttgcccaggaacagctcgtgcacgtcctggtcgccgtccttggtcgggttcggggtgttgacgaacgcgatgaagtcggccgggatgagctgggtgccctggtgaatcagctggtagaaggcgtgctggccgttggtgcccggctcgccccagaagatctcgccggtctcggaggtgacgggggtgccgtcccaacgcacggacttgccgttggattccatggtcagctgctgcaggtaggccgggaagcggtgcaggtactggtcgtacggcagcacggcgtgggaggcgaccttgaagaagttgcggtacca

SEQ ID NO: 2069 - DNA, 3463 bp, Unknown
  R17_18m  MAG No. k141_58478
gatgtccttcggatacatgatctgcgcgccgcgcggcatcgaaagcacataatcggccagtcgcgggcgcatcaccgcatactcccagccgccgatggcgcgcgacgatttccacggcttgttcttgtctttctcggggtagacctgattgacctgtgcctcgcgcttggcatgcacggtgaggatcacggtgccttcggtcttgccgatcacatcgtcatgcagaatcaggccatgctcggtctgcgtggagccgccggccacaagctgatcggtgatcttcttgcccttgcggtcggtgaactgcaccttctcgcctgcggtgagaggcccgcgcctcggctccataacttgctccttgtgtgctcggtgggtcaatcgctacaagtctaatgcatgtaagctcgttggtgaggtgatgacgatgcgaatgcagatgacaagccagatcgatgccggcggcaatgaccccattttcctgatgttccacggttacggcaacgacgaaagcgagatggtgcggattctcgacgccgtatatgcgccgacgcgagccgatgcggccccggccgcaattgccgccgtacccagctatatctcgttccgtgccacctacgcgaggccctatatgggcggcaattactggtatcccgacggctgcggcgtggacgagcgccaacgcgaatgcgcggcggtcggggatgcggtggcttcactgctggatgcctcggcattcgcccatcgcaggaagatattgatcggtttctcccaaggcggttatctgtcgtatcgtctggtcaaggcgcatccgacgttgttcgatgccgcgatcctgctcagtccttcgttcatgggcgaggaacaggcggcgcttgactcccctacccgattcttcctggcgtatggcgcgcaggaccgcacgattccgatgcccgaccagcaaacggcccatcaggtccttgaacgggccgggcatctgacctatcgcgagtattccggcatggcccatgccatctgtgatgaggaaatcgccgatatccgggatttcctacgtgccatatgatgccggaatagcttcaatatggaatatctccgttcaaagaggtaccggtccaagtagaagcggctcaacaatggcggaatggcgttggccacgcccattcatcgcgcgatggttctgcgatcagctcaattcccctgccggctgatgccgcccttatgaccggtggccttgaatggcgtggcgcgtgccgtcaccttcggccccggcagattcgtactggtattggatcgaccgcggagcccggcagccggttgggactcggagcgtcgaccagtacccgtgatgttggtatgccgtttgccgtcgtgcgcccgtttctcaccagcaccttcaacctcgtcaatatcaatgcctttggcgcgcaaagcacgtgcccaccgctcatccatcgaactcctcacacatcccattcgggtttccacgtgtactgcatgtcgtaggcgctgggcgaacggcggcaggtggttcagggtgatcggaccgaatgcggcggcgtcaaaagacatcgtttgcccccttcgatggtgttggccaacaggttccaagggtcaggcacagcgcctttctcaacccgttcgccgccacgatgaccggcagcttgcgttcacgggttcccctgcaatgcgcctcattatggcaacacgaaccgacaggtgccggctgcgcctaggatgggaaatcattgctgcacgccgaaaagggaaggcgactgtcatgaggtatttcacgaccgacacgcatttcgggcatccgctggtcacggtgttgcgagggttcacgacgttcgatccgacgcgctcgcgctatgaggaggtgcgacgcgcatgatcgcaagaccgccgaggattgggccaaggaggagacgttcggcgcgggtctgacgtttcgtcaggtcgccgatacggatgcgcatgacaaggcgattgtggatcatatcaacactttggtcggcccggatgatgagctgtggattctgggtgatatcggtttccgcacatcgctgacccatctgaagaactgcctgtgagcgctcaattgcaagcatctgcatggtgtgatcggcaaccatgatgactggtggcgggaagaccgccccgcacttaacctgttcgaaagtttggagccgcacgatacggttgagattgagggactcggtacggtcaatctttcgcattacccgtatcgggaggatctggcatacagttggcccgatgatgtggcgaagttcagcggcaaggcgttgccgtttgacggtcgcaggctgctgtatggacatacacatcagctttcgccagatggtgcacgcccggaggcactgaatgttggcattgacacagcattgaccgccgttgagatgtatgcacgctgaacacgcgcctcaacggccttggtctcgtcatctctcgctcacaccaacggattgccggcaagacgggtcaattcggcgttcagctcggggaaatgctcgttgccgacgaacggaccgtattccgtgccggattggaatgggcaccatgcctgaatggtcatatgcttcagtcgtgaataaggcaggatgccaccggtgcgatcggctgcgggatcgctcgccatattgaattggatttcagcgtcgagcatctgtgtatgcattccgccgtgtcgaaatagtcgatgccggaatcatgggccacggccacggtacgtgccgcatcggcggcatccaacgcgtccatgcgcatcacacccagcgccactcgtgacgcaatcatgtcggattgtccgatttcctgagtcttcatagtgtctcatttctgttatcgtgaatcggcgaacgggcactgtccgcttcgttgccgggcagcaatctccattgccgctgcttatgtcaccttatcgcttgaagtgcacttgaaggcaactcgcaggcaggcagcgcgcgctgccgggcgcgtcttcgcgtcttcatgtcctcgctgtgaccgagacatcgttgtgccgtaatcatgcccatttcttgtatgatgacctctatagcaacagagctagggggattccatgaatactaccgattcagccaaagtcagtgatgccaacgccggcgcaaacaatgtcatccatatcccgcacaatcccacgcttgccggattggccacgctgacccgcaacgtggcgtacaagaccggggccgatgatctggtaatggatatcatcgccccgcaatccaccggcgatgacgataaccgccgctaccccaccgtggtattcgtgcaaggcagtgcctggaccacgccgcatcgcgactacgagatcccgcagctctcggctttggcccgcgaaggctttgtggtggctacggtgaatcatcgcgacgcctcgagcgatccccacgacgtgttccccgcatatctcgaggacgta

SEQ ID NO: 2070 - DNA, 3455 bp, Unknown
  R17_18m  MAG No. k141_59711
caaaccgttgcacaatagtgcatgtcgatagtcgtaaaggtgcgtgctagcgtacctgtcccgaccggggacggccgggtcgacgatgaaagagaaaggttcgatgatgaatcgtacagtcaagtcagcagtcgcgatggcggctgtcgctgcgatgtccctcggcgctttggcggcctgcggaagctcgacctccggcgatgacgccaagggcaaggtctactacctgaatttcaagccggaagcggctgatcagtggaccgctctggccaaggaatacaccaaggaaaagggcgttgaggtcaaggtgcagaccgcggcctccggtacctacgagcagaccctgaagtccgaaatcgccaaaaccgaagccccgaccttgttccaggtcaacggcccggtcggctaccagaactggaagaagtacaccgccgatatgtccaatacggatgtgtacaaggagctcaccaaccaagatgtggccctgaaggatggcgacaaggtggtcggcgtgccgtacgtgatggaaacctacggcctgatctacaacaaggacatcctcaacaagtacttcgcgctggatggcgccaaggccacgtccatggacgaaatcgacaacttcgacaccctgaaggccgtggccgacgacatgcaggcccgcaaggacgagctcggcatcaagggcgcgttcacctccgccggcttcgactccagctccgactggcgcttcaagacccacctggccaatctgccgctttactacgagttcaaggacgacaacgtcaccgagcagccggccaagatcaagggcacctacctgccgaactacaagaagatcttcgacctgtacatcaccgactccaccaccgaacccacccagctgagcgccaagaccggagatgatgcgaactccgagttcgcgctcggcgaggccgccttctaccagaacggcacctgggcctggaccgacctgcagaaggccggcatgaccgacgatcaggtaggcatgatgccgatctacatcggcgtcaagggcgaggagaagcagggtctgaccaccgggttccgagaactactggtgtatcaatgacaaggcctccgacgccgacaagaaggccaccgaggacttcctcaagtgggtgatcacctctgataccggcaagaaggccctctctcaggacatgggcttcaccaccccgttcaagaccttcgatgacgtcaaaagcgacaacccgctgaccgaggtcgccgtggaagaccaggagtccggcaagacccaggtttcttggaacttcaccatgatgccgtccgaggaatggaagaacaaggtcggccaggcgctgctcgagtacgcgcagggcaccggcaagtgggatgccgtcaagaccgccttcgtggacggttgggcttccgaatacgaggcctcgcactgagtctcatagagtcccatagccgataagcaacaatccgcggcgcccctgcctttccttctccaggggcgccgctttgtattgctgagtctcgcacaaaatcggccgccgcagaaaaagtgtgaggcacacacccggccaatcgcacactgtgggtccatggattggcgatttttcgccatttcccacaatgtgcgattgagcgttattgtgcggttgcctcacgctttttctatggtgggctttgttgtgtgagcctacttaacgcgggaggtggaggagcggaccttcagctgggccgggaacacgatgtagggttgctcaatcggcttttcgtcaatgagatcgagcgtcatgcgggctgccacgcgggccatttccaccggatcctggcggatggtggtcaggccgatatcgccggtgtagaaactatcgtcgtagccgaccagcgagacgtcgccgggcacggagaatccattgcgctccagctggaacataagcggcaaagcgatgccgtcctcctggcatgcgatggcggtgggcatctcgtcttggctcatgagttggtcgaccacgtcgctgatttcataacgtccatcgtcatcgaccttgcagacgatgacctgcggctcgatgccttccctgcggcagcaggcggtgaatgagtcgaatcggctttgcacggagaagctcagcgacacctcgcgattggtgctgatataggtgatgcggcgatgtccgagattgataagatggcgggcggccagcgtggagccctgcacgtcgtcgatattgacggcggcggtaaagccgcgggcttcgggctcgactgaattgatgccgacgatcggcacgccgaccgaagccagttgcgcgatttcgttgttgtcgatatcgaaagacgccacaatcacggcatcggcgttacggcgtaccggcaacatctcgaagaattccttgcgctcctcgatgctggaaatctggaataccgaaatatcgtagccctgcgtgtgcagcacctcgttgagcccctcgatgaccgaggcggtgaaccacaggcggatatggccgctcatcagtactgcgatgcgcagggcgcggccggatttcagggccgcagccgagcgggagagtgagaaattgagtttgtcggcgatggcgagcacgcgctcgcgggtcttggccgacaccagatccggtctggtgaaggaacgtgagacggtggagatggagacgccggcctcgcgggcgacatcctgaatgctcgtagccattgcagcccccttgcgttgaatggaaaatcgcaatacacatgcacaactgactccagtgtacatgctgattgattgatttgcggcgatgacaacgattgtattacaaacgtttgcaaagtgtctatgacggcgttagattggctttatatagccattatcttaggtgaaagaagattgctagagccggagtgtgctcgaacttgaaacgcctaaaatgacaacgtttgacatataatgattcgacgtttactatgaacataggcttgaacgagaacaggccgtgcatgcggttctcgatcggcaggctcgcattgagttgaactccgcagccggcgcacgatgcagtgtcgcaacgcagcggactcaaggaggaggaaaagtcatgatcagcatggctggcaaggcgatacgcagatggtgggcgctgttcgcgctccccacattcgccgcattcatcatcgggttcctggtgcccttcatcatgggcatctacttaagcttctgcgaattcaccaccgttaccgacggtgaatgggtggggcttaagaactacggcaaagcgctgaaggacaaggaattcctgcacgcgctcggcttctccaccgcgttcaccatcgtgaccaccatcgtgatcaacgtgatcgccttcgccatcgcctacatgctgaccaaggcgatcaagggctccacgctgttccgctcggtattcttcatgccgaaccttatcggcggcatcatcctgggctacatc

SEQ ID NO: 2071 - DNA, 10238 bp, Unknown
  R17_18m  MAG No. k141_59736
ccggcccgaacccgcacgggcaccgggacctccccgcatacccatgagacccacgcccgggaccattcccggccagccccgacggcgaggccgaacggcgcggcgcgtccgcgaccgtgggagcccaacgcccggccccccggtccgccgcgcagacagctcccctccagaggggagccagaaactggcttggttatggggtcgctctacactggcttctgctatgcattacttcacccctaaacgttgcgccacgtcgaataaaatcatgtaccacgataaggcgcaggctcagcgtgccgctgatcaaagcctgatcgagcgtggagccgagctatgggtgtaccgttgcgaatattgcggatgctggcacctcacacatcgcgatccacaatccagttaccggcatgtaccgctgaaccagcaactcaagccacacagtcgtaaaaagggctacaagccacgtagacgttagcgtcagaagctccacaggcctcgccaacgccgtatctgaggcaggttacggtccaaacacgccaggtcgtaggctgctaagcgttcagggcgctcggacacactccgtccaacactcacatcaccttggtgctttcaaggttgcggataacccaatcgttgaagcgaattaccggcttgcgcaacataagtcccaacagcaatgagggaacaaggaacagtgccagtttgcccatggaaacccagtattccatgccgaatgagcccgccatggccgaatgcatcgcatccaccgcataggggaacagtagccatttagaaacgacctggaagaacgtcggcagtgtttcaatggggaatgtgccgccggaaccggctacctgcataaccagcagtactacggcaatggctttgccgatatcaccgaacgatagggccagcgtatacacaatattcgagaacaccagtgcagacaaccacccgaccatcaaaaactgaatcggatgctcacactgcacgccgagatagaacatatcgcccaggcacaccagcgtaccttgcagcaaagcaaggaaaccgaaaatcatgtatcggccgaaatattcgtggtgcaagcgtaaaccgaactgccgcgcattgccggaagactcggcacgcggcttcttcagcacatccaacgcggcggccggtccggcaatccgcccggcaatcatggcctcgcgaagacccactcccgaaccgagcggcagatcattgcccaaccctaagatacgggccttctcatggtcggaaatcgatactttcaacatggcgaccagaatgatcgcaccgacccagatagacagaatcgtgtagaacggagccatcgcggaaccatagttggcaacgggatagagcgcgatgcggtcgaccgctacgggtgccgccagcatggaagcaatggcatcgggcttcgcagaggaaatcacagacaggtcgttggtgccgccactggtgatagaggcgagttgggaagacaagttgtcgagtttcttcgccgaacgggtcaaagcgctagctgcgtcagtcaaggccgactggatatccgtcaggctgtctgaaacgccgccagaaagacctgacacgctgctgacggtcgacgcaagcccgtcgattacggaacttgcctgcgtggccacttcgtccatggacgaggtcagattgttcagttgcggtttcagcgtgctcttgtacgtgtctgaagcctgagtaatcgattgtttggcggcggcgatttgtgatttcagatctcgacgcgctgtatcggcatcggcagtaccatttgctatgtgcgtggccgcatcgcccaacgcggtggcggcttgctgcatgctctgctgcgcctttgtggcttggtctgcagccgcgttcagttgagcggcaacggtatctccgcccacgggcagtgaagccgcttgtttggcgagatctcgtaaagcggcggcatactttccaaagctgtcggcctgagcctccactttggattgcatatcggtcagcttgtttgatatctgcgaggattgtgagcccacatcggcaaaagcggcatcgatctgcttggcaatggtgtcgtaggatgaaccggcctgctgcaatgccgtaccgacgccatcggtggctccggacaatgccttgtcgaggctggagacgccgttgcgggtctgtttcaacgcctttttggttgtggccgcagctgagcctgttgatcccagcagcttatcggtggaatcaatgatgctgttggcggccccgagcagattggcataggaatccatctgcgacgcagtgccggtcaaacgagacgacatggtggcaatatgactggaggcgttgttgacgtactgctccatttgcgggctttgcgcgtaatcggccacgttggaaaccaaatccagcgccacgctcgccaaggtcttcacaaatgtctggtcgatggtcgtggccacggtggtagcaccctggtcggtgatatgcggagcgatcggattgattttctcattgagatagtattcgagcttggcgtgcttgatcttcggtgaaaacagcgtcatcatatcggagctgaagctctttggaataatcagcgcggcatagtattcgcctgagttcacgccatcgatggccttagcacgatccacaaactgccagtcaaggtcatgattggccctgagcgtattggtcacggtttcgccgacgttgatggtgatcggcatcagatcggacttatagcccttatccacgtttgccacggcgaccttcaaggccttggtgttgccgtacgggtcccagctggcggcgatgttgtaccaggcgtacagtgccggcacaatcaccaatcccatagccacgattacggcgatcacattgcgggtggcttggcgcacgtcacgtacgaatattttccagataagcttcatcgtgcgcctccttgcccagactgaccggactgctcgaactgtgcggtgtgcgtagtcggctcggcggcctgatcgccgaacagtgtgagtcgttcagtggtttcgccgatatccggattgctgcccatcgccgcttcgtgacgtccgtggccgtggaaacgccgccacacatatccgttgagcatcacattgcggaactcgtcggcactcatggcactgacgccaagctgcatggcgtaggtttcgcgtgcgtattcaaccacaatgagataggcgtcgataagaataatcgacagaatccaggaggtcagcatggcgattttctcttgggtgacgaacagcagtaccaggaatacgaacgggagtacggtcagcaatgtcagaccggcaacgatcatctttgggtaccgcgcgaagaaccggtgcgcgcgatgagcgatgatatcgcgcagttccttgctgtcagacaccgtgcggaatacggagttcaagctcacctgttcgttcaccatgctgttgtgctcggtgatcatcaggtcggtatctcccaaacgatggtcgaacagcgcgttcaggttcatcgcataccggcgtacgacaagtcccacgaaaagcgccgccggcagataccagaacaggtgcagcatgtcgagccagtaatggttcgcgtacaggccggcgatcgggccgcgcatcgcgttgatgccgtaggtaaagggcagccatgggtgcagttcgcggaagaagttcggcatcatttcaatcggatacaggccggaggcaccgggtatctgcacaatgaccagaattacggcgatggctttgccgatatggcggaacgccacggccagcgcgtaaataatgttgatgtagacgaacgaacagaagattccggccaagatgaacagcagcggatgctcgcattggatgccgagcaccagatcgccaatggtggcgatgatggcttgcaggaatccgatggtgaccagcagcagccagcggccaagatatgcttgcgtagcggtgatacggcgaatgcctttgcggtcgacctcaagcttgtagatggcaatcagcacgaaaccgcctacccacagtgccagattcgtgtagaacggggtgactgcggacccgtaattgtcggtggcgtacacgactttcgtggtcagggtgacgggattgcccatgaactcgccgaatcccttgtcatccagatgcagcgtatcccggattttctggtaagcggcggaactatcgagcgtggcgatatcggtgcgtacggtggcgacatcgctggccgcctggcgcagcgaatcctgcgtgctgctgatggtggttttcgtttggttcagggtatcgacaagctggtcgaacagcccgtcggcctgatccaaggtgccggacaacgaagtcaacgtgccatccagcgtgccgttcagggcggcgaaactgttcaatgatgaggtgagcgacggcattacggtgccggtcagcgagccgcgcgcggtattcagcgccgcgatgccgccggtggtggtgttggtcatggctccggaaaggttcgtggtggcgtctttgccggagttgatgaactgtgtggtgtcggtatggaaggtgttgagctgtgtctgctgtttgctgatcaatgagtcgagcgcatcgatttgtttccagatgttctggccgaccgggtcggtggtgtctttgccgatgccggctttggtcagcgcgtctttcagatcgctgattgacgtttgggtggcgttcagtggggccgaaagtgtgttggtgatggtgtcgacggagttctgcgcgctgttgaaggagccggtgatgctgccggcggcgttgttgacgtggacggccagtccggagagttgtgctgaactgctgtcgagcgcgccgaccagtgtggtggagaaggcttgtgacccggcctgtgtttccgccaacagtgtgccggactggcgggaggcattctgcgcggccgcgacggtctgcttgagtgaggcggtggtctgtttggcgtcggcgagaatcgtgtctgattgggccagcgtgtcctgtaagtcggtgagtgaatcctgaacggtgttcagcgtggacatcaccgtattgagatcatcgatcgtatcgtgctggactttgccagtggcttggccgagatcgtctccggtttcggaaatggccgaggcaacggtggtggctaccgtggtgacgaaggcggagttgatctgctcatcgatggtggtggcgccggtgtcggtgattttcggcgcgatcgcgttcttcttctcgttgacgtaatacttgattttcggctgtttggaggttccggtcaccgattcgaccaagctggcgctgaaatccttgggcagcacgatggctgcatagtatccgccggtctccacgccgtggacggcctgttcctcattgtctacgaagcgccagccgagttcgtcgttctgcttgagtttcttgacgacctgccggcccgcatcgagatggccgaccagatcgttggtgatgccttggtcttcattggctacggccacttgcagattgccggtggctgaatagggatcccagttggcgagaatgttgaaccatgcgtacagcgagggcagcattgctacgccgagcgtcaccacaacggcaacgggattgcgtaagatacgtctgcaatcgcgtagaaagacttgccaaaccgtccgcatccagtccctcttttccggttcgtagtcattgcggccacatgcagtctattcccaccactggtgcggatactgctggtttggcgggttttcttgcaaaactggccgttggttgtccgcataatgggactgatatgtgaacgtttgttgatggtgcgacaccggcgggatggttgtgtaattttgccggtatccggtgatgaaatgttgaggtgttggaactgagtcgtcgcagtgctgagaccgagacgactcagtgacgagcctatccgaggctatctcgttggttctggtctcactgatccagacggaagccctgagcggcggccttgtcgagcagtgtctgatggctgacatcctgccgactgatcgtggcgacctgatcgctgaaagcgtccaccggacggtcggcttggcgcagatcgtagtaccggtgaacttcctcgtcgaaggcgggcagctggtcgagtacgccatcggcgtcagccgggtaggtgttctcgaagaactgcatcgtgcgcggcatgcgcggcttgacggtcgggttctgatcgggcttgccgatggccagacccagcaccggatacgtgtattccggcagattcagcacgtcgataaggccggggatgttgttgagcagagagccgagaatccccagttccagcgaataggcggcggtctccatggcgtgcagggccagcactgcgtcgttctgagcttgggtgaagcgatagctgtacttgagatggaattcgtcggaagcgggatcgatgcccttgcgttcggcgatgcgtgcgttgcggtgctcgtcgatgacgaacacgtacagcaacggcgcggtggcgatatacggctgatggccgaattcggcgagcttggctttggtggccgggtcggtgatacggatggcgggccagtcgttaaggaactggctggacgcggcatgttgggcgacggtttcgagcgtggcgcgggtatcgtcgtcgatggcctcgtccttgaacttacggatggagcggcggcccagaagagcttcgattgttgcgttggtaaccatggctttattgtcgcacggcagacgccggacgccacggtggattacctcacagtgaaatgccgatattgtgtggcggaactgtgctggactgatggttcctgtcgattgactgatggttccttgacgaaattccagcgatgagtcatcagtcagccaacagaaaccatcatccaaccgggggattagcggctgggcttgcgatggcggtggtcgacgaacgccttggagccccgatccgacagctgcgaaaccactgcgccgagtgcggccgaaacggcggcgaatgccagactcattgccagactttgcggcgcgtctgccgccagtcccttgcgcagattgcgtttgcttgtgcccttgtcccatatcatctggaatgctttgccggcaaccaagcctgccagcgctgggaccgccgacttgatgagcttgtcgcccagagaatcagggtcgttgagccggtcctcgcgcagcctgttgaccttctcgtcgatgcggtgcaggctgtcgaccgcgcggtcggcgctggaggggaagtcggtgttcgtttcgtcgctcatgactctcagtctaatagcatctcaatcatctcagcgcaaaagatgggcgttaatggtggagtcatgaacgagcgcagactagagtggaggcatgagcgaacagaacgtgaacggcaccgttgccgtcgagaactctcgtggcggcaatggatttttggtgttgctgcgccacggccagaccgtgtggagcgaatccgggcagcataccgggcgcacggacatcccgttgaccgcggtcggcgagcagcaggcagcggatgccggaaggcgcctgcgcgaggccttccccgaaggattcagccagagctgtgtgttttccagtccgctgaagcgggcgtgccaaaccgctgaattggctggttttgcggaccacggtgtgttggacggcatcgctgaatgggattacggccgagccgaggggcgtacgcgccagcaggtgagtgaggccagcggttttgaatgggatgtgtggcgtgacgggccgcgctcgctgacgcccacgctggagggcgactgggtcgagaccttgccttcgggcgaacaggtgtcggtccatgccgggcctggcgagacgctggaagaagcggcggcacgcgccaagagcgccatcgacgagattacgccgctgctgaaagacggccataatgtgctgttggtggctcatgcgcacatcctgcgcatcctcacctcgcaatggctgggcgtggacccgcatttcgcacggttgctgcgtttggatacggcgcactactcggtgctcagcgtctataagggagataacgtcatcgaacggtggaacgcctagccccggttgcgctgcgattgcgctggcctgcccgctactgcgggcgggcctttattgtttgtggcgggaattgcggtatgtcgataaatgatttgcaaacgatagcgtcggcgtgttgttttttgatgggtataagtggcaatcgattgccatgaaagatatgttagcgctctcatggttgcgaacgcttgcattgcgataatgaggcaaaaatgactgaattaatgggatatttgttgacaatggcctgaaaatgatgatttatgacgcgccgatattgctatcgtttgcaaaaagaagcaaaccgttgcacaatagtgcatgtcgatagtcgtaaaggtgcgtgctagcgtacctgtcccgaccggggacggccgggatcgacgatgaaagagaaagggttcttggcggatttttgtgcgttgaggggtgtggagggggctaccatcgttgttttttcctgctggcgtccatgatcttgaggaagaggtattcgtcgtcgggtagtccgtagtgtttgcgtctgagggtcttgatcatgttgttggttccctcgaccttgccgctggtgacgggatggagggcgtgcgcgcagatgccgtccatgtgggattcgagcaggcgggcgaaccaggcgaagtgcctgtcgccggttccatggcggatgccggccgcgtgttcgatcagttcgcgtatctgtcgggggtcgtggctctcgtaggccagggagagggtgtccttgacgaggtccgcggcgaacaggagctcgttcgaggcgacgagctcgcggtagcggacggcggattccgggccggcctgccatcggggtctgacctcgccgcagaagagcgaggcctgtttctcggaggggccgcgtggtccggtctcctggcgctcccattgttcgcgtgtggggcgcgaggccatgagcaggtatttcgtgcgcttgagccgtctggcgccctcctggtcgccggctttcaccagttcgcgctggaggtccttgcgtacctcgccgatcacgttctcgttgaggttcctgaccaggtggaagcggtcgaacacgaccgcgacgtgggggtaacgctcccggaaggcccgctcgtagtcgctgttcatgtcgcaggccacggccttgaccccgcccatccattcgtcgccggccaggtcgaagaacccctcgagcgccgagcgccgtttgccgcgcgccagccagagcacgtgcccgctctccaggtcgaggaccacggtcgcgtaccggtgcccgtcgtgcagcttgaactcgtccaccccgagcagacgcgagcgtgcggcgggtggggagagctcccgcctgccgtcgggcgtgggccgcgtgtacaggcacgccagccgctcccggtcgatctccctgacgacctggcggcacaatccggtggccagggcgacgtccgtgagcgtcagcccgtaggccagcgggtcctcgaccagacggacgagcgccagcgtggccatgcgcccgggcgcacggaacggcgcgggcgcctggacgctcgcgccgcaacgcgtgcaacgcgccctgggacggtagaccgtcacgacgctccaggaacccccgaacggcagatgggcgagcctgcacgacgtcgccccgttcgggcgcgtccgcccaccgcacacgggacaggcagcgggcgcgggacacaacgtctcgccgggaatctccaacaccgggaacgaacgcgcccggggaaccctcctggtcccgagattgagcgtgcgcgaggtctccacgcacgcgcccgtctgccggaaccccggcatcgacgaaggcaactccaacggcggcgaaggcaacacgcccccgccacccatcgtagaatcggacacagggcctcccggtcacatcgtccagcttggtcgcagacgattatccggcaggccccctccacaccccacagcgcacaagaaaccgccgagagccttaagaactatggcaaagcgttgaaagacaaggaattcctgcacgcgctcggcttctccaccgcgtttaccatcgtgaccaccatcgtgatcaacgtgatcgccttcgccatcgcctacatgctgaccaaggcgatcaagggctccacgctgttccgctcggtattcttcatgccgaaccttatcggcggcatcatcctgggctacatc

SEQ ID NO: 2072 - DNA, 4022 bp, Unknown
  R17_18m  MAG No. k141_60101
cttgccgaagccgagtccgcacagcgcgccgaccagcacacgggccacgcccagcggcatgccggtggcgggggcgaccatcggggcggagagcaccgctttgtcgaacagggtggggtatcgctccaacacggccgcgccaatgccgccgcccatcgaatggcagaacaggttcagcggcatgccggctgcgtactgctggccgatggtttcggcgaagccggccagatcggccacgtagcgctgccagtcatcaatccacaccatgcagcggttgtccacgtcgcgcgcggacttgccgtggccgcgatgctcgagtacacacaccgagtagccggcaagcaggaagtaccagacgagctcgtcgtacttttcggcgaactcggtgaagccgtggctgatgacgatggccccgcggaagacggcggtggcgccttgttcgcggattgcgtcgaacctggcggcgtcatagcacaggtagtgcagctgtcccgaacggccgccggtgtccataatgccggacagcggctcgaccccggccgaacgttcggcggcggacggatcgaaccagccctcctcgcggcattgctcgagcgcgggcagcaccacgtcggccatcgtttcggcgtacttgttctcgtcgatcatcgtcacctgcatggttcccatcttaggacaagcctcacgccgctgaccgcacaggcgcgtaggttgtgaggtatgagcgaaaccaatgatgtcaatgacgcaatcaagcatttcccacgcctcagggcgcgcacgctgcggttcggctgcggcgcaccgcgctccgcacagaccgtgggcgacggctcgcgggccctgttcctgcgctccgacggccccgaggatctggtgaccgcactgtggctaagctggttcgacgagtccggcgaacaccatgagaccaagctggccgatccgcgcgaactgcttggcgcaaccgccgacagcgaggacgtgccggccgaggagaaggcccgccgcgagcgtgcgcgcgaaggcggcaccggcatcgtcggctactccgcagacgatgacggcaatcgcatcgtgttcaccatcaacggccgcctgttcctgaccgagatcgcctggaatgacgagaccggcgcacccgagccgcacacccgcgaactggccggcgaatggctcgatgaggacccggcgatgtacacgccggtgctgaacccgcgcatcgccccggatggcgaacatgtgctgtacaccacgggcagctacctgatgctggtcgatatcggcggcgagctgggtgaccgcatcaccgccgtctacggcgtgagcgtggaggatgaggacggcaatccggccgaaaacacgtggaaaatcggtctggccgagttcgtggccggcgaggagatggaccgttacgacggtttctggtgggccccggattcgcagcatgtgctgttcgaatccttcgacaccgccgacgagccgacctggtacatcagcgatccggccgatcccgagaagccggccgccggccgccgctacccgcgcgcgctgacccgcaacgccgacgtgtacctgaccgtgatcacgctggcgttcgatgagaacgaccggtacgcgggcatcaccggcaacgccgatgtggattgggatcgcgaggcgtacgagtatgtggccgccgtgaactggcgtcgcggccacgatccgctggtgctggtgcagaaccgccgccagacccgcgaccaggtgctcgaggtggcggtcgcggcggatggggccgcgctgggcgccacgcgtgtgcttgaggagcacgcgaacgagcagtggatcgacttggttcacggcacgcccgcctacacgccggatgatcgtctggtgtgctcgctcaacgatatggccacggataccaaccgtctgacggtggacggccgaccgttcacgccggctggctggaacgtgcgcacggtgctcgacgtgaccgacgaggatgtgctggccgtggtgcagcgtgcgcccgaaatcgcgaccgaggtgccgcgcgcctgggccggctcgggtgccgcttcggatgccgagtctctgttcggcggccatgacgcccgcagcttcgatgtggtgagcatgggatatgacggctcggtcgcgccgatcacgaccgagcccggtcagtggacggcctcacgcggcgcacgcggcatggtggtgtctgggcgcgatatgcgttccgcccgcgcccggatgcggcacatcgtcacgcgacgcgccgtcggcggcgtcaccgatgccgtcatcgccgccaacaccagcgatgccgccaacaccaccgacatcaccgccgccgacatcaccagcaccgccgcggaacccgggttcacgccgaacgtcacgttcacgcggctgggcgagcaccggttgtacacggcgatcatcgcgccgagcccgtccagcccgtacgcccatgccgacaaactgccggtgctgatgaagccgtacggcgggcccggcttccagcaggtcgtcgcctcccagtccttctactgggagggccagtggtgggccgaccagggcttcctggtggtcacggcggacggccgtggcaccacaggccgcggcccggcctgggatcgcgcaatcttcgagaacatgaagggcgtgacgctggccgatcagatcgaagccgtcaacgcccttcccgaggccgtctccaggctcaacgccgatgggcgcaggcccggcgttcccgcaccggacctcgacaaggtgtgtatgatcggctggtcgtacggcggcttcctgtccgcactggccgtgctggacgcgccgaacgtgttcaaggccgcgtgcgccggcgccccgcccaccgactggacgctgtacgacacgcattacaccgagcgctatctgggcctcgacccggatgtctactaccgcaacggcatcgtgcaggacgcaccgaaactcgagcgcccgcttatgctgatccacggtttcgccgacgacaacgtcaccatcgcccatagcctgcgcctctcgcaagccctgatggcggcgggtcgcccgcacaccttcctgccgttgacgggcatcacccatatgaccaacgacgagaccgtagccgaaaacctgctcaccctccagcgcgacttcctgcgcgacgccctggcctgaccggccccgggcgcgccgtgggccgtgacgtccgcggcacgcccggggcccgcgcccacacggcatgcggaaaaacggcgcaggtggtgcgccgcacccatttccgccctgaatttttggatatttttggatattttgcacccatcgtcatgtgaaagaccggttttttgcctcatattcccatcaccgcgtaggatgggtgaggattagaaagggaggactatgagcgttctcgaccgttttgaaaaaagcgtggagggtgcagtcaacggagtattcgccaagtttggctccaaagacctgcagcctgtcgatctttccagcgccttggagcgcgagattgacgccgaggccatgcccgtgggccgtgaccgcacggtggccccgaatgaataccgtttcaagctcagtactcctgacttcgaccgtatcgaggcatggggtagcgagaccctggccaacgaactggccgataacctcaccgagtacgcgaagagccagcattacgccttcgtgggcccggtgatcgtgatcttcgaggaagaccttgacctgtccaagggcaacttcaacctcacctccgaatccgtgcagggcaatgccgtgccggtcaccaccgatgcgcagaccgaggacagcccggtgctcgaggtgaacggcaaccagtacctgctcaccaaagacaagacggtaatcggccgcggttccggctgcgatatcgtcatcgacgatccgggcatctcccgcaagcacctggaaatcgacatcacggataacggcgtgatcgcccgcgacctgggttcgaccaacggcacgtacgtggagggccaccaagtgcccgccgccacgctgctcga

SEQ ID NO: 2073 - DNA, 31505 bp, Unknown
  R17_18m  MAG No. k141_60711
gcacggcgctgcgatagcgcccaccctgccagtccgctgtgacccgatccgcgagctcctcgccctgagtcccgcattccccggcgaggaatccgcgcagcgcctcctcgtcatcatcctccatgagcgcggcactgacggccacatggttccgaccgtcatacgactcgaaatacagcatcgtgtcgggcaaccggtcgcggtccgccacggactgtccgccaacggcaacgaccacgtgcacatcatggtgcagctcgccgccgacgacgggtggatcaacccgtaccacgaccggatcaacgcgcagagatcatgcaggcggatggagaaatcgcgccccgaactggtcgggctcgcacgctccgataccggcacgcgcgtcagctggcagtacgggcaatggcgtcaatgggccgaatggaaggcgcggaacgggtacggcgacgacatgagattgaaacgactgcgcgacgactgggcggacgatgccagaagccgcagcctcgccgtccaggaatggcgcgccgcgatggataaccgtccgcccttcctcgatgacggacgagaaagacacccggagaatctgtccacgcacgacatggaacgcctcgtatccgaagcgttcgccatcgccgccaacctcaacagcgcggcggacgacgacgaataccgggcagcgatgcgcgagggcctgcacacgttcgacatgctgcgcgaacgctacgggcttacgcaggacggcctgtggataacggccacggacatgaacgaaagccctataccagcgcacgtaggaaaaatttgacagcagcctcgaatccctacctccgtcgcatgtcggtgcaaactcagaaggaatgtcctcccgagagtacacatccgctctcattcattgaggtatcgcgcgtaacgagttttcattgtaaatgccacggtatggtgacggattttggaggacgataatgacaatacaatatacagcgcagccggctgatccggcgtcgagtgcagtgctgacgcgcgggctggtgaagcggtatggggattttctcgcggtgaacgggttgaatctgaacgtgccggcgcatggcgtgtatggtttgctggggccgaatggtgcgggcaagtccacgacgatgaagctgttgcttgggttggcctcggccacgagcggcgatatgtggatgttgggggagaaggtgggtggccggcacaggttgcaggcgggccgggtcggttcgatgatcgaggggccgagcttctacccggggttgagcggtctagataattgccgtatggtggccgattacctgaatctgccgggttcggccgcgcccgcgattttgcggcaggtcggtctggccggccatgagggcaagaaggcgagggactactcgctggggatgaagcagcggctgggcatcgcgatggcgttgatctcgcagccggagctcctgttgctggacgagccgacgaacgggctggacgcggaggccgtggtcgaggtgcgcgagatgatcatgggtctgagccgcgaacggggcatcacggtgatcatcagctcgcatatcctttccgagatcgagaagatggcgccggtcgtgggcgtcatcgcggccggccgcctgttgtatcagggttcgctcgacagtctgcgcgaggaggggcacatcgatttgcgtgtctccgacccgaagctcgcggcggcgatgctgggctcggaccggatcgactaccggtggctgccgggcagggatggcggcgtgctgcgcctgccggaactgccggaccagcggatcggcaccctgatcacgcagctcgtcggccagggcgtcgcggtctatcgcgtcgcctccgagcgcaagacgctggagcaggcgttcctcgaactgatcgaaagcccgcagagccgcgagcccacgcctcatcaggcgcaaaatgccatggattccgacgccgcacgcgcatccgcgcacgcatccccgcgtcgtccgttgccgatccggcaggctgcgggtcgggcggcgttcgcggcggcggacggaggcgcacaatgagcggcgcggcagtgttcgcggcgacgggccgccgtccgccgcgcccccgcgcgaagaccggcagcccgttcacgctggcgcgtctggagttgttgaaggtgcggggctcgtcgttctggtggatgctgctgggcatgatgctgctggtttcggcgtgggcgggcatggcgttcatgaaacgcgccggcagtcccgtcccgacgttgaggtcggccgcgttggccgatggcgaggtctatcaggtcgtgagcctgctggccccgattctggcggccctgttgaccagccgcatcgccgtgctggagacctcggagcgcatgaacctcacatggctgtcgttcggccagtcggacgcggcccggttcgtgggcaagctcatcgtcgccggcaccggcgtggggctttgcttcctgatcccgttgctgtgggtgccgatcgcggcgaaggcccttggcttcacggtggccggctcgttcgccgcgctggtgtgggtgccggccctgaccggcttcctgtccgcgacggccacgagcgcggtccagctgatgttctcgatgatgatcgacaagcaggccatcggcctgggtctgggcgtcatcgccggcgtgctgggctccggcctgggtgcgatgaacagacccgcgcttggctggctgttcccggccggcctgagttcggccgcgagcccgttcgtcagatccgtggatgcgggcggcaacgccacgatgctgctcgccgcgcgcccgtggatggccgtggcctccgcggccatggcgttcctcggctggacgctggtcagcatggtcgtggtcaaggtgaaggagtcaagacgatgacacacgcaaacgcagtgaacccggcaatcaacccggccgccaatccagctgccggcccgagccatgccgcgatgccccgcgcgcatgcggcgggacgccgcaggccgtccgtgtgggcggcgttccgctgggagacgcgcaaggccggcaacctgtggtactggatcgtgaccgtcttgttcgacgcaatcggcatgttcaacgggtggagccagtacaccggctaccaggcggagttcgccaggcagggcgtgacctgggccgcgatctggggtcaggcgatcctcctgccgagcatggtgttcatgccggtgcttgtggccgcgttcgccgcgcaggtcgaagccaacgagcatcgaggccgcaactggcagcggctgaacgccgccggcaccgtgaacgcggcgatcgccggcaagatgctgcacgggctcgcggcttcggcgctgaccgtcctcgtgttcgaggcagagttcatcctcgtcggacgcttcgccgccggattcgacctcgcgcagctcggcccgttcctgctgcgcggcatcccgctgaccctgtcggtgtgggcgatcatgacgctcacgcaggccgtgagcgcgaaggccgaatcgttcgcgggcacgatgagcgtgatgatggtcctgaccatcggcggatgcgcgctgagcctggccgccccggccatcgccgggccgtatccgctcgccctgatcaccagcgcctccgccgcccgcgacctcgcgaacatcgccagcccggcatccatgctcgcctccacgaccgccgccgccatctgggtcgccatcagcggcctgatcttccaccggctcgccaaacaagccgtctgagcaaccgtccacgggctcccctcacctgcgggagcccgccacctaacaccatggaaaggcttcatcatgcacaccaccggccaacacaacgaacgacacgacgaacaacacaacgcgccacacaacagcgaacagtccatacgcctgccgcgccgcgtcatcgccgtgctgatcgccgccctcgccgcgatcatcctcaccggctgctcgaccggcatcggcgtggccggagacaggaacctccaaggcatacgcacccaagacggcgactcctacacgggcggctacaaggccgactacagcaagttcaccggcgaggaggccgtattcggcggcaccggcaagaaggccagcatccacctgaacggcaccatcacaggcacatccggcaccggcagaatcctcgtgaccaacggcagcgacacgaaacgacccgtgcccgccacgaacggcaaaatcgaccagacctacaacgtcacaggcaccagcttctacatctacgtcaccggcgaccaattcaccggcaccgtgaacctcacatccaaggagcaatgaccatggcaaacacatcccaatacccaaaccagcaaccggcatatacgccggcaccgccggacggcgggcggacatggggcggctgcgccagcctcgcattggccgtccttccccttctgtgcacgctcgtgccccagctgctcggcatccacctctacacgacgggctgggtcaggaacatcctcgtcatcatcgacttcgtatgcctcatcgcttcgctcgtcatcgcgatcgtcacctatcccgaacaggcgggagtacacagaatcgtcagtacaatcgcgatactcctatccgcaggcctgactgccgccggcggcatgctcatcttcctcatgttcatcaaccagtaggaatccgactgacaacggaaaacttctttggaagttcatctaaccgcatacacgccatacagcacaggccacatgcgatacgcttcaacacggatggggcagcacccagggaaggagaatcgcatgaccgcaaaaaccggaaacgacaagcgccacgcggttaccggcctgatcggccacgtggccgcgttctggcggtccagcccggtcgcgcgcatggtcgcgccgatactgtgcctatgctacgacgtgatgatgctcaccagaatcgtattcacccatggcgggggcgattcggcagccatgaaactgttggagcatcaatggggaatccccgtactcgccatcctatgtgtcttatctgttgtggcgctgttgttccgtatcagaatgccgttcgctattttgtgtgccatatgcggattgtatctatgcgcttgcttgcttcaagcggagccatatctgatgttgcctctcttgtttgccgtctacacgtctacagccttggccgcgaccactgaacgtgccattgcgggaatggttttgtcgggattgtcaatcgtttgcggcctctggattgcgaccttccccgccttgcagactgatatacttctgcccgagtccctccttgcgtcgatgaccgctattttagctctttggtcgcgcaacatcagtcagcggcggaagggagcggccttggtggaagctcaacagcaacgaagcctggaattggaacaggaacgcgatgaagaacgtcggcgggcggacgtcgcagccgaactgcatgacagcgtgggccataatctcaccgctatcattgcacttactgaaggcttggagggattgacacaggagccggtggaaggcgctataaagagtatcaataacttagctcggcaaagtctaggtgatacacgcgaggcggtacggaaactttcatctccggtgacgttacggaaaacaaaaacaggaacggttgaactgtgcagctggaatgatataaacccgattcttcaacatgctcgtgatattggaatcgccgccattctgaccgagacaggaaggcgtccagacgatctagcccaagctgatttatgcttccgagtgagtcgtgaggctgtcacaaacacaatgcgccatgggaaaaatataacgcgaattgtggtttcatgggatcatctggataatggggaactccatataacagtgcgtgatgatggtaagccaacgctgaacaaagataaccgcgctaaggggaccggtttcgggcttgctggcctagtgactgaagttacgcgggtcggcgggcaccttcactatggctcatcatcagggcaggggtggactgtttcagccattattccacggcaaaaacgtccatatattcctgtgcaggagggaaacgatgattaacgtaatgatcgtggacgatcagcagccgaccagaatgggtttttcgctcatggtcatgaaagatcctgcgcttcgcatgacgttgcaggcggggaatggacaggatgcccttgatattcttgcggcactgcaattacatgggcagagcctccctgacgtcattcttatggatgttcgcatgcctgttatggatgggctcgatgccacggcaagaatcaaacagttatatccttcaatacgtatcctgattttaaccacatacgatcaggatagctatgcgtttgggggattgagcgccggagcttcgggattcttgcttaaggacgttaagactaaagacctgtgtcgggccattcactcggtgtacgatggagacgccatactcacaccacggattacaaaggaagtgattcgccgaggggttcccaacgtcagcatcaatgctgacactctggccatcagaagtaaattcgattcattgggacctcgcgaattcgaagtctcagcactggtcagcgaaggaatgactaacgctgaaattgctcagcgtctcggaatgcaactggaggcagtcaaaaaggcggttagtaggtctcttgccaagctcgatgtcaaagaacgtgttggtatcgcggtgctctggtataaggccggaatgccgaatctgcagaagtgacagattccgtagaataatgtagggtttctgaatcgtgaagtgctcgtagcgggcgaacccgtgacggtccatgactgtcctcgtttgaatggcgatcggcgcgcatcgtggtaccgccgaccggtattttctcacgtgaatgaagcagcttcagggaatgagtaacagaaaagccaccggcgacacgccgatggcttcaggtgagctcctgcggctgggcttgaaccagcgaccgtccgattaacagtcggatgctctgccaactgagctacgcaggaatgtctgctgtgtttgagatttctctcgcgcacaagtcacatatcttacatgcttgccacgaaaaagcaaattacatgcgtgtagggcatgtcgcgccgaattccgcagaatcggactcatcgaatacccactcatacaacatgatgacgatgcggcgatactgtcacgcgaaatttcattgtggataacttcggaagttggaaccacataggtcgttctggctggacatcctgtttcggacccctcaaggtgggtatcaccggcaaagaagccggaatcgcatcacactcacactatggggaggaatctcatgaatgcaccactgttgtttgattggcgtcgcgacgaagcccgacgtgccagcaggcgacgtcagcaggcgcgtcagcgggctcaggaacggcaacggcgtatggatgccataatcgcgttggccgccgttatcggcctgctgcttgccttgggagtgggactggcatccacgcctcagcatgttgcgcatgcggatactgcggtgaccggagatgcggcatacacggtggaggatttcaccgatatgtctgatctggcgtggcgcaatggcaatcagtgcgaatcccggttcgactggccggtcgacgatccacaggtcgaacaacagttcgagcggccgatcaacccgtgggcaccaggtcatcgtggcgtggatcttgttgcggagcaaggtaccgtaattctgtcaccacaggcagggaccgtgagttttgctggcaaagtagctggcaaagatgtggtgagtctacggcatcgtggaggtgtcacgtcaacattcgaaccggctgttaccgagctctcggtgggggatacgatctcccgcagacagcccgtaggcatcgttgagggcaactcggaccattgcgaagaccgttgcctgcattggggcctcaagcgaggaacggccgactatcttgacccacagcaatatgcggggagtcgaaaaatcgtactgaagccgacatgattcagcaatgttcgtcggccggaacagggccgtacggaagaggcatcgcaggcggctagcggcgtgacgagtatgaatcacagaccggcatcggccaaggagatatatccgggggcgatcagcgcggacttgagattgctggcgctgacagccagcaacggttcgttgatggtcgggatcttcttcacgccgcctacctcggagttcctgattgaaggcatggaattcagcgcttcgttcttgttgagcctggcgcaggcctgagcgatatccgtggcgatggtctgtctgtcttccatgccggtcatccattgcttgccattgacgatggatgggatgttcgagacgtacgcgccgtatccggtcaccagaggccattgcgagtcacggtccttgtcggaagcggaggtgtccttatccgcatcgtcatcggaactggatgagtcgtttgcgttgtcgttttcaggggatttgatcgggtccggcactgcgtcgcggctgagatccttcttgccggtgatattgccgacaatgcccgagatggtgatctgcggattgatatcggcggcagagccggtgtatcccagatcgtccaattccttgacgacctcggaggcgatatagtcgttcatcgtgatgatgccgtcaatacgggtgagtgtggactgcccgtcggtttttgccagacgcttgtcaagcactttcgcagtggagccttccttggcggcatcgtaggccacggcttgccaatcgttttccgtggatttgccgtccaaggtgcctgaagggctttccacaacgcccttctgatagtaggagcccagtacctgccagataccacggaacgcctcttgggcgaacgtggaatcgttggcgttgcctttttcgtccacggcggtgtatggcagcagcacctcaatgtatttggggttgtctttactggccttatccaacttgagtttggacaccatcttttccgcctgtagcttgccgatggtctgggcgtccgagaacttgacgaaggcgtccggcctgtacccctcgatgctgttgccgagcaataccacatgcatgccggattccttggccagcttgagcgatgagaccagccggtccacggcctgcgcctgctcgtccgatgcagtgccgtcgctctcagtgttggacgagtcatctttggaagagctgtcttcggaagaatcaccgtcagaagtagctccctcatccgtggcatcgttggtgctcaggttctggctgacgtaatcgccgtattggcgagtggaagcgtcggcctcgactactggagccacgagcaatgtcatgttgtcgggcgcgatggcaatgccggaatcgtccgtggtgttattcgaaagatgatcgaccacaaagtcttggatggcgcggctttgcttgtccaacgagtcggacgtcgtatgatcgatatcgcctttcttgaaaccggcgtcgaccagggccttggttaggtcgggcaccagcttcgcccatttgttcagtggcgtctgctgattcagcgtaatgccgtccgaaggcgtgaacacggccacgccgccggcagaattggacgtcaccgtggtttgaccatctacaacggtcttattgtctgaggtgcacgcggtcagtgacagcaccatcgcgcaggatgcgacaatggcggcgagcagggtggttgagcggcgtgcgaacaccataagcggcgaaacctcctcaagcgggcgtgaaaacaaactgaatcacgattctagtaggccgtatacgaaaaagtcccggaccagtggacaaatcgccacatatccgggaacaattaggggtatttcgcgcgtgtatcgaacaactgtcatgattgtcgtgctgaggaacattccagatgaagcacgacaatcatgacagttggcgacatgacatgacccatgtaggtccgcacgatgtgttcgatgatttactcggccagagccttggccaggttctcgtccagcgcgttcatgaagccgtcggtgtcgagccacggttcgtccgggccgatgagcatggccagatccttggtcatctgaccaccttcaacggtgtcgacgatgaccttttccagcgtctcggcgaagtgacggacttcgggcgtgccgtccagatcggcgcggtgcttgaggccgccggtccacgcgaagatggaggcgatcgggttggtggaggtcttctcgcccttcttccagcggcggtagtgacgggtcacggtgccgtgcgccgcttcggcctcgacggtctggccgtccggggtcatgagcacggaggtcatgaggcccagcgaaccgaagccctgggccacggagtcggactgcacatcgccatcgtagttcttgcaggcccagatgtaaccgccgtgccacttcagggagctggccaccatgtcgtcgatcaggcggtgctcgtaagtcaggccggcctcggcgtacttgtccttgtattcggtctcgaacacctcagcgaagatgtccttgaattggccgtcgtaggccttcaaaatcgtgttcttggtggacaggtacaccgggtaatgacgcatcaggccgtagttgaagcaggcacgagcgaaaccgcggatcgaatcgttgacgttgtactgcacctgggccacgccgccgtcttcgccgtagttgtagaccacgtgctgaatcggctcggagccatcgtccggagtgaaggtgacggtcagctggccggcgcccggaaccttgaaatcggtggccttgtactggtcgccgaatgcgtgacgggccacgacgatcggcttggcccagccgggcaccagacgaggtacgttgctcatcacgataggctcgcggaagatcgtgccgcccaggatgttgcggatggtgccgttgggggacttccacatcttcttgagaccgaattccttgactcgggcctcatcgggggtgatggtggcgcacttgacgccgacatggtgcttctggatggcgtgggcggcgtcgatggtcacctggtcatcggtctcgtcgcggtgctcgatgcccagatcgtagtagtcgaggttcacgtcgaggtacggcaggatcaggcgatccttgatgtccttccagatcacgcgggtcatctcgtcgccgtcgagttcgacgacagtgccttcgaccttgattttggccatgcttcctcctgatagatggtgtgaagatgatttagtcatagcgcatgtttgtaacgacttgaagcaatcgtccggtccgtgggaaacggccttgttggcgtcccacccgggcaataggctggaaaccatgtctcaggaaattgaaatcggtttgggcaaaaagggccgtctcggctacgcactcgacgatgtggcgatcgtcccctcccgtcgcacccgcgaccccgaggacgtctccacctcttggcagatcgacgcctatgagttcgatgtgccggtgatcggcgcccccatggattcggtgaccagcccggccaccgccatcgccatgggtaagatgggcgcgctcggcgtgctcgatttggaaggtctgtggacccgttacgaggacccgaccccgctgttggacgaaatcgccgggctgccggccgatcaggccaccgagcgtatccagcagatctatgccgagccggtcaagccggagctcatcacgcaacgtctgcacgagattcgcgccgccggtgtcaccgtggccggcgcgctctccccgcagcgcacccagcagttctactccaccgtggtggacgcgggcgtggacctgttcgtgatccgcggcactgtggtctccgccgagcacgtctcctctggccaggaaccgctgaacctcaagaagttcatctacgaccttgacgtgcccgtcatcgtcggcggcgcatccaactacaccgccgctctgcacctgatgcgcaccggcgcggccggcgtgctcgtcggcttcggcggcggcgcggtctccgccacccgccagaccatcggcgtgcaggccccgatggccaccgccatcgccgacgtggccgaggcccgccgcgactacatggacgaatccggcggccgctacgtgcaggtcatcgccgacggcggcatgggcgactccggcagcttcgtcaaggccctggccctcggcgccgacgcggtcatgctcggcgcgccgctggcccgcgccaccgaggcccccggcaagggcacccactggggttccgaagcccgccaccagacgctgccgcgcggctaccgcaccacggtcggcacggtcggcccgctcgaacaggtgctgttcggaccgagccaccaggcggacggcaagaccaacttcatcggcgccctcaagcgcgctatggcctccaccggctacgtcgacgtgaagaacttccagcgttgcggcatggtggtcaacccgtattccgcacgataatcccgattacccccccctgaaaatgggggtttgccctccatgcaggaggcttagcttgccctaaggcgcgctcaagtcgtttgacttggcgcgcctttcgtgatgttgtagtacaaacgctcgccaatgatggtgagttgcaagggggcttgaaggggtcatcatggagtattcgggatttttccacggcacatatcagtacgggccgttgccgagttatgacggattcatcgttgtggagctgtcggatcgcccggtgcggtatcatatccaacccacattcataggcgggctgaatgcgaaggaatgtcattccatggccatggctgcatgccgcatcgcctgcacatcggcggacgcgatacgtggcaaactcagcgtcgcacatctcaacagagccatgacaaaaccatgcctggaacggctgcaaaccatgcaatacctgctcggcacccacatggtcactcatccggagctcaaagcgaaattctgctatctgcccactgtccccacattgatcgacggcatgatcaccggcaaggacacgctggaaatggcggtattcatgaccatcggccaggaaaatctgcgagtcaacctcaaactgaagttcatcggttctcgatggatgtgcatctatgccgatctgggctgaccagacggccccgccctcacaccgattcctacgctggcagcggaagacggttctgccgtgtcataggctggttcgcctatagtagtgaccatgcgtgaacatgtagaagaacccagatatgtcaccaccgatgacgacaccgtctactcgctgctggccaaacgagcagctcacacgccggatgacatcatcgcggaatggcaggatgacaacacccaccaatggcgcggcgccacagctactgaaatgctgtcccgcgtacgcgaggtggccaagggcctgttgggacttggcgtcaaagccggcaccatggtgctgatttactcgcctacctgctatgagtggggtgtggctgatttcgcttgcgcggcaatcggcgctgtggttgtgcccgtctatgagaccgattccgcccgtcagaccgcgggcatcgtcgaggaagtcgatcccgccatcgcctttgccggcgacttccagcgcgcacagacgcttgagcagatccgtgtcaatcatccgggcatgaaatacgtgttcaatttcaaggccgatggccttgacgctgtcgctgacttcgggcatggcgtatccgatgagacgttggatgcggctatcgctcgtatcaaagccgatgatctgcttaccgtggtctacacctccggttccaccggcaagcccaagggcgcgatgctctccaaccgcaattacacgcacatcgtgcttaacggctacgagattctgcgtggcatgctgtacgacgacaaccgtctgctgctgttcctgccactggcgcactgcttcgcccgctacatccagtacgtgtgcatcggtggctgcggcgtggtcggatacattcccgacgccaagcgactgctcgccgatatccgcagcttcaagcccacctacctgctgggcgtgccacgtgtgttcgagaaggtgtataacgcggcctcgcagaaggctggtgccggcatccaggggcatatcttcgcccagtcggtcaagcacttcgtcaagtggagcaaggatgagcaggccggccgcggccattcgttcatcgagcgcatgcgccattcgttctacatggccacggtgggcaaatccattcgttccgctctcggaccgaacctcaaatggctggcctgcggtggtgcgccgctcaacgtggatttggcccacttcttcaacggcatggatgacatcaccttcatccagggttatggcatgaccgaaaccgccgctccgatgctcgtcaattgggaggacgacaacgaggtcggttcggtcggcaagcctgggcctggcatgggcgtgcgtcttggcgaagacgatgaaattgagctgaccggcccgaacgtgttccttggctactacaagcagcccgaactcaccgcacagacgatgactgccgacggctggatcaaaaccggcgatctgggtcgtatcgacgaccgcggcttcaccttcattaccggacgcaagaaggacatcatcatcaccgccggcggcaagaacatcagccccgccccgatggaggatgtcatcgacacctgcccgatcgtggctcatgcagtagtagtcggcgacggcaagccgttcgtgtccgcacttatcgagctcgaccctgaaatgctgcattcctggctggaaggtcagggcctcaatgccgacatgacactcgccgaggccagcgacaacgacgcggtgcgtgcctttatccagcagtacatcgaccaggccaacgccaatgtctcccgcgctgagtccgtgcgcaaattcgcggtgctggatgaggaattcagtcaggagcacggcacgctcaccccgagcatgaaagtggtgcgtcccaaggtattgcagcgctacgccaccgtcatcgaagaggatctgtatgcgcccaagccatccaacaaaccgctgcctgccacagccaagatcatcgacagcacgctggagaccgtcaagaaatcctccgaatcggtcaagcaggcgtccgaacaggtcaaacaggcctcggaacagatgaaaaccagcgtgtctgattcgattgctagcgtgtcggagaagatcaagaagtcgaaggccgaacccgaagagggcgagaccggcgattccgccgacaatgccgacaatgccgctgacaccagcagcaagccggaccggccggctgacgagaagaacgaggagtaacgagaagtggccatccgtgagatcagggtcgtgcccgacccagtcctgcgcaccccctgcgatgagatcaaggaaatcaccccggccgtgcgccgcctggttgacgacctgctggaaaccgtggacgatccgggccgagcgggcctgtccgccaaccagatcggcgtgagcctgagggccttctcctacaacatcgacggcaaggtcggctacgttctgaaccccgtactcgaggagaagtccggcgagcagtatggcgatgaaggttgtctgtccgtgcccggcttgtggtacaagacccgtcgggccgactacgctcgcgtgcgtggcatcgacctggacggcaacgaggtcgtgctcgagggctccgggctgatgggccgtatgcttcagcacgaatgcgaccatctcgacggccacgtgtatttggatcgcctggaaaaggaagaacgccgcgaagccctgcgctacatgcgcaatcgtcaggcgaagtagtccatactcggctcccgctggcgggagccgtcgaacgtagtgagactgagggtggttctgccggtaccgcccgtaactcccctcagtcgcctatggcgacaggttcccctcaaggaggggaacctgtcttcttagtactggctccgtgctattctcgaaacttgtgtgctacccggcaacggacgcagtcgctggcgtccggaaccacccaatattgtcaaccggcacacaacaaattcgcgtcatgctcgcgacggcctgtgtcggtcggctgcacaactcgtgaaaccgggggagtagctgcacgcaggtgcgcatggccaggcaagaaccgacaatgaaaggtagtaataccatggctcagatcactatgagcgatatgctgaaggctggcctgcacttcggccaccagacccgtcgttggaacccgaagatgaagcagttcatcctcacccagcgcaacggcatccacatcatcaacctgttcaagtcgctcgacatgatcgacaaggcgtacgacttcatcaagaccaccgtggcccacaacggcaccgtgctcttcgtcggcaccaagaagcaggctcaggaagctatcgccaaccaggccacccgcgtgaacatgccttacgtctccgagcgttggctcggcggcatgctgaccaacttccagaccgtctccaagcgcgtcaaccgcctcaaggaacttgaggaaatggacttcaccgacgtgcacggctccggcctgaccaagaaggagctcctcctgctcgagcgcgagaaggacaagctcaacaggcagctgggcggtatccgcaacatgaaccgcaccccgtccgcgatgttcgtcgtcgacatcaccaaggaggccctggctgttgaggaagctcacaagctgggtatcccggttgtcgccatcgtcgacaccaacgccgacccggacaccgttgagtacccgatcccggccaacgatgacgccatccgcggcatcgaactgctgaccagcctgatggctgacgccgtcgccgaaggtctgctggagcgctccggcgccaacaaggccgagggcgaagccgccgagcagccgatggccgcttgggagaaggaactcctgaccaacgaggctcctgccgaggcttccgctgaagccgccgctccggctgccgccgagggcgaaaccgccgaggcccccaaggccgagtgatgctctacgatgggaagtgcctgaataagcgcttcccatcgttcatgggtaagcaaaatttctcaaggagaataatcaatggcagcaattaccgccgcactgatcaagcaggttcgtgaagacaccggcgccggcatgctcgacgtcaagaaggctctgaccgaagccgaaggcgacgtcgcccgcgccaaggaaatcatccgagccaagggtatcgccgcagccggcaagcgtgaaggccgcaaggctcaggaaggcaccatcgcctccaaggtcgtcgagaccgccaatggcgagaccggctacgccgtcgagctgaactccgagaccgacttcgtggccaagaccccgaagttcgtcgagttcaccgaggaaggtctcggctacgccgtggacgccgacgccaactccgctgacgagctgctcgaggccaaggccggcgacaccaccgtcaagctggctgtcgaggaggccgccgccctgttcggtgagcacgtcaaggtcggccagttcgccaagatctccggcgagcatgtcgaagtctacgctcacaagaagtccgccgagatgccgccgagcatcgtcgccatgatcgccaccgacaaggccggcgccgccgtggctcacgaagctgctctgcagatctccgccatgggcgccaagtggctgacccgcgaggacgttccggccgatgtggtcgagtccgagcgtcgcgtggccaccgagaagtccctggccgagggcaagccggagaagatcgttccgaagatcgtcgaaggccgtctcaacgctttcttcaaggaagtcgtgctgctcgagcagccgttcgtcaaggacccgtccaagaccgtcggcgacctgttcaaggaagtcggtggcaacgccaccgcattcgcccgtgtcgaggtcggcaagggcgaagaggagtgagcctaaggcttactccacgcgcttagcgtaatttcaacgaaacgccatccggttattcaataatcggatggcgtttcgctattccaagggtgtcgttgctagggggtgtcgtcgtaaaccgatacgcttgtctacggataatttcgcactttcggttttgagaaaggcacaatatgactgatagcgacaagccgcgcagagttctgctcaagttgtccggcgaagcattcggtggtggcaaggtcggcatagatacccatgtgattcgtcgcattgccgaggaaatcgttccggctgtacaacagggtgtgcaggtggccatcgtggtcggcggcggcaacttcttccgcggtgccgaactgcagcaggccggtatcgatcgttcccgcggcgactacatgggtatgctcggcacggtgatgaactgcctcgccctgcaggacttcctggagcaggagggtcaggccacccgcgtgcagaccgccatcaccatgggacaggtcgccgagccgtatattccgctcaaggccatccgtcaccttgaaaagggtcgcgtggtgattttcggcgccggtgccggcatgccgtacttctccaccgacacggtttccatccagcgttccctcgaaatccactgcgacgaagtgcttatgggtaagaacggcgtcgacggcgtctacaccgccgacccgcgcagggacgagaacgccaagcgttttgaaaccctgagctacaatcgcgccctcgtggacaatctggcagtcatggacgcctccgcactgtccatggcccgcgacaacaagaagcgcatccgcgtcttcggcctcgaagagccgggcaacgtgacccgcgccctcgtcggcgatgaaatcggtacgctggtctccaccgccgaatcgcgcgtggccgagtaagccgcaaacgcctacaatcgaatcaaacgttcatagacgaacaacacagacgaacaccaacacacaaggagtgaatatgtctcttatcgaccaggccaaggaacagatggccaggaccgtggaaaacaccaaggaaaacttctccggcatccgcaccggtcgcgcaaacccggccctgctcaacggcatcaccgtggactactatggtgcccccaccccgattaaggccgtcgcctccatcggcgttcccgaaccgcgcaccctgtccgtcaccccgtttgacgcttcccaggccggtgccgtcgaaaaggccctgcgcaactccgacctcggcatcagcccgaaccgtgatggcaacgtcatccgcctgaccatgccggaactcaccgaggaccgtcgtaaggagtacgtcaagctcgccaagggcaaggccgaggacggcaaggtcgccgtgcgcaacattcgccgtaagaccaaggaaaccatcgacaaggccgtcaaggacggcgagatgggtgaggacgaaggcgatcgcctgctgaaggatcttgacaaggtcaccaagtccgttaccgacgagatcgatactctgctggagaccaagcagaaggagatcatggaggtctgattcagaccaggtccggagaattatggaacgcaacgaacaactccatgaagaggccgaggagacgctcgaccggatcaacaagaagaccggccgcaacatgccgcaggccatcgccacaggcgcggcactggtcatccttattgtcgcgtgcctgctgctcagcgtcgacctcttcgtgctgctggtagtcgtgttcatgattctggcgctgtgggagctcagggtggacttcgccaccgtaggcctgcacatcccggtgttcatgctgtggctgtgctcgtccttcaccctcatcgccacctattattccccgtaccatctcatcacgatgtcgctgagtatcatcgtgtcgattattctggtcgccatcgcggccagcgcaaaaatcagcgtcggcaaccgcctatctctggcggttgccggcaaactgtccaacacggatgccagcgcgcgcctcgaatcctcgttcaatcatgagggcggggaacagcatcattcccggctcagccatgtggctgtgtccgtgcttaccgtgttgtacattccgttgctggccagctgcatcatcatctcgctgactttcaatgggcatccgattgcacacgccatcatgctggtgttcctgcccgccctctccgatacgggtggtttgtttgccggtgcctggctcggcaagcacaagctcagcccgcgtatctcgccgaagaagtccgttgagggcctgatcggctcgatgctcttcgccatggctggcgcattcgccgtattcgcatgcacgtatgatgcctcgaaatgggccactcgttggtgggtgccgatcgtggcgggtattctcatcggcgccgtgggcacgttcggtgatttgtgtgcttccatgctcaagcgcgatatcggcatcaaagacatgggccatctgctcaagggacacggcggtgtgatggatcgtgtggattccattttgatgagtgcaccgttcacctgcgccttgctgtgggtcaccggactgtgattcgcatgcctcgtgcatgaacaatgtggcatcgtgtgtatatcgcacggtgccacatgtcatatatgggggaaatcatcgttcaatatgcgttcgccatgggctaagacatgggccatctgattcgtatgcggcacgccgtatggtggattctgatatttctattgcatgtttgactattttctgatattgagagcgaagcgaacccatcatgaccacacagcatcctgacactccggaaaccggcattactcccggcggcacatcaggtgccttccgtgacgtgctatccaaggaccatgcccgccgtggtaagccgccgctgcactttgtggatatgacgcccgagcagcgcatcgagaaagcggccgaactcggattgccgaagttccgagtcaagcagctcgccaaccattactttggccatttcgatgtgaatgccgccgaattcactgattttccggcagccaagcgcagcgaggccgccgccgcgttcttcccgcagctcatcaccgaggtgacccgccaagtggcggacgaaggcaccaccatcaagaccttgtggaagctgttcgacggctcccacatcgaatcggtgcttatgcgatacccgacccgcaccacgctgtgcatttcctcgcaggtcggctgcggcatgggctgcccgttctgcgccaccggcaagcttggcctgacccgtaacatgtccaccggtgaaataatcgaacaggtgcgtgtggccgccaaaatgatgcgtgacggcgaagtggccgggggagagggccgcctgagcaacatcgtgttcatgggtatgggcgagccgatgggcaactacaactccgtgctgtccgccgtacgacagatttccgccatgcctcccgaaggcttcggcatttccgcgcgcaacatcaccgtatccacggtgggcgtggtgcccggcatcaagaagctcactgccgaaggcattcccgtgcgtctggccgtttccctgcatgcccccagcgacgaactgcgtgacgagctggtgccgatgaacaagcgtttcaacaccacgcaggtgttggatgccgcgcacgattattggctggcctccaagcgccgcgtcagtatcgaatacgcgctgatgcgcggcatcaacgaccaggccgagcatgcgcagttgctggccaagaggcttaaccattacggcgacaactgggcccacgtcaacccgattccgctcaaccccatcgagggctcgaagtggaccgcctccaagccgggagacgaacagcggttcctggagatcctgcaccgcgcgggcatcaccgccacactgcgtgacacccgcggccaggacattgacggtgcctgcgggcagttggccgctaaggagcggtagttacttcagcgcatccttgattgcgtccacgaagtagtccaaatcagcgggcttgcgggacgtgatgagcttgaagccgttggcgtcgtccacgtgcagctgctcgtcgacgtaatggccgcccgcgttctcgatatcggcggcgatataacggcagggcgcggcggtcttgccagccaccagacccgcgttgaccagcagccacgcgccatgacagatcgcggcgatcggcttgccttcgtgcgcgaactcctgcgccagcgcgatcgcatcctcattgacgcggatacgatccacattgcaggtaccaccgggcaccaccagtaggtcataatcagcggtctgcacgtcgctcagcagcgcatccggcgtcagcgtctcgccttcgtagcggtcgtgctgcaccgtctcacacgggtccaaggtagtggcggcaagcgtcaccttggcaccggcggccttgagatcgcgcagcgggcgcgtcagctcggattctcatattccagaaacgggtgcggcgcatgtaacgggcggtaggtagtctgaaggactgtaatgcaaagccgaacaggggagtgaagcatgtcgttggcggtacgagtcatcccgtgcctggacgttgacgccggtcgcgtggtgaagggtgtgcatttcgaaaacctcaaggatgcgggcgacccggtggagctggcggccgaatactatcgtcagggcgccgacgagatcaccttcctggatgtgaccgcatccagctcccaccgcaacacgatgattgacgtggtctcccgcaccgccgaacaggtgttcattccgatgaccgtgggcggcggcgtacgcacgcccgaggacgtcgactcgctgctgcgctgcggtgcagacaaggtcggtgtcaacacggcggccatcaatgacccgtcgcttatcagccgcgtggccgaccgtttcggcaaccaggtgctggtgctctccgtggacgcccgccgcgaaaagggcgagcaacacacgcaatccggcttcgaggtcaccacgatgggcggccgcaaatccaccggcattgatgccatctggtgggtcaagcgcgccgagcagcttggcgccggcgagattctgcttaactcgatggacgccgacggtaccaaggaaggctttgatctcgagatgattcgcgccgtgcgcaaggaagtcaagattccgatcatcgcctccggcggtgccggcaaggtcgaggacttcccgcccgccatcgaagcaggtgccgacgcggtgctggccgcatccgtattccattacggcatcctgaccatcgccgatgtcaaggcggaactcaagaagcacggctacaccgttcgctaaacgaatacaccttgctcccgctggacgaacaatccagtggattgttcgtagcagtgcgctatgcacatgtcgcacataatccgggagctgtcagcgaagctgactgagggtggtccacataaggaagataggtatgacagacactacatacgacaattccactgaactcgatccccgtattgccgcacgcctgaagcgtgacgccaagggcctggtcgctgccgtcatccagcagtacgacacacacgaggtgctgatggtcggctacatgaacgacgaggcattacgccgcacgctgaccaccggccgcgtgaccttctggtcccggtcccgtcaggaatactggcgcaagggtgatacatccggccatgtgcaatacgtcaagggcgtgtccctggattgcgacggagacgcactgctcgtcgaagtagaccaagtcggtgccgcctgccacaccggcaagcgcagctgcttcctcgaaggcggccccctgtccgtggtcgaaggccatcgcccggccgagcagtagaacgggcttccctgactgggggaagccgaacgaccgcgtactacgaaacaagacatcgagttgtaagtaaaggagcgaatatgagcgaatgcagcgtcaaacacctgaagtggggcgccacctggcccagtcgcgaacagttccacgaactggccgacgccggctaccgtgtgattccgatcgtgcgccgtctgctcgccgactcgctcaccccggtcggcttctacgagcgtctcgccggcggccgatccggcaccttcatcctcgaatcggcggaatacggcggcacgtggagccgttacagcttcatcggcgtcaactcgatggcccagctgcgctccaacaacggtcaggccgactggctgggcaaggtcccggttggtgtgccagtcaccggtgacgtggtcgaagtcgctcacgccacgttgaagactctgaaggccccgcatgtggaaggcctgccgaacctgaccagcggtctggtcggcacggtcggctgggatgccatccgccactgggaaccgaccctgcgcgccgaagctccggacgagaccggccagcctgagaccgtgctcgccctggccaccgatatcgccgtggtcgaccacgtatccggttcggtgtggctcatcgccaacgcggtgaacgtggatgataaatctacccgcgccgacgtcgcctacaacgaggccgtcgctcgactcgaccagatgcagcacgatgccgccaccccggctccgggcgagtcccgcgtcaacatcttggacgaaacggtcgcccagcctgagctgcgcttccgcaccgagaaaagccactacgagcaggccgtcgaacgcgccaagcagcacatcgtcgacggcgacgtgttccaggtggtcatctcccagcgtctcgacatcgattcgcctgccgacccgttcgacgtgtaccgtgtgttgcgcacgctgaacccgagcccgtacatgtatttcatggcgttgaccgatgctcagggccgcgacttcaacgtgatcggctccagcccggaaaccctcatcaaggtggacaacggccacgcgatgaccttcccgattgccggatcccgccctcgcggcgccacccctgaggaagacgaaaaattcgccaaggaattgcttgccgatccgaaggaacgcagcgagcacatcatgctcgtcgacctgtcccgcaacgacctgagcaaggtgtgcgtgccgcagtccgtggaagtcgtgcagctcatggacatcaagcgtttcagccacatcatgcacatctgctcgacggtcaccggcaaggtcgacccctcgctgaccgcattcgatgtgttcaagtccgcgttcccggccggcacgctttccggcgcgccaaagccgcgcgcagtcgaaatcatcgacgagttggaaccggccgaccgcggcatctacggcggcaccgtcggctacttcgatctctctggcaacatggacatggccatcgccatccgcaccgcgttcctgcgcgaccatgaggcgagcgtgcaggccggtgccggcattgtgctcgactccgtgcccgctaccgaatggcaggagacgcgcaacaaggccgaggccagcgtcgaatccatccagatcgccgcccagctgcgcgaactgtaacgttcaacgcataacgatgcccctgctgacaactgctgtcagcaggggcataacaatatgcgtatcagtgggtttcgcccatgatgtcggtggcgtcggttccggtgctcacagcggcctcgatggcggcttcgatgccgcgcgccatggtcgcgatttccatggtcggcgtgccgttcggcttgcccacgccctgcgcggtcgcatacggcacatgaatgaagccgcccttgacgccggggaatttgcggtcaatcagatacaacacgttatacatgatgctgttgcacacatacgtgcctgccgtatacgacatgaatgcgggaatcccgtggtcattgatgttcctgaccatggccttgaccggcaacgtggcgaaatacgcggtgtcgccgtcctcacgcaacggcgtatcgaacggctgctcgccatcattatcgggaatacgcgcctcggccaaattaatggccactttctccacggtcagagccgaacggccaccagcctgaccaatgcacagcacatagtcaggctgctcgcgcaccatggcttcctcaaccacggtcgcactgcgcgtgaacaccgtcggaatctccagtttcaccactgtcgcaccggcgatttcatccggcaacagcttgactgcctcgaatgcggggttaaccggctcgccgccgaacggatcgaatccggtcaccagaatcttgctcatcattagctccttatttcacggattgttgtggtatttggacaacgaggttattgcgcgatcagcatatagacgatctgcaccacaatcatcaccaatgcgggcagcacctgcttcttaatcacgcccatgcggtccttcatatcgagcatcgcgacgggcacgatgttgaagttggcggccatcggcgtgcacagcgtgccgcagtagccacaggtcagcgccagaatgccaatcaccgtcgggtccgcaccgtaggcgagcacgaatggcgcgccaatgcccacggtcattacggtaatcgcggcgaaggcattgcccatgatcatcgtgaacagcatcatgcccacaccgaatacgatgatgcccagcgtgacgttgcccttcggaataatgccgccgaccagcgtggcgatcacgtcgccgacacctgcggctgtgaaaatcgcgccgagactggccagcagcatcggcagcatgcagagcgcacccatggcagacaacaggcgttccgaatcgttgaggaatacgaccggcttgttgtcatgcgagaacgcgaacagaatcacggcggcaatcatcacaccgatgcagcagccggtcagggcgctgacgctgggaatcagggcgccgataatggcgaacacgcccagacacagggcgggaataaagatgcgcatgccgatgtgctggaagttcgcggccacttcggcggtgctgggagcgctcgaatcggatgccgagcccttacgcacttggcggaagatggcgggaatgaccatgatgataatgagcacgccgtccgcaatggccggaatccaacggccgaatgcgatgacgataccgagcgccgtccagaacacgaaagtgccgtagcgggccttgttggttttatcgagtaggttgcgtacgcccgcatacacggacatgaaacccatgaaaatatagaagaactcgaggattttcgtgccgacggtcacgctggggtccatgaagaacgacatatcaggcctccttgccggtggtggtagcggtggcggcctgagcggcggcttcggcaccgtagtacttcttgcgcagtcgtgtgtccttgatgatgtaatagacggctgtgaccgccacggcaatcaccgcgacaggaatctcgataatggccatgcgcaacagttcgacgtcataacccagcggcttcaacgtggactgcacgagcagcgcaccggccgtacccacgaacagcacctggccaaagaaccatgcgacgttctccatgccggaagccatgcccttgagctcttccacatactcgtcgttcggctcgtgaccggacgcttcaatcgcacctaccgccatcggcatgatgaccggacgcacgaacccggccacgccaccaaaactcacgttgaacgcggcgaacacgagacgcatcacaccatacagggcgatcaccataccgggcgtcgcattcttcactttgccgatcagctgcgcggctgcggttttcagaccgttgcgctccaatgtgccggtgaccagcaacacgatgatgaaaatcgccatgctgcggttcgagacgaacgacgtacccaacgtggtcaggaagccgtcgacgccaatgccgccgaccagcgcagtcaccacagccgccacgataatgatcagaatcgcatcaagtttgagggcgaaacccacaatcacgatcacgattcccaataacacgagataatttggttccatgtgggaaatccttcctatactgcacacgcattgcgccgcaagcgtgcccggatatggatagtgtacgacggaaatcacgattcaactgtcttatcgcgcacattgcaggttattgcatgagtctacgggcgtataagcgtatggacgcatgagcgtcggctgagcccggtcggcatggtgttcgctatgatgtacagtcggactttggtaagagacagtattcgtaacaggcaagtaggttattcatggctattgaggtgcagggacttgaaattcagatcggcgcgcgcacgctgcttcaccccaccaacttccatgtggccaagggagacaagatcggtctggtgggccgcaacggcgccggcaagaccacgctgacccgcgtgatcaccggcgacatgttgcccaccgccggcaaggtgcgcgtctccggcaagctcggctacctgccgcaggacacgcacgcctctgatcccacgcagaccgctctcgaccgcatgatgagcgcgcgtgacatcgccaccatcatcaaccgcatccgcaaggccgaaaaggatatgaccgacccggatccggacgtgatgagcaaggccatgacccggtacgacaaggccatgcaggacttcgacaaggctggcggctacgcggcccagtccgaggcgatttccatggccgcctcgctcggcctgccgcaggaggtcatggagcagcagctcggcacgctctccggtggccagcgccgccgcatcgagctggcgcgcatcctgttctccaacgccgacacccttattctcgacgagccgaccaaccacttggatgccgattccatcgaatggctgcgcggctacttgaagaagtacgagggtggcttcctggtcatctcccactccaccgaactgctggacgaagtggtgaacaaggtctggcatctggatgcgcagctcggccagatcgacatgtattcgctcggctggaaggcctacctgcaccagcgcgtggtggacgaggagcgccgccgccgcgaacgcgaagtggccgagaagaaggccgaccgtctcatgaagcaaggcattcggctgcacgccaaggccaccaaggccgtggcagcgcagaacatgatgcgccgtgccgaaaagctgctggaaaacacctccgaggcgcagaaggccgagaaggtggcggacatccgtttccccgagcccgcgccctgcggccgcacgccgatcatggccaaggatatttccaaggcctacggtgccaacatcgtgttcgccggcgtgaacctggccatcgacaagggctcgcgtgtggtgatcctcggttacaacggtgccggcaagaccaccacgctgcgcctgctggcccacatcgaggagccggacaccggttccgtggaatacggtcacggctgcaagatcggctacttcgcgcaggagcacgacaccttggatctgaacgccaccgtgttggagaacctgcagcatgtggcgcccgagctcgataacacgcaggcccgttcgattctcggctcgttcctgttctccggtgacgacgcgatgaaaccggctcacgtgctttccggcggtgagaagacccgtctggctctggccacgctggtcacctcgcgggccaatgtgctgctgctcgacgagcccaccaacaacctcgaccccgcttcccgtgaggagattctgaaggccattgccaagtatgagggcgccatcgtgctcgtcacccacgatgagggcgccgtcgaggcgctcaaccccgagcgcgtgctcctcatgcccgacggcgacgaagacctctggaatgattcgtacctcgaactcgtagccgaagaatagtcctaccgtggcccccttaccgggagctgtcagcaaagaacgggttaaccctaggctcccctcgctgaggggagtctcgcaagcatgcaaaggaatcaaccatgccaaccacaacaggccagaagatcgccatcgtcaccggcagcgcgctgggtttgggctacgagctcgccagccaactcatcgccaagggctggctggtggccggcatcgacttcaacgccgaacgtcaggccgagctgagcgcgcagtggccagccgaatcctaccgcgccttcgtaggcgacatcaccgacgaagcgtttgtcaaggaatccgtggcgagcatcgccgcgctcggccatatcgacctgctcatcaacaacgccggccagccttcgttcaaggtgcccaccgcctatgaagccgctgacattgacaaatgcctcaaggggctcaaaggcatgatcctgtggacggtggaaactctcaaggcctgtggcgagcgtgacgtgaaaatcgcccagatcatgagcactgccgccacgcgcggcaacgcgaacgaaagcgtgtactgcgccaccaagtggggcgagaagggctataccaagagtctgcaggccgcatacaagggcaccagcgtcaaggtggtcgccgtctatccgggcggcatcgacaccgccttctaccgtgatagccacgattacgtgtccgaagccaagcagcacaccttcatgcagcccggtccgctggccgaggtcatcctcttcaacctgatcaacgaggccaacctcaccgtcaccgacatcgagatcaaccgcaacagctgagctggcaggttatacacatatccaccgattcggccgagctggttgcgcgcagaagttggttatgccatcgtgagttgtatccgtgaataacgcggttcacggatacaaccattggggggatggcatggagtcctatgcatacaacacgttcttcacacttgatgaggcgcgagacctcgcccagaaaacactggaacaatgccgtgccagatcgatgcgcacttcacaggagctttgcttcagccatggcaccaggctacagcttgctggcatgacggccacgctgaattacaagcccaactatgacctcaacaaactgcacgttacggtgtccggggctgaaagattgtcgaatctcaccgaaacgcaatgccattattggggtcatggcattgaccagacgatgattgatgatcttatcgccgtggtttcagtggaacaggcgctgtgtcagatcgcacagttcgtcgatgtggaaagtatggtcattgccttggattgggccacctgccgtaatgagcatttgaaacagacaacgaaagacaagatatcgttgttcctcaccgatataggtaggttccccggtatcagattatttcgcaaagcgctctcgttgtgcagagagaacaccgattcgccgcaggaaagcatccttcgccttgaatcggtaaaacgtggattacccgaattggaggtgaatgctccgatatacctcccgttgcagaacaaagaggtggttgtggacatggtgtatccgaatgatcatgtgattctggaatacgacggacggtaccactatgaccgaaaccgatgggaaggagatatcgagaaaaggaacaacctctccttcgcgggctataagacttttcccgccacaagaagaacgttcgctaccacgcagaatctggatgaatacttcagaatcgttggaagtgcaattgcggaataccgcaataccgggtcattttcacaatgagatatgaccggacgcattcattaggtcgattcttcattcattaggtcggtgagctctgaca

SEQ ID NO: 2074 - DNA, 3671 bp, Unknown
  R17_18m  MAG No. k141_61135
tagcagttcgcgtgccatggaggggggcgatgggcgtgcgtttgggcgggtagcggcggatcatgccgttcctgttctcgttgccgccgcgccgccacgagctgcacgggtcggcgaaatacgtggccatgcccggttcgtcgcgcagctcggcgtgccgggcgagctcggtgccgtcgtcatgcgtcactccggtgcgggcggcggccggcagccgggagaacatggactcctgcgccgccacgctcgcggcggcggtcttgtcgggaacgatcgcggccatggggaaacgggtgcgccgcccgacctcggtgtgcaggctgcagcccgcgccgatgacgccgtcggcctcccgctcgccgaaacggttcctgacgtcccgcccgtaggggcgttcgcagatcgacgtgcgcaacgggacgcgaccgcggcccgcacgcccgcctggcctcgtcggcgtatgtccaccggcggacggcctccgggcggcagcgcgtcacggggccaccgggatgccccatggcgaggcgcccgcacatcaacggcggcgaccggccccggcgcgatcgctccgcgacccacgcccgcaggcggcccgacgccaggcgccgcggtctatgcgcaaccgccttgcggcgcatggccctgcggcgcgcgggcccggccacgtggcagcggcccgtccacggacccgtcctgagccgcctgggccggcacggccggtacgattcgctctcgttggacgggaaccacgtgtcgcgtctgatctcccggccggccgtggacgcatgccgtcccggcatcatggccatgcggcgcacgctcgccccgttgcccatctcaatccggacgacctgccgttcctcttccgacaggtgcgaatacacctggcccaaggcgcaacacccctccgtttggctatccggacaatctccaatctaacggatgttgcacttacaaatagataacggggccccagctgacatgactgatttgaggtatgatatacgtatgtcataccactgttataaggagtaatgatggctatcaaggagaaggccacgatcagtctggatgcacagaccaagcgtgacggcatcgccatacttgacgccatggggttgaacctgagcacgtttgccgaaatgtctctcagacaattggtacgcgacgggcgtctgccattcacgccaagcgtccgcccttcattcgaaaaagacaacgagggatatcccctgttcaaagcgaacatggatgatccccgcatcgtgacgccccagatacgtgatggtgccgtgatcctgccggagggttgggacgatgatgaagactgatccgcgccagttcgagatatggtgggtgccgttcgcttttcccgacaagccaggcaaagcgaagaaccgtcccagcgtgattctccaatgggacgacggcacccgcatcgccttggtgaccaaggtcaccggcaacacctggcgcgacgaaccgggctatgtggtgctgcgtgactggcaggacgcgggactgagcaagcccagcgccgtgcgatgctcgcaactgctgcggctgccaagcaatcttttcctcgacgacggcccgacaggaagactttcggcatatgatgccggccgcgtcgcctgggcgatcaacgaactctatccgggcctactagcctgagagcaaccgataccgtcaccatccctgtcgaggtgcttgccgcagcacgggtcaccgacgtcactcttgtcaagtttggcgtgatgggctgttgtcgcgggcgaatcgttccccgataaccgctaatgcagtccgaaccagccgctgcctcctgcctcccgataaaaatgaattcgtcaaattctttcgggcagcgaatgcagatacatgtatagagcatctgtactattttcaagaatgctcattgtctgcggcaacggttcggcatacacagttttataatccacctcatcgtactctttccgaatggggaaagccaaacgttcatcgtcaacagaaaagtctgcttgtacaccctctttattccctcttgcatctacacgaatccatcggtcaatggatctcagataaatggcattcaaggcatggatgcagtatccgctttcaggcgtactgcctaacgtaagcctttgatagcatattccggcaggaatgccatttgctcttaatagggcggccaataaattagattttgcccaacaaataccgacgccctcccttaatgcgtctgaggctgttgccgtgactcttttgtcttggacatcccatgaatgcttgatttcatctctaacaaaatagtaggcggcttttgccagttcgatttcgccttcagtggagtcttttagttccttggcttgtctttgcacactcggttcattccaatcgatatagtgcgaaaaggcaaggtagctactgatatcatcttgaatatccaacatataacacctccgagaatcccgattcgtcgctctcttactttattaccccgttgcgaagttggttgtttcagcaagtccgacatagcggcttctcaccaagctatctcattttcgtgcagaccgatctgccaaaacaacgacgaccagattggccagcaccatgacaacaagcgtggccaccaacgcaatcaatgcctccgatgccatgttattgaagctcttctccatggccccgccaatgatgatttcaagggcgatgaggaacagggcacatgcatcaacgaggaatatcggagcgtactgcttgtgaatccgattccatgtgtcttcggatgacattgttgccggcgttttgatgcctaccgaattctgcaaaggcaacgttccgttctttgcatcacgatagaccccgaccaaaaacacgccgacgaccacggccacaactacttcgacgataagcatgcgtcaaggacatctcccccctagactagtaatggtttgaatcccgtctgcccaccgatggcaggtcgattacgcgaggtgaccatatggctccagtggagcgtcatatcgaggaagcgctgtatcgcagtgccgtggaactgatcgagcgaaggtatccgacaggatggggaggcgcggcggcgatgcgactcgccggcaaagacaacggtaaacatgacggaagcaacggctcggaggcacttatcgtcacgagcgtggcgattgagacacccaatgccgccgcttcgctatgcatcgaggtcggagcgatgtgcgaggcgatgaagcttgatcgccgtgtcacccacaccatctgcgtcgtacgcgatgacgaacacgccccgttcaccgtgttgtctccatgcggcatctgtcaggaacggctgcgctattggggcgacgacgtgatgtgcgccgtttcagacaacaatcagggagagcatccgttgttcgtgccgctgcgcgacctgcagccgcaccattggactcaggtgtatccactcgccgaattggaacactacgagcgataagccgccctcgattgaaatccctacctccctaagctatgcagtaggctccgcccgcaagtcacactggtacaattttcaggtttgagactgtagcaagttgagtcgctttatcagtaagtctgtatttggaggtatcgatggcccatcgtccgcttatcggcgtggtcccgttgtgggacga

SEQ ID NO: 2075 - DNA, 21763 bp, Unknown
  R17_18m  MAG No. k141_61204
ggctgatatggcactgaagaccgcgatgattgatgtgggcggcgggttccgcgcgattttcggctgcggcgttatggaccgcatgctggaggacggcatcgacgtggacatgtgctatggcgtttccgccggcgcggccaatatgacctcattcatcgcccgccaacatggacgcaaccacaccttctacaccaaatacgccttccgtaaggagtacgcgagcgcggaaagcttcttcaagaaccacaactttgccaacctcgactacatctacggcacgctgagcaaccatgacggtgagaatccggtggatttcgaggcctttgaggccaatccgaccggattcaccgtggtggcctgcaatgccgaggacggctcgaccaagtatttcgacaaatcgcgcgtgcgttttgatgatttcgacatcatcaaggcttcgtccgccgtgccggtggcctgcgagccgtatgtggtggatggtgtgccgtatttcgatggcggcatcgccgatccgatcccggtacagaaggcgctggatgacggctatgatcgcgtgattctgattctgtcccgcttgcgtgacgaagtacgcaagcagcagaaggatctggctccggcccgcattctcgaacgctcccaccccgctgcggctgagaagctgcgcatgcgttacaagacctacaacgacgaactcgaactcgccaagcattatgaggcggaaggcaaagtgctgatcctcgcacccgaagatttgtacggcctcaacaccctgaagaagaacttcgagggtctggagatgatgtaccgcaagggatacgcggcggctgaagccatcccggcgttcctcgggaagtgacggcaccggcgaagtacccgttcacgccaaaccgtatagccgttccgcgttggcatgcgcgatggcgtcgataacccgtttcgcctgattcgcgttccatgcgccatccgatacccagtcgatggcgattcgcgcaatatacctgcggaacagcaccgcggccagataatgcaattcactgatgccgacgccgtccgacgcatagagcaacttgtcaaatgcgcaccacgccagaacattgcgcagcacttccctcacctgcgctcccatatgcgtattggcaaggctgacatccatgtatacgttggcatgcaccgagcagagaaacgccgcttcacgctcgtatggcacgcaatgcagaagcagaagtgtcaaggtgcaggcgcagatcgccggacacgttgaatttctcgttttcggcgaacgagttgtccgcgccgaacaccacccagaccagggcggcgcccaatccgttgcgttcgaaggcttcacgcctgcgggcgggaacggatttggcacgggtcacgccggcatagtccacataggtgccggtgacgatgtccacgggcttgcgttctgcggaaacggtgttgggaatgaagttggacatggcgatttcctttactggtaagaagacaatgaatggattgttagtaagttatcgatatgagtagctgaggcggaatgcggatggacgacaagcccgattcaggcgaaatactcctgaaggttctcgctggcacccagcttcttgcggaagaagccggtgcgaatcgcaatgatgatcaggccgacgaccaacctctttctgtgtttccccaaaccatcgggggaggaacgttgtggttcactgtagtacccgcgaccggctgatggggccgtgtccttatttgaaaatcatcgcttttgatataaggcgtgccatctcccgcatatccgacgcgacccgcgttatgatcactcgcgcgagcctcgtcggacgaatctgtcggccggccactgagtttttaacaatcaaccggatatgccatcgagctcattcgaggctgtcgtgtgcgagccgggcgaaggtgccgttgcggtcgaccagttgacggtaggtgccggtttcattgacgtggccgtggtcgaggacgataatccggtccatgccggttagcacgcggggccggtggctgatgacgatcacagtggtgcccgccggacggttggcgatcagatcatggtagattgcggcctcggcggtggcgtcgaccgcggcggtcggctcgtcgagtatccacaacggcttgccggacaggaacgtgcgggccagcgcaagccgctgccattgcccgccggacaggccaacgccgccccactcctgaccgagctgcgtatccaagccgccgggaagcccatccacgatgtcgagcgcgcgggcgcgacgcaacccgtcacataactcatcgtccgattgccgcagagcgggatcgatgaactcgcgcacggtcacctcgatgtgcgtgaaatcctggaacaccatgctcgacgcgcccaaccgttcggcccacgaccccaaggtacgaccgttcccgccgtccgcgcccgagggcagggtcacagtgccgtccggggcgtcgaggatgccggcgatgagcttgacgagcgtggtcttgcctgacccgttctcgcccaccagtgcgacgatcgatcccgcttcgacatccaacgacacgtcgtccaacgccggagtctgaacggccggaaccgacgctgccgacgcgtcatccgcgtcatcgtcatgctttgcaacagtcggatacgcgtacgtcagatgctccacgtgcacgccgaccggaccggtcgtttcggggatcgcggggttcgcgcgcagcaggcccatgagccgttcgtaggcaagaatcatcggcgtggacgccatgaggttgccgaacgcctcgccagtggtgcgcgtgaccgacaatcccgtcatgatgcccaccaacgcggccgggatgctcgacacggacgcatggccggacgtcaggatcagccagaacgcgccgcccgtcagcacggcgaacacgagcgaactcacaccggtcaactgcaccgtgcgccacgagatacgctcccacatgccggccatattgaaatagcgcacgcgcgcctgcgcagggatgccgaatgaaccggccgtggccgcgatctccgtgctcgacggtggataatccaacaaccgctcgaaatagttcgcccgacgcgactccctgccgcgcttgggccataactcgttcgtgagcttctccacgccgaactgggccaacagctccgggaccatcgccaacgcgatcatcagtgccgccaacggatgcatatgccacaaggacgcggccagcatgaccatcgacgccagcgcgcccaccactgaggtcgcgtccgcggcctgcgaagccacgttgtacgggatcgcgtcgcgcgcggcccgcacctgcgtcgtcacctcgtcgtccaacgtctgcgcgggagtcagacgcgccagcgcgtcggtcagatcggactggtattcggccatcaatggctcctgcaacaagtcacgcatgttctgcgccaacgacgacgacaccgacatcaacaccgcgcccaccgtcagcaccgccaggatcactgcgaaccggcccacgcccagccccgaccccataccaagcccgtccgggccgcacgcccaaccgatcagccacacctgcaacgacggcatcgccatcatcaccaacatcgacagccacatcaccaccgtacgcaccggacgcctacgcaacgcatacgcactcgtccgccacgacgtcgccaccgcatcacaaaacggccgaaatcccgcgacaatcggcatttacaacgcctccccacaatagcgagacacagatgcaatgatagaccgcccgagttctaaatagaagcgcaacacctgtctatggctgaaagtgttcaagttcataaccagagagaaagtgtcgcgctcgatatgagagtgtattcccacctgtcggcagaggaacgtgtccggatcgacgagctgaggacacagccgatcggcgaacgtccgaaacgcgtgggcccgcgccgcaagttcggccattatgagtccgacacggccgtcggcgcctccccgtcgaggcggtgcggcgacacgcaggtcgaacgcaagagccgccgtctgttcgccgggttcatccccgacaagagcgcgctgtccaccgcgcgcgccgaatacgacatctacaaggacatccccgcgcccgcgcgcatcgaccggacctgggacaacggcacggaatcctcctgccacctgctcgtggacgagtcgctcggcatgctcacctactatgcggacccgtactcgtcctatcagaggggcaacaacgagaaccgcaacgggcgcatccgccgctacctgcccaagagaaccagcttcgacgacctgacggacgcggacctgcaggccatcgtcgacgagatcaacgacacccccatgaaggtcctggactgggaaacacccaacgaggtttgataccgcgaactcggcaagctaatgtcgaagacaagctacccaaagacgaacgttgcacttacaaattgaattcgggaagctcactcatgtttaatgtaatatttagaattacattaaacatatcgcatgcaccgcatttttcgagaaacactgtactctcggcaaagacaccaccctacacaccgcaactttccaatgacgcctcatgaccagctcggaaccggtccgacaacagaatcgttgagcacctccttatcgaccgccatcacaaatatcgcctgcatcgcaccaccaaggcaccgatcactcattaaccagcatcgtgagcatatacatcggcaaatatgtgacgccttcctcttggaacacgttggtttccgcgaacaccatcgccttgtcaatggtgtagccatcagcgctcaacgcattgtcaagcgccgcatgagaacggtaatatctgcccgacttaatctccagggccaaaacatcaccatcatcggtctctatcaggaaatccagttcgccaattccttttttcgtaaagtaatacagattggtgaatccatgcgcggtaagttcctgagccacgacattctcatagactccccccatgttcatcgcagcctgaccatccagtatgcccagtgctgacttttttccatacgagctggtcagcaatccaacatcggaatagaacagttttagcaatcgacgttctttgctggctctcagcggggccacgggggcggcaacattaaatacgggcagcgcaacattagcacgggtaagccaaaggaattcatcttcaatctgcgagaatcgtttgacttcggcaatagaactgacttggaatctgcgattttgactttgcagttcactagggataagtcgatacatttcttgaatgaccagtctcttatccttcggcgcatactgcttaatgtcatgctcatagtatgcgcgaatattggtctgaatcgcacgcactggatcgatgaccttgctctcaacaaacgaagtcactgcagccggcataccaccgactaacagataccggtggaacaaatccgtcaaacgctgatggacaaaatcaggaacgggttttacggcaccgtaactgtcacgaacaatgtcgaagacggtttccgacagccccagtgcccaacagaattcttcaaaatccagtggatacatgataaattcatccaagtatccgacaggcagggagcgcacatcctccagttctacgcccaataatgagccggaaagaatatagtcatagtctccccggcccaccagtcctttgataaaagtgacaatctgtggacatgcttgaatttcatcaatgaagataagcgtcttccctacaaccaacggcccttgtgcagcaacagaaatacgcagcatcaaatcatcgggactggtggcttgcgcaaacgaacgacgcacgctgtcgtcaagcaataggttgaactcagccatatgctcatactcgctctgcccaaattcctcaaccagatacgtcttcccaacctgccgtgcaccagtaatgagcaatgcttggttggtcttatgctctttccagaaagcaatacgctgatatgccttgcgtttcaacatgtttcaccccttcgtttcacactcgtctgattttgtaatatcctgtattttacacttatcaagttctataaatgccatattatcgcattcgtcacaatctataagtagatgattctcacactcgtcatgatctgcatacggcccatttgcgcacttgtcggaatcagcgcggaacgcagtgaagcccctcgcttggaggggcttcactatcgatggatgaggatttgcaaacggggtgattacttcgtctcggccgcggtgagcatggccttggtgacctgctcgtagagatcctgataaccgccgggcgtggaagctggcagcaccacggtcttggtgttgttcgattcactcagcgagcgcatcacgtcaagatactggttgaacagcaccacgttgttcacgtcgttgatactcatgcccacggcctgcaggctcttgatctggtcgacgataccgttggcgatctcacggcggtagttggcctggccttcaccctgcagtcgggtcttctcggcttcggcggcggcctgggtctcgatctggatgcgttgggcctcggcgcgctggcgggtggcttccttctcgcgctgggcggcgttgatggagtccatcgcgttcttgacctgcgggctcgggtcgatggcggtgatcagcgtcttgaccacggtgaaaccgaaccggctcatctcggcgcccacggtcttctgcacgtcgaacgccacatcgtccttgcgggcaaaggcatcgtccaaggtcagggccggaatggcggaacgcagcgcgtcctccatgtagctcctcagctggccagccgggtcgcgcagctcgtagtaggcggtggccacgtcgttcgggttcacgcggaactgggtggaggccacgacggtcacgaacacgttgtccaacgtcttggtctccagctgcacgttgagctggttgacgcgcatgttggtcttcatggcgatgcggtcgacgaacgggatacggatgtgaatgccggcgaactgaaccttcaggaacttgccgaagcgttcgatgatgtacgcctgctgctgcggaacgatgaacaatgcggcgcccagcagcacgataagaacgactaatagaatcagcaccaacagcatggttccgcccaacatacttgcgatggtcatataaaactcctctcacaagggtcaagcacggcatatcgttgtgccgcgccccaacaccatccatgctaccatcgcacgcccgggaactgatagctctcacaggcaagtccaagaaagcgaacgtcagatttcatgttccgttcactccggcagccacatcttgtgcactaatgtttgaatcagccaagtcgcacgtcagaaacaacaaagtcgggcatttcagccaaggaaacacccgacttgaatcaagcactgccgccatataaacacatcagaagtgttcgttgagcttcttctcgcagtaatcctgaagccatccaagcaacgtgcagaagagcaagtagatcaagcccacttcaatgtataggaccagcggctcgtagtaaatcgccacaatgcgctgggccgtcatgaacatttccaccacggtgatgttcgccgcgagagacgtgtccttgaccaatgcgatgaaggagttgaacaatgcaggaaaggcggagcggaatgcttgcggcagaataatgcggcgcataatcgtcacatacggcatgttcgccgccaagccagcttcaagctgtcccttaggcacggcaagaatcgcaccacgcaatgtttcggcggcataggcgcccacattcagcgagaacgcgattaccgcggaaggcaatgccggaatcgtaatgccaacggacggcaatccaaagaagataacgaacaactgcaccagcaacggcgtaccacgaaacacccaaatgtagaaccacgcgatttgggaggccacaggtactttagccacacgcaccagcgccaccacaatcgccagtatcaaaccgagagcgaaggaaatcagcgtcagcggaatggtcacagtgataccgggaatcagtagcttagcaaaggaatctacgactattccccatactcgtgcgtccattggtcatcctttgttgtgtggtatatgttgcgtctgctcgtaatcttcacgaggccagctcatatttcccggctccccctaattacaggagagccgggaaacatgtcactcctgagagaagtcctcgccaaagtacttttcggagatcttggtcaatgtgccatccttctgcagcttgacaatggctttgttgacttccttgaccaagtcatcgctgcccttgcggaacggcaggtaggcggccggagtcttctcggacttggcggcaatcttgatgtccgcatccggcttctgcttcaggtagtcgagcgcagcaaggccatcgttcaatgacacatctgcacgaccggacgtgatggcatcgacctgctgaccgaaatcgttaacctgaacgatagtagcgcccttctcctgagcggtcttgttccagttggaggtaccggtttcagcggcgcgaagccccttgacgtcatcgaacgaagtgacgttcttcgggttctccttggaggtaatgacgacaccgtaggagtaggtgtatggttcggagaaatcatacttggccttgcgctcgtcggtggcggaaatctgatcggcaaccgtatcgtacttcttggcatccacaccggcaagcagggagtcgaagctgccctcggcaaactcggccttgataccgacctccttggcaatggccttggccacctcgacatcgtaaccggtcagctcattggttttggagtcatggtaactgaacggagcataggtgccctcagtggcgaacacgattttgccggcctgcttgacctgctccaatgcactggagttggaagcggaagccgaaccgcatgcggcaaccgaaaccagcacggcgacaccggacagcaaagccgcagccttgcgaatcacttgattattgaacatgacaaacccctctcttgatattgtcacaattaattacaacagccgtgaaacgcctctaccgagtcaccggaatcatcagcacattgttggttgaagacaggaactcgacggtacgctcctcctgcggatgttcgaagatccgcttcggatcaccctgctcgaccacatggcctccttcgatgaacaccacatgattcgatgcctcataggcgaaccgcatctcatgggtgaccatcagcatggtcatgccttcgctaccgagttgcttgatgacccccagcaccccgttgaccatttccggatccaatgccgaagtgggctcgtcaagcaccaacagctcaggattcatagccacggcgcgggcgatgctcacacgctgctgttgcccgccggacagtgtgctcggataccgatcatgaaaatcggcaagtcccacacgatcgagttgctcaatggcgatcttgcgggcttcatcaggcttgattcccttggaatacaccaacggttcgatcacattctgcaatgccgtcttgttcaaaaacaggttgtagttctgaaacacgaacccgattttcgaacgcaccttgtgaatgtcggcagatttggtagtggtcaaatccacaagaccatcaccgaaatcgacggtaccggaatccgcgtgctcaaggaaatccagaatgcgcaacagtgtggatttaccggagcctgaggggccgatgacagtaaccacattttgtcgaggaatgtcaagatcaagcccatccagcacggtggtgtcggcaaagctcttgctcactcccctaatccgaatcatcccgatactcccttttcgctgctgttatgcacgtcaacgctcgttcgcgaagcacaatcccttaccgtagacgcgcttgctcacctgtgtttcggcgtggttatatccagtgcctatggagtgctattcacaccaatgaataacacatcggacgccgacgtattgttcgctcacagatgcagcagatcgtcaaactcgtacaactcttgtctttacttgatattcagctcgttgagcttgttcttgatatccacagccgacggttcgacctggaaagtgccatcaggatagagcaccacgggaatgtgctgctggccgctgatggccaccgcacgatcggccgccccatcctcggtttcgatgtcatgccacgtatattcggcgccaagctcctcaagcgtgttcttcgcctgcttgcaatcaccgcaccatgttgcgccatagacgtcaatagccatgtcctgttccttctttcgtaatacaacaacccaaattcacaacgccccaagaataacagcgcaggtttttctcagaacgaacaattatccgcatacgtaagcgatacacgtcagtatgcgttggcaatggcttggtcaaggtccgcaatcaaatcatcgacgttttccaatccgatggaaagtctgatgagattatcgctgactccggcggcgatacgcgcatccaaaggaacctcgcgatgcgtgatgcgcgcaggatcgacaatcagcgaacgcgcgtctccgatgttcggcacataggagaatacctcggttccgtcgatgattcgtctcacgttgttctcatcgccgtcgacgaggaacgacagtatcgtgccgattcctttggggaagtatttggcgaccagatcatactgacccgtgttgcccaaaccggaataattgaccttgagcacatgcggcgcatgcgtgagatgctcggcaatacgcgtggccgattcgacttcctgccgttctcgcacagccagtgtttccaatcccaccatcgacaggtatgtattgaacgggctgggcaccgcgccgaaagtgcgcagatatttgatgcgtacacggcgaatgaacgcctcgcggccgaatctgctggcgaagctgcgcgctattcctttgcgttcatcgctgacgaccagttcgggagtggtgaactgtgggaatctgccgttggcccaatcgaagtttccgccgtcgataaccactccgccgatggcgttgccgtgcccggtgatgcctttcgtggtggaatgcaccacgatatcggctccgaactcgatgggccggaagaggtacggggtgggcacggtattgtcgacgataagcggaataccgttgcgatgcgcgagttccgccaatggttcaatatcggtgatttcagtggatggatttgcaacggattcggtgtagatggcgcgggtgtccggcccgattttcgaagcgacctcatcgaggtcgttgatgtcgcgcacgaaatcggcatggactccgaactgcgggaagaaggtctccatggcatcgacggaagcgccgtacaggttggtcggagagatgatgcgaccaccaccttcggcggcacacaacagcgcatacgacaccgcggccatgccggaggcgacggccaccgcgctcacgccaccttcgagttccgccaaacgacgctcgaacacatccacagtgggattcgccacacgcgagtacgagaagccctcggcttcgccggcacccagtgcgtcaccatgtgcggcgctgaccatgtcaaacgccgcactggcgtaaatcggcgggttcgccgcctcaccgtgagccgcccggtcatagccgccgtgaatagccgcggtaacgaaatccctcgccatggattatcccctcaatgtcatgccgccgtcccttaggaaacaccgacggacgcccatactgatacggcaccagtgtaggaagcgaagcaccgtaacacgtgcttgcgggtacaggcatttcttatcgttcggtatcagccggaatgataggtggggtgcgttcatcgtaactcgttgagcgctttctgcgcgatggccgtgagaaagcgtatgccgtagccgatggcggccggattcggccggaacgtcggcccatgcgcggcaccggtctcaccggcaccgatgtgcacgaacaggccgggcttgcgatcaaggtaatatgagaaatcctctcctcccagttgaggatgatcatcatccgcgtgaagcccctgctcggcgatgacttctcgtccgatgcgggtccatccggcatcgttgaacacggaaggcgatccgaagaaccacgagacatcggcagtggcaccgtaggcggcggccgtgttgttgatgatggcgatggcgcgcttcttggcgagaacccggtcctgcggctcggtagtgcgcaccgtgccttcgaagaaggcatcctgcggaatcacattccacgaattgccggcttctatatgggtgacggacaacacccgcggatggcgagggtcgagattgcgcccaatgaccgcctgcaacccctgcaccacgttcgtcagcacggtgatcgggtcgatgccatcctccggttcggctgcatgcgcgcccttgccgtgaatggcaacctggaatttgtcgaccgcgccggtgatgccaccctcacgtatgagtatggacccaaccggtccggctgcatcgtgcgtgccgaaaaacgcctcgacatcgtccagcacacccgtgttcagcacctgcacggaacccgtggggcgctccgcggtggcacgaccttcctctgccggctggaagatgatcttgacggtaccaggtaatgaggcacgccgttcattgagcagaatcgccgcgcccaacgccacggtgaggttgaagtcatgaccgcagccgtgcatcactccggcattatccgaagcgtagtcaagtccggtattctcggtgatgggcagcccatcgatgtcaccgcgcagggcgatgacgggcttggcgcttgcgccgcgcacgatggccaccacgccggtcctgagtcccgattcgaggatttcaacgccatgcgattccagaatctcacggatgcgcgccgtggtgccgaactcttcataggagagttcaggatgacgatggaaccagcggtaccattcctgcacatcagcgttcagagcatcgggaagtgttacgaacgccgtcggggatgcgcccgatcgggttgttgctgcggtcaccggaacctcctttgcgtgacggcgatgacggacggatgcgaggacgtctcaatcccttcggcttcgctcattgtttcactcctcccaaatacgcctcctgcacccgctcgttgccgagcaggtcgccggctttgccatgcagccggatacgtccgttctgcagcacataaccatagtcggcgatcgagagagccagctcggcctgctgttcgaccatgagcacggaaacgcccaattcgtcacgcagtcgcgctatctgttcgagtacgtcttcgacgagtttgggagacaagcccatcgtcggctcgtccatgcagatgattttcgggcgactcatcagggctcgcgcgaacgccagcatctgctgctcgccgccggacatagtgccggcctgctgcatacgacgttccttcaaacgcgggaaacgatcgtacatggcttccagatcgccggccacaccctccctgtcgtgtcgcgtataggcaccagacaacagattctcctccaccgtcatctgtggaaacacgcgcctcgcctcgggcacggcggcgataccggcttggacccgtctgcgcgtggacagtccggtcacatcctcgccttggaaccacagcgaaccggtcttcggatgattgatgtccaaaatcgtcttcatcgtggtcgacttgccggaagcgttgcctcccagcagagagacgatggcccctttgggtacgcagatcgacacgttctgcaacgcgtggacctgcccgtaatacacattcactccatcgagcgcaagcagggcatccccgccatcatccaacgtcccggtttcatctcgtccggtaccggcaccggtgccctcgacttcgacgacggcgccaatggagttctgcatcgcaagcacatgcgactgcccggcgacccgggtatggttcatttcacgccgcttgccgagatacgcctcgaccacctgcgggtcattgcgcacatcatccggggcgccttgcgcgatgacgcggccgccatccatcgcaagcacacggtcggacaatgcagtgaccagatcgatcttgtgctcgaccaataggatggtatgtccctgcgctttcagatattgcagttgacgaagcacttcggcggtctccgactggttcatgccggcggtcggctcatcgagcagcaggatcttcggttcgctgatgtgggcacgggcgatttcggtacgacgacgattcgcgtacgacaacgtgtaggtgcaatcccgtcgacgcgcgctcagtcgttcacggaaacggtcgatttcccgatccacgcggatgttcacctcatcggcttcgcgccgagtccgcggtccaggaaccagcgccacgccggtctcggcgagcaacgacagccaacgcgcgatcggatacctttgcaggcttttgaacgggcgtgccgcgacgagtcgccggtgatatccgagattgatgttctcttcgacggtaagaccgccgaacacacgaccgttctggaaggtgcgcagcagtccccgttcagacatgtccgcagggctcagaccggcaaccggctcgtcggcaagatcgatgagcccggaatcaggctgcagaaaaccggagatcaggttgattgtggttgattttcccgaaccgttcgggccgatgatggaaatgacctcaccttgatgcaggtcgaaagagaccttgttgacggcatgcagcccctcgaaggacttgtcgagctcgcgcacgcgcagcatcaccggcgcgtcaaggacggcctggcggtgtctttcggaatattcagccagatcatccgcgttatcgaggcgttcgttgtcgatatcgatgccggtcacggcgtctacggtggaaaatacggtctcggaatcggtcatggcgactcagcctttccgggcgaacaggccctggggacggaacaagatgacaagcaccagcagcacgccatacagcaggatgcgcgcgtcggaggcgaaacgcagcaactcgggcgctccgatcagcactatggagccaagcaccgcgccgagcggagagttcataccaccaagcacgatgatggtcaggatgagaatcgacatgttcgagttgaagatcgtcggatcaatgtacgtgtactggtgcgcgagcaacgaaccggcgagacctgcgaaaaacgcggcaagcgcatacgcgagcgccttataggcaccagtgcggatggacagcgcctccgaagcctcgcgatccgatcccacggcctcgaacacgcgccccagatgagcggttcggatacgcatgacgatgaccaacgtgacaagcagcacgatcacgtcaagcagatacatcatctgctgcgtgtacagcgtgacgccgaacaccttcgggaacggaatgccctgaatgccaagagaccccttggtcaacggctcggcgaggcgaatgatcgccaccatcaccgcacctacgccgatggtggcgatggcgacataatggccggaaaacctccatacggggaaggtgagcaccgaggcggcaagcgccgcgatcacacctgcggcgggcaacgccaccaggaagggccaatgcgcctgcgtggccagaatcgcggaggcataggcacccacggcgaacggtcctgccatgcccagaatcgtttggcctgcggagccggaaatcaacgtcagtcccacggcggcgatggcatagatggcgacctgagtgcccacgccggacaggtagtcattgaagaagaacggggtggatacgagtgccacggcaccgatgagattaccccaccaaggcagcgcgatcgccctgccgcctcccaggaacgtgccggtaagcggctcggatttgacatcggtcttcggcccaagcagaccctgcggcttcacgatgaggatgatgatcaacgcgccgaaggtgatgaggtcatgtgcaccgtctccgaacagagagatgccgaacgcttccaccacaccgagcacaagaccgccgaccacagctcccgggatggagcctagaccgccgatcgtggccgccacgaacgccgtcataccaatggtgccgccgttcatcggattgatgttgccgttgaacaagcccacgaagatgccggaaacgccggcgagtacggcaccgatcacaaaggagaggttacggatggccttcaccgggatgcccatctgcatggcggcttcgggatcctgggaagtggcgcgaatggcctgtcccgctttgccgaacttgaggaatgcccataagccaagcatcgagaggacggcaagcgtcaccatcacgatgtccgaagtgccgaaacgcacgccggcgacttgcaggttataggtctgcagcagtttcgggaatggtcgggtctgtggcccgaagacgacctgcagaccattgtcgagcacctggccgacgccaatggtggcgagcagcgccgcaatcggtttacggccttcaagcggagcgatgatcgccatgttcatgaccagccccagcagtgcggtaaccacgagcaccgccacgaatgtgggcacgattccccatccccatgatgaaccgagccaccaggcgatcatcatgcccacggccacgatggaaccttgggcgaagttggccacgttggtgacgccgaagatcagcgacatgccgactgcgaccagcgcataggcgctgccgtgtatcagtccggcgaaaagaacatcaaacattgtgtgcgttacctcgttcgtggtgtatgggaaagcccggggaatcaaccttcgtattgttcgaacttgccatctttgacgatgagcagaatcggatcgatgttatcggcgcgacgactctgccgattgaatttgaacgtgccgccattgccctggtagagcgggaaatccgtcacggtctgcagcgccttctgtatgccttcacgggtcggttcggtcttgttggcggcataggccagatcgatgatcgcctcgtaggcggtcacttcgaaattgcccgggttgttgccgtacttggccttgaagtccttgacgaactgctgggccttggcgtccttggtgccagtggcggagaaggatccggtgatgatcgaaccctcggcgtttttgccggcgagatcgaggaactccttggtttcctgaccaccgaagtacaggccgtcgtaccccagcttgtcgcgcagggtattgatcaccagagcaccgtccggcccgtagccgatgtcgaccaccgcgtcaggcttggcatcgcgcgccggaatcagaatcggcgacaagtcggtggagtcgggcagatagctggactcgtacacaatctgggtaccgtttttttcggcctcctgcttgaagtaccgataggcctgtttgccccagtcgttctcgatgtagaccaccgcgatcctcttggcttttttggccactatatccgcgttggtcttctgatacttgtcctgaccgatttggggagtccatacgtggtccccggtatcggtaaaggtgggtgccgaattattgaaaccgtaatgcacgaggccggcctgctggaagataggcgacgcggccgaggatgcgggcgaggcatagtcacccaccacggcgatgatcgacttgtccgacacgatcttgggagccaccgcggcgtcttgcttggcatcggactgcgtgtcatagtatcgaagaccaagcttcttacccttgacgccgccatccttgttcaccttggcaaccgccagatcgaagccttgctggaacagtttgccgtattgcgcatattgcccggtcttcggatagatgactccgatgttcacggtgtcgtcgctggaaccgctggcggcatccccgccaaggccgcatgcggagacgccaatcagtgttcccgcagtgaccacggatgcgatcgccgtacggatgattgtcttgatggtcatgatgttcccttctctattcgaataattatgaagcgtgaatggggaccggctcagcccacgcggatgtcgctcaacgcctgcagcgcctcgtcgcccgctggggtcggaaccgtgcagcttggtgccagcaaaaacggtttgcccgtacgaagcgcgatggtcttggccaattcgcggcgcacctgttcgacgtcaccgtccggcgcgaacaggtcgtacggggcaccggcgaccggcacagccgtcaggtcggcatccacctgcgggtttcccggttgatactgatcccactgcagcaggtccacacccttcacgtcgaaccaattcgggtgggattcagcacgacaggtgtgcagcagcaccacggcgtccgggttggcgcgatgcaccgcgtcaatcacgatgcgatcgtatggtgcggagaattcaagatagcgttgcgcgtcgaaataaccctcgctcaccgtgccggtgagcgcgtagaacacgccgtcgagtcccgctccgccttcggattcgggacgaaccaacgcacgcgcataggaggcgagtgtgcgggcgatgttggcgagcgcctgcttggcgacatcaggctgatcgaagatcagatcttcgacgcggagcgtcgcggtggcgtaatcgtcacccgggtacagcggcagatcggcgatctgcagcaggacggacaatggcgaaaagacggtctgcagcacggcacgatcctcaaggccatgccggataagggcggcggcggccagagcctcggcgaaatactcattgtcacgaacgtcgagttccttgactccacgcacatcatccggttcggtgattgcggcgctgatcttcttcggcagcacgaatccggcataatcgttgcgatcgtaccgagagccccaagcctcggcatagtatatggcgcgcggattgatcttcacccattcccaatcccagcgattgacgaaatcgatggtggccttggcgaattcctcggcaccgtattcatgaccgacaagatgctgccaggcgctaaccagatacggcgtccgggactgatgattgacgatggcgtggaagtcggcgcgacgattgaccatattggggtcccttctcctgattcgcaacgttatccgtcatcgaagcgcatcggcgatgccgatgtcaagcggaatgccgcccacgtattacaggcatttcttatagcgtcttatccatccgcgaaatcattgcatccttgaagcgcctatcaagaacacctatatgccatttcggaagggacgacgacggttcgggaatccatgcggtattacgggaactgacatacatccgtatccatcatcagaagaggtgaaccgatgggagcaaacctgtatttcatcggcggaggcaatatgccgagcgccatcatagaagcggtgcgacgtaaggccgccgcatatccggtcgaccacatctgggttgaggaaatctcacgggaacgcgccgaatatctggcatccacgtacaacaccgagacggcgtcaccgacggacgccccggatgccgacatcgtggtaatcgcggtgcgcccgcaagacgatgtcgccggcgtagccgcttcagtggcgcgacgtttcgacccggcggagaccacggtgatctccatcgtagccggctataccatcgccaagcttgagcaagggctcggccatgggtggcgtgtggcccgcatcatcccgaacacactcaccaccgtggattacggttacagcggcgtggcgctgaatggggccgcggcacgcgaggacgtggatgcgttcctcaacactttcggcaaagtgctgtatgtcgaggaacgacttatcgacgtaatcaccggtttttacccgccgaacatcgtctaccatttcatcgacgcctacgtggatgccggtgtgctggccggtctgccccgggacgcggccagagccatcgcgctcgacaccatcatcggcggcaccgaattcctcaaacagaaagacgtgctgcctcaagtgctgctcaatatcaacaactcccccggcggagtgggaatcaccgaggcatataccctgaacaaaaccggattcgcggcatccatacaatccgcggtgctggcggcggtcgagcgcaccacggcgctcggcggcgatgcaaagtaaaggcgggagccgatcatgacgcaacaattcacctgggaccatacggtcgaattcgtgaatgacctcaagtccgccgaacggacgttcgccgacgcagggctgacttcccaatacggcggcaagcatgtggggcatggcacggagaactccctggcctacttcgccgataactatttggagttcctggcattgtacgaccgcgaggaagccttgtcggagacgccggaccatgggctgatattccatgaagccggggagctgctgcccgggtatgtgggattctatcgtccggcattgcacgtgcatggcatcgaacaggcggccgaacgactcacggccaaaggccttgatcttggccatatcgttccgggcaatcgcacgacggccgccggtgaggagatacgctggcggttgctatggatcaagggcgatgatcggggcctgcgctatccgttcgtcatcgattggggtgcgagcgaatccgagcaactggcccgctacgagagcggcggactgctgcaccggcatgccatcggcgaagtggacacccgtcgcgcgattttcgcggtgcccgaccccgcggcggtggccgcgcactggtccgacgtgtttggtttgggtctcacggaaggcggggacgccgaccggcccgatgagcactacttcgatctcgatgtgggagggcatcgtgtctggcgcttcgtccagggtcaatgcaacgccatcaccgaattgcagtacgacgcccccgccggcaaatccttcgatgtgaccatcggccaggcgcgattcagaagcctgtaagtacggtccacacacaaccgcaacaacgcatgaggcgtgtgccaccaatccaacggtggcacacgcctcatgccgtaagagagccctgccaatcagtcagtcagcagattcaactcccgcagcttgttcctgatgtccttggcggagggctccacctggaaggagccatcatcgtacagcaccaccggaatatgctgctggccgctgatggccacggcacgatcggcggcaccgtcctcctcttcgatgttatgccagatatacgccgcacccagctcatccaacgtgttcttcgcctgacggcaatcaccacaccatgtggcgccgtacacatcaatggccatgccatgtcctttccgcatgccgcgcttcgtccgcggcttcccatcgcatccatcgtaacggcacatacggccatatcgcatcaggcgaacaccttcggagtcaacgcgccgaatacatcggagtcggtgtgacgttccctgtaccgggcataggcgatatcgaaagcctgtccgaggtcttcgatcagatcgttcgcatcctcgatgccgacggcgagacgcaccagctcatcggtgatgccgaccttcagacgctcctcccggggcagttcgaaatgtgtcatgcggcaaggcagttccgcaagcgattccacggcaccaagggacacagccaatcggaagatgtgcaggttgttgagcacatccgcagggtccacgccaggcactacttcaaagctcagcacgccgccggcgcccttcagtcccttggcggcgagtcgctggtcaccggcccccggcaggcccgggtaa

SEQ ID NO: 2076 - DNA, 9697 bp, Unknown
  R17_18m  MAG No. k141_61319
atccccaagcgtgcagtacgtctctatccggcgctgtttctgctgattccggtcaccgtctccgtcggctggctgctcgatcacgacattctagtttccatccgcgaccaagtcatcaccgtgctgctgggctgctacaactggtacgccattgccggaggccaaagctatttcgaccaaatgaacccgcaggtgtttcgccatctgtggttcattggcgtgctcatgcagttctacgtcatcgtgccgttcatcgtctggctgatgtggaagctccgccagacgaaactgccctcactcatcccactgggactcgcggcgttcagcagtatcgccatgtgggcgatgtatgtgcccaagggcgaccccacccgcgtctacttcggcactgatacccacagcatgggcctgatgctgggtgtggctctcgcctggtgggtcaccgctcctcagttgggccacgctcgtcagggagctgtgccgatgccccgcaccattagatcgagcgcttcggccgccacgtaccgggctccgttacctcagattcctgtaaagcatcgcatctggaatgcgacggcaccggtattggcattcctcagcctgattgccttggtcaccatgacggttatcggcaaacaggatgcattcgccttccgcggcggcatcatattgtccagcctgttgtccgtgctgctgattgccggtaccatctccgacgattcctggatgcaaagcctcatggtgttcaagccattggccgccctcggcaagtattcgtacggcatttacctgtggcactggccgttgtggattctttccagcgcccttgccccgaagatcttcaaggcagcagggccttggcctctcatcatgaccgcgttgctcaccgccattgcggtgatgatttcctggctgatggtggagaaaccggcggcaatgcactcggtgatatccgtcgtggtgccccttcgcacgaacaagaagaatcatgcggcccgggttattgccgttgacgttatcctggcgctgtcgttggtcggctgcgcgcagggcattactcatgcacctgcgaaaaccgccatgcagatccagctggagcaacaggccgcacaactggaacgcatacagaaaaccgaacacgtgctgctgcgccatgccgtgccggcaccgcccaagcccaagcatgagatgcccaccggcgatcagattaccgccataggcgattcggtgatgctggcctcatcacagggcctttcggaagtcttccccggcattcagaccgacgcgagcgtttcccgctccatcatggtcgcccccgaactcatcggcaatgatctgtccgccggcagtctgcggcaatgggtgctgatcggccttggcaccaattcggcaatcacccctgatcagctggaccagattcgtaatatgatcggccccgaccgcgtgctggtactggtcaatgcccacggagaccgtacgtggattccacctaccaaccaggtgcttgccgactatgcggccgcacatccggacaatgtggtgctggtggattggaatgccacagccaacgcgaacgcgcaggtgctcggctccgacggcatccacccgagcatggatagcgatatctatgcaaaggcggtcaaacaggccatcgaacaatggatcgcaagcggcaggtgaacggcaggcaacgctgagttgtccaaccggtcgtgaagaacggctatgctgaagactgcatcaacgagaccacacgttgggagacatggtgagcgcaatccttgaagggaagcccgataagaatcttattctcgttacgggaaggattcatccgaaattggctgaggatgtcgccgagcagctcggcatcgacgtccttgaaaccaccgcatacgatttcgccaacggcgagatgtacgtgcgctacaccgaatcggtgcgtggcgccgatgtgttcgtgctgcaaagccactacaaacccatcaacaaggcgatcatggagcagctcatcatgatcgacgcattgaagcgcgcctcggcccgttccattactgcggtctgcccgttgctcggctactcccgtcaggacaagaagcaccgcggccgcgagcccatctcctgccgtctggtgttcgacctgctgaagaccgccggtgccgaccgcatcatgtcggtcgatctgcatgccgcgcagtcccaaggcttcttcgacggcccggtcgatcatctggtggccatgccggtgctggtcgactacatccgtgatcgtttccaaggccatctcgacaacgtcgccgtcgtctcccccgacgccggccgcattcgcgtggccgagcagtgggcgcagcgtctcggcggcggtccgctcgctttcgtgcacaagactcgcgacatcacccgcccgaaccaggcggtcgccaaccgtgtggtcggcgacgtcgccggcaaggactgcgtgcttgtcgatgacctgatcgacaccgccggtaccatcgcgggcgcatgccacgtgctgcaggacgcgggagccaagtcggtgaccgtggtcgccacgcatggcgtgctctccggcccggccatcgagcggctcaagaactgcggtgcgcgcgaggtcgtgctgaccgacaccgtgccgattcccgaggaaaagcgctgggatggcttgaccgtcctgtcgatcgccccgctgctggccagcgccatccgcgccgtattcgaggacggctcggtcgccgaactgttcgacacctaccccgagcaccacggtcaaggcttcctgttcgcctgatcacgtgcgtgtttgttcaaggaaagcacacgatgcgagacgcgacatggcgtagtctttcggtaaataccgacagtatggtataaatgaacacttgtgggccgaaagcccacgactcccccatggtgtaatggcagcacacgggtctttggaaccctttgtcttggttcgagtccaggtgggggaacggctgacggccgctcgacatccgggcggccgtctattgttttgaggtgtttccaccctcaatagacattccgatcgaagggaatacgtcagttatggcattatccgcagccatcgtcctcgccgccggcgagggtacccgcatgcgttccaacaagccgaaggtgctgcatacttttgcaggcaagaccttcctgaacagggtcatggattcggtgaccgccctgaaccccgacacgctggccgtggtcgtgcacttccaggccgagcgcgtcgccgaagccgcccgctcctatgacgagcaggtcaccatcgtgaaccaggacgacattcccggtaccggtcgcgccgtgcagtgcgcaatggcacagctcaccgaggctggcaaggtcgatggcccggtgctgatcgccgcctccgacatgccgctgctcgacagcgagacgctgcaccgcctggtcgaattccacaccgcctccggcaacggcgccaccgtgctcaccaccatcctcgatgacccgaccggctacggccgcatcatccgcgatcgcgaaggcaacgtgctgcgcatcgtcgagcagaaggacgccaaccgcagcgaactcgccgtgcaggaagtgaacacctcggtctacgtgttcgaggcttccgtgcttaccgaggcaatcgccggactgaagtcgaacaacgcgcagggtgagttctatctgaccgacgcgctggaaaccgccaaggccgctggcaaggtcggcgcgttcgccgctccggatccgctcaccgtcgaaggcgtgaacgaccgcgtgcagctggccgcgctgtccaagacctacaaccgccgcgtctgcgagcgctggatgcgcgacggcgtgaccattcttgacccggaaaccacttggatcgaggacgatgtccagatcggccgcgacgccaccatcctgcccggttccttcctgcaaggccacacggtggtcggcgaggacgccatcgtcggcccgtacaccaccctcattgacgcaaccgtggacgaaggtgccgtggtcgaacgttcccgcgtgcaggaatcgcacatcggcgcacgcacgaacatcggcccgtggacctacctgcgcccgggcaacgagttcggcgaggatgccaaggccggcgcgttcgtcgaaatgaagaaggcgcacatcggcaacggcaccaaggtgccgcacctgagctacgtgggcgacgcccagctcggcgaccacaccaacatcggcggcggcaccatcaccgccaactatgacggtgtgcacaagaatcgcaccaccatcggctctggctgccatgtgggcgccggcaacctgttcgtggccccggtcgaggtcggcgacaacgtgaccaccggtgccggctccgtggtgcgccacgccgtgccgagcgacacaatggtctactccgagaacacgcagcacaacgtcgagggctggaagcccgcctgggagcgctgaaccatgcccgcacttcaggattccatcaacgccgtccgcgtggccgccgaggccgcagaccgtatcaaggccaccgacattgtggccttcgacgtagccgacctgctcggcatcaccgacatcatgatgatcgccggcgcctccaacgagcgtcaggtactggccgtggccgaggaaatcgaaaaggacctgttccttaagtgctccggccgtcagccgcgctctcgcgagggcctgaccgagggccagtgggtgctgcttgactacggtgatttcgtgattcatgtcatgcacgaggaatcgcgcgaattctacgggctcgaacgactctggcgcgactgcccggccatcgatcttaaactcgcacacccggaaacggcggagcatgcggacgctgctgccgtcaccaccgcgtaacgtgcgaatcacataacgctgatattcgctgatactcgctgatactcgtgtgtcgggctgcctgttgccgaacgtcattgacggcaccaggcagccctcccttttccctgtttcctcactggaatcgaaaggatcgtcactatggccaatcatgttcgttccattttccttatccgtcatggacgcacttcctataacgccgctcacaagctccaaggccaggtcgacattccgctggacgccgtgggtgaatggcaggtcaagcagaccgccgcggccttgaaaagcctgtacgtcgatcgtcggccggaaatcaaccaccggttcattgtctgctccgatttgaagcgtgcgcacgccaccgcgcaggctttcgccgacgtattgggtggaatcgagcccgtcgatgatcatcgcgtccgtgaacgcagcttcggcgactgggatggccatgccgtggctgaactggccgaacgctaccctgaggacttccgttcctggatggagtctcggggcggtgaactgaagtatggtgccgaacccaaggaagccgtaggcaaacgcggtgtggaggctcttgaggactggtccacgcgtgccggagacgacacggacctgttcgtgttctcgcacggcgcatggatcgcgcagacattgcagaccctgttgggcatttccgcgatcgatccgaccttctccacggtggtctcattgcgcaatgcgcactgggtgcgcttggtgccgatggacaatcccgatggcactgtgcgctggcgtctgctggactacaatcacggtccggccatcgccgacaccgacgaatgggaacgcgaacgctgatcatgttcccgactcccctgctaatccaataggtccggtgcattcggaaccgttcaagcaataactgaatgactcaatgcctgaataatggcggaaacaagccaaaaagtgtcgccaaatcacacttttgtcatttggcgacacgccggcttttgccagaatcgacatctcgtcgtaatgtatacgaggtccgaacaacgggccaacaattgaaaacggggctatagcgcagctggtagcgcatctccatggcatggagagggtcgggggttcgaatccccctagctccacgacgaagccatcaaatcggatgatatggtggtttctccgctggttcgtggcgggtcttgtgactcccatgaatcggatagcttcactcggggctatagcgcagctggtagcgcatctccatggcatggagagggtcgggggttcgaatccccctagctccacaatcaaggccggtgcttcacacaccggcctttttcgttttctatcctatcgggcgacttttgtgcaacattcccgggaatgcgtcgcaaaacagggactggaatgcatgcagtgcgatactttccccggaaagtatcgccaaggggacgctcttccgattggcgcgacaccggcgtgagagataacagtaatcgccactacaatgaggtgtggtccctatcgtgttgatcatcaaaggagacaaaaacatcgtgaccgtcacccgtgtatatatcgccagccctgaaggcgccaatggccgcaacgtcgtcgcttacggcgtgctcaacgcattgacttccaagtacaagaccatggtgttccgccctgctgtgtccaaccatgacgaattcaccccgatcctgctcgccgcctccaatgcgggactcggcgtggccctgtccaccggcctcgacgtgcataaggtgcgcgccgacaaggacaccgcccgcggagacatcgtcggcgagttcaactacgccatggaggtctcccgcgcgaacgccgccctgatcgtcggcaccgacaaatcccacgtcaacgacccgaccacctacgagttcaacgcggacgtcgccgccgatctgaaggccggggtgttcctggccgtgtgcaccatggaccgatggccgcacgagctcgacgagaccgtcaagctgtccatcgagggcatgcgcgccgcgggcaatacggtgctcggcatcttcgtgaccggctgcgagccgcgccacgccttctccgtcaaggagaccctcgccaaatacggcctgccggtctggaccctgccgcaggtgcccttcaccgacgaatccaccaaggatctggcccttgagaccttccgcaagcacgctcccatcgacgaggtgctcgccgcgctcgacgtggacgtcaccgcgccggtcacgccgtacgccttccaattcgacctgctcggcaaggccaagagcaacaagaagaccatcgtgctgcccgaaggcgaggaggaccgcatcatcaaggcggccgattacctgctcgaacgtgagaccgtgaacctcatcatcgtgggcgacaaggacgccattttggcccgcggcagggaactggggctgaacagtctggggcgcgcccgcttccaggccatggacgacgagaacgtgttgaagcccatggtcgccaagctgtgcgagttgcgcgccaagaagggcatgaccgaggagcaggcccgcaagcaactgaccgacgccagctacttcggcaccatgctggtggtgctcggctatgccgacggactggtttcgggttccgtgcattccaccgccaacaccgtgcgccccgccctgcaggtcatcaagaccaagccgggccagaaactggtctcgggcgcgttcctcatgtgcttcaaggaccatgtggccgtgttcgccgactgcgccatcaacctcaacccggacgccgagcagctttccgaaatcgcgttgcagtccgccgagaccgcacgtgccttcggcatcgacccgaaggtcggtatgctctcctactccaccctcggctccggcaagggcccggacgtggacgtggtcgaggaagccaccaagctgctcaaggagaaggctccggatctgccggtggtcggttccatccagttcgacgccgcctggtcccccaccgtggccgccaccaaggccaagggcaacgatgtggccggacacgtcaacgtgttcgtcttcccggacctgtgcgccggcaacatcggctacaaagccgtgcagcgctcctccggcgccttggccatcggcccggtgctgcagggtctcaacaggccggtaaacgacctgtcccgtggtgcgatggtgcaggacatcatcaacaccatcgccctcaccgccatcgaagcgcagtgagcccggcttggctcccgccaacgggagccactgtactgcttattttgtagcaagcaacgagtaatctaatcaacggtaacccgtgtctcacgggaacattcaatcacaatggaggatgcccacaatggcgaaaaccgtccttgtcatcaattccggctccagctcgatcaagtaccagctggttgatctcgaatccggcgaaggcctcgcttccggcctcgtcgagaagatcggtgagccggtcgacggccactacaagcacgagtacaacggcgaaaagcacgagcttgaagagccgattcacgaccacgagcagggtctgaagcgcgtgctcggcttcttcgaggagtacggcccgaacctgtctgaggctggcattgtcgccgtcggccaccgtgtggtgcagggcggctccatcttcccgaagccggccctcgtgaccaacaagaccatcaaccaggtcaaggatctggctgtgctcgccccgctgcacaacggcccggaggccaagggtgccgaagtcatgcgctccctgctgccggacgttccgcagatcttcgtcttcgattcctccttcttcttccagctgccgaaggccgccagcacctacgcgctgaacaaggaaatcgccgatcagtaccacatccgccgctacggcgcccacggcacctcccacgagtacatctcctccgtggtgccggacgtcatcggcaagccggctgaaggcctgaagcagatcgttctgcacatcggcaacggcgcttccgcttccgctgaagtctccggcaagccggttgagacctccatgggtctgaccccgcttgagggcctgatgatgggtggccgtaccggtgacatcgacccggctgtggtcttccacctgatccgcaacgcccacatgaacgtggacgagctcgatgccctgttcaacaagcgttccggcatgatgggcatgaccggctacggcgatctgcgtgaggttcaccgtctggtgtccgaaggcaacgaggacgccaagctggctctggatgtctacgtgcaccgcatcgtcagctacatcggcaactacacctaccagatgggtggctgcgacgtgatcaccttcaccgctggtgtgggcgagaacgacgacgtggtccgcaagatggtgtgcgacaagctcgctccgttcggtgtcaagctggacgaggagaagaacgccacccgctccaaggaaccgcgcatcatctccactccggactcctccgtgatcatcgccgtgatcccgacgaacgaagaactggccatcgcccgcaagtccgccgcaatcgccgaggctggcaccgatacctacggcaacaccttcgccaagtaagtaaccgccgttaggcatctcactaatctctagttgcaacactatgggggctgattccgattggaatcagcccccattcgtatatggtcaagagaccactacccctgcgtcatactcccctcagtcgcctccggcggacagatcccctcagagaggggatccaggccctataacttggctcccttctctgaggggagctgtccgcgtagcggactgaggggagttccaccagaacacaggaccccttactgcctcagca

SEQ ID NO: 2077 - DNA, 8177 bp, Unknown
  R17_18m  MAG No. k141_61747
acgatgcgggcgatcagttgcccgtcaacggacacgtaggaggccatttcgtccggctgtagcataccgaatcgcgtacgcagcgtttccttttccttagtgttcccggcaatcgtgcggccagatccggcctcagtatccccgcccagaggggactgtctgtgaagcgggctgaggaggtcggccgcctcctgccgtgggccatccgcccggcttacacccgctacctcggcagtcaagaacccatcctccccggctgcagcgaacgacagtcgcccgacgcggacggcatggccgttcacctcgccggacacgcccttgccggagtcctcattaatattcttgacgaccggatattcgcggccgtggccgggccagctggcctctggttcggggcagagacgctggccgtccgcgaaacgctgacgcaagcgggccatcgcgtcggcaccggctttggcgatgcccttcgacaggatgtgtacggaatagctctctacaacgccggccatcatcagcacatggtcctcattaagacgggtctcagctccaggcagcatctcaacgcgcaccacttgcggctgcttgacggtaagcgtgccggttttatcgaagaatacctgggtgacgcggccaaggttttcgagcacatcctgcgccttgatgagcacaccggcggcggcgagacggccagtaccggcgatgtatgccacgggcgcggcgataagcagtggacagggcgtagccagcactaacacctgggcgaaccgcgtcggtatgccggacaccgcccaggcgacgcccgctattaccagcgacagcacagtgaacggaacggccaatcggtcggcggttttcaccacggccggacgggactcctgtgcggaagcgacgagttcgaggatgcgctggtactgggaatcggcggccacctgggtggcgcgcatggtcaaggcagtggaaccgttcactgcgccagacatcactcgggcaccggcgaacacctcgcgcggcaccggctcgccattgatgttgctcagatcgagcgtggccgagccggaaagcagttcgccgtcgaccggcacggtttcgcccggcaacaccatgagcacatcgccgagcttcacctgctcgaccggcaccgtgtcgaagcggtacgtggcggcctcagccgaccagctcccctcagtctcgctccgcgagtcagctcccctcgacggcggtacttggttcccctctccaaggggagctgtcggcgaagtcgactgaggggaggacgtcgccggaaccgagcctacacgccggaagccatcggacgaatcgtccttatcagcggcagccccacaccccacgccaggcaagttgacgacgtgcgcagtttgcggtgctgcctgcatcaatgcggtcaaactgtgctcggccttggcctgcgcgtattcctcaatggcctcgccggacgtaatcatcagcatgaccgcccagcttgcccagtactcgcggacggcaacggtggaaagaatcgccactacggccagcaaatcgacgccgacttgtccgtggcgcaaatcgtcaatcatgccacgcactgtgtcaatcacaatgattgccaccagcgcgattatcagccattggcctacaccaggattacccagcaccggcatcgcaattgcgttgccccatgggcgccaatcgcccagcaatgccagcgggattgcggcgataacaacaacgggaagcatcggcacaagtcggcagatgtcgaggattttggtgaagaatctgatgagtccgctcatcattgctccttacgctcgtatacggagtcgattgcggcaagcgtggcccgcgcaatcggcgctgcggtcacgccttgttaacccaccggcggctttgcttagggcctttcggctccgcgcgaccatccgatacacggcgtaaagaaatcgtttttagttatgtgttgaattattgtgcgcatcgttcgagacattgcccgaatcagcgcttggcctaccctatcagcggcctgaacgcgacatgccgggcggcgaaactacgttggcagctcagtcggaaggcatcaatcgcccccctcctacgattccgccaagaattcccgtgcatatgaggggctcgcagcccttatgcgcctgcagctgacgtcctgccagaacgattcccgtgcatacaaaagcccacggaacaagatatctgccgccgctccggccgacccagccaaacgcttcccgcgtatacgaaaggcccgcagcaggagttgctcactgctacggacctttgcttgtctgacacggtgttcagcggttaccgctcaacaccgtgtgacgcgctaaaccagctttaccacaggccgaacgggtcggagaagccgccgccatcaccggtgccgccatcgttgttgccgttgccattgccgtaaccattccggccgttgccgttctggttgttctgcttattctggctgttaccgttggaatcggagctggacgaaccgttcaccgacgactcctcctgatcgagcgtcacgtccacatccatggtcttgccgtcgcgcacgatggtcagcgtcaccttgtctcccaaagccgcggcacgaacgtaaccaagcagcgagtagttgttgttcaccgcgttgccgttgaaggccacgatggtgtcgccctccttgaggccggccttgtcggccgggccgccggagacgaccgcgctgccggtggcgctggacttggtgatggtcgcgccgccgcgggtcacgccgtcggcttcaaccgtgtcggacttgatgaccacgccgagggcaacgtgcttgaccttgccgtccttgatgatttcgtcggccacacgcttgacgaggttggacgggatggcgaagccgatgccgatcgaaccggcggagtcggaggaggtggcggtcgaggcgatggacgagttgatgccgatcacctggccggccgcgttgaaggtcgggccgccggagttgccggggttgatggccgcgtcgatctggacggcgttggtgacgatctcgttgttgttatcgtcggtcacggtcaccgggcggttcagggcggagacgatgccggtggtggcggtgtcgtcgtagccgagcgggttgccgatggccatcacgttctcgccgacggcgagcttgtcggaatcggcgaatttcacggccttgaggtcgctcggcgggttgtcgagcttgatgaccgcaagatcggtggtggtgtcggtgccgacgagcgtggcggaatacatgttgccgttggcaagcgtcacctgaatctgctgggcaccggagatcacgtggttgttggtgatgatgtggccttcggtgtcgatgatggcgccggagcccttggcggtgccgttgctcaacgcggtctggatggagaccacggagccggagacatcgctggcgacagtctgccagtcgggggcttcgccgctcttggcggtggcggacccggagccggacttattcgagctgacgttggacagcgaattgctggtcggcaaggtgatcaggccgctggtgagggcgccgtaaccgaggcccaggcagaggcccgcagccagaacggcggcgaccacggcgatgaggatgttgctcgccgtcttggacatgccctgcttggcggggccgggctgaccgggctgtcccggctgggccgggccttgaccgttcggcgtaccggtaccgggagtgccgaaaccgaacagaccgccctgctggggctgctggccattccggccattctgaccggactggctggcaaacgggttgccgttgttctgctgcggctgcgtgggcggattgaacggattgccgttgccctgcggctgcgggttattggtgtagtagggattgcggttgccctgctggccctgtggggtttgctgtgcaggctgaccgaacgggaattgctgcgtgggctgggcattgctgccggcctggccgccctgctggccctgtgcctgagtcggggtcggaccataagcgccatattccggggccggacgatacagcggagttgtggccgaggtctggcctgcggccggtgctgccggagaagccggcgaggaggagaccaccgtgctctcgcccttggcggaggcgtagtccgggatgggctcggtggcggcagtgtcggtagcggcttgcgtaggctgctgatcggcagcgagggcggccgaggaaaccggggcttgctgctcgctggaatcgctggcgttgccggcatcaaccgagtcgccacccacaaacgggttcttcggctcggcgttgccggtatcggcagtactattggggttttcgttattccgcggggtctggtcgacgccctgcgggttaaattcgtcagccattgctgctccttttcctaaattcctatcacgtctgttcggcggctattcgggcacttgcccattgccacttctcgtgtgctacctcagtagtaaaggcagtcaatctggaggttttctgaacgttgattgaaagtctatgcgtaatcatcgcagagtcttatgggcatctcggcttcgaggggctgatttcctgtttcgggaacatctacttgcacttcaaggggctgttcgcgcggtcaattccgagtatcaagggccctcatttaacgccattccgccatttttgcagccggcctacttgaccgggagccccttgaagcggaagtagacgttcgggagcggcgaaatccgcccctcgaaaccgagttcttcacaatttccggcccttttctggcccttctgcctaaagtgaacatatgacgatcagccttcttgaacatccgttgggcgcacagcccggacaacccggcgaccgcagcgccttccatttcgaaacgatcacccgcctgccatccacggccagcgggcttgggcgagacggtgcccgatacggccgcaccggcatcattcacacgccccacggcgatattcgcacgcctgccttcgtgccggtgggcacgcaagccgcgatgaaggccgtgttgcccgagcagatgaaggatctaggcgcacagtgcctgctggccaacgccttccacctgttcgagcgcccgggcgaggacgtgctggacgcggccggcggcttggcgcgtttcatgaactgggatgggcccacgttcaccgattctggcggtttccaagtgatgtcgctgggcgtcggcttcaagaagacgctggcaatggacgtgaccggcatgaagtcggacgacatcatcgccaagggcaaggagcgcatggcctgggtggatgaggacggcgtgacgttcaagtcgcctttgaatggtgacgcacatcgtttctccgctgagatttcgatgggcatccagcacaaaatcggcgcagacatcatgttcgcgttcgacgaactcaccacgctgatgaacacccgctcctaccaggaggactcggtggagcgcaccttccgctgggcccgccgatgcgtggacgagcaccagcggctgacggctgagcggctgggcaagccctatcaggcgctgtatggcgtggtgcagggcgcgaattacgaggatctacgccggcgcgcggcctcgcagatcgcctcactggacttcgacggcgtgggcatcggcggcgcgatcgagaagcgcatcattggagacacctgcgcgtggatctgcgacgcgatgccggagaaccgcccgcgccatgtgctgggcatcgcctccgtggacgacatcttcgcctgcgtggaaaacggcggcgacaccttcgactgcgtggcccccgcacgttgcgcccgcaacggcgcgatctacacgcgcgccggccggtacaacatcaagcgcgcccagcataagttcgatttcgggccgctggaggagggatgcgactgctacacatgccagcattattcgcgcgcgtacgtcgaccacctgctgcgcgcccgcgagttcaacgggtttacgttggccacgatccataacgagcatttcttcgtgaagctgctagacgacatccgcgcctcgatcgacggcggatactttgatgagttccgcgacgaagcgttggcccacttctacggcaacggcgagcgccggccagggttgtgagtttttctccttcgttgcggcttgtgccgaacttctctctgctcccctcgctgaggctgagacgttaagcaaacagcccagtgggctgtttgtagtcgaaggtgagacgatagtcgaaccagcaggttgcaggcaaggcccgtccttaattgcggacgagctgtcacgaagtgactgaggggagtgccgccaccctcaaagatcacggcgcccgcaggagacccacaagcgatatatccctgcctcccatgcgacacgccgaagattgcatgattacccagccgggtgtaagttagtcgattgtctgcgagtgtggcggaatggtagacgcgctgtcttcaggtggcagtgagtgtatgctcgtgggggttcaactccccccactcgcaccagcaactaaagggctggaatcggaaggttccagcccttttgctttatccgggcaagcgccgtttttcagggggggctttaggacttaaggcttatggcccaactttcgtggcggaaaatgtcccggtacctgcatcaatcgtttgacgttcaagccaggccagaatccgctgtcccggttcgcgatttcgggcgatctttgcaaaccgggacaatttttgttgccccggtataaatgtcaatcgatttatgcgaaaaccgggacaacgtgccaattccagaatcggccttattccgccgattccgtctgccagacgatatgagttgaggaaaccggagtgtcccggttcacgaaaacaagccggaatcgccgaccgggacagcggattctgccccggtcgacaggtcaaacgattgacatatgaaccgggacaaatacagatcagagagaagcccatgaagcagatttaactttcctcaactttccatccgccataaactagcattacataacatcatgaaccgagacgaaaccaacgaagtatctggagtcaccgacgaccagctcggccgaacggccgagccgtacgaatccggcaactggcggagcggcgtcgggagcatcattcgcagcaatccgaaatcaggaaccgacacaagtcggacccagcagacacgcataatacgagttcacagactcggcgatgtattccgcaaccgcaccaccgaataccacaccacggaagaactgtaagcattacgaaatcaaccttgattattgcgcgggcctatactaggttacggtagcgtaggttagtggtcgggagagcgtcgccggccatagcgaggtgatcagtatgagcgtttccatcagcacgccatctggacgaaccatggcttccgccgcaacagttgcgccttccgcaaccgcgagtcaaaaatccagcgcaaacgccaaccccaccgcactggaccgtgcatcggcccgatacagggccgcgcaatcgcgctaccgccaagccaaggccgcactgaaggcgatcaagcgccagatcgtccccgtggatgcattcggcaatcgcaagccgcgactgcgcggatggcttcacctcgccaccctgccgctgtgcatcgcggcgtccatcgtactcatctgcatcgcgccggccggctcggtcaaagcggcctgcgcggtgtacggcgcctcggccatgctgctgttcggcaacagcgcgctgctgcacgtcgtgccatggcgcagcgcgaaggtgactcgcgtgctgtgcggcatcgattattcgaacatcttcctcatcatcgccggcaccaacacacccgtgctgttcgcgctcagcccggcgattcgccggccatatctcacggtaatctggacgaccacggcgattggcacgatactgcatatcgtctggctgcggacgccgaactgggtgttcaccaccgtatacgtcgtgttggggctggccccggtaacgcttattccgcagctctggacggctcccgcagtaggcccggcgccgaccgtgctcatcgcgtgcggaggcgccgcgtacatcgccggcgctgtatgcttcgcgctgcgcaagccgaaccccgtccccggctggttcgagtttcacgaggtgtttcacttgggcacggtcatcgggtatg

SEQ ID NO: 2078 - DNA, 31491 bp, Unknown
  R17_18m  MAG No. k141_62078
cagcatcagcgcgccgaacaaggtgccgacgaggaagatcactgcaatggccacgtgcaccagcggtgcgcttcttgttctggtccattcgatgacccgtccgacgacattgccctgctcgtttccacgcgggttggagaccacccgcagctcaggtcgggaggaggactgatgcttggtgtgcggtcggttcgaggccggagccgcgttcgatcgaatgttacgtgcggttgccatatgccgttatcccctccttgtacgaattcgcgctgtgtttttggctctgcccggagacgcggagccttgtatcttgacgtcattcaggccctgcgcggtttgcgtaaagcgtttcctccatcgtgacggaatatcacggctgacttccaccgcccgcaaccgcaccgaagccgatctcgggttggctgcgatttcatgttcgccggccttgatggcacctcgcgtgagatccgtgaaaaacggttgggcatccggcggtatgacaggcaggccagccggaacatccactcgcagcccttgtgccatgaacgatttgacggttttgtcttcgagcgaatgataggactccaccaccagtcgtcccccgacatgcagtcggttcgcggcttgcggcaatgtggaggcgagcttgtccaattcgccgttgacttcaatgcgcaacgcctggaagacgcgtttggcgggattgcccgccgggcggtgggcttgcggcaccacttcatcgaccagacggttgagctgtgcggtggtggtaaacggctccttgtctcgacgtgccacgatggcgcgggcgatctgacgcgagaaacgctcttcaccgtattccttgaatatacggaccagttccgccgcatcataggtggcaagaatccgttcggccgtcaacggctggctgacgtccatgcgcatatccagcggcgcatcatgcgaataggagaagccacgatcggtttcgtcgatctgcaggctggataatcccagatccatgaatacggcgtccacacgttctatgcctcggtccgtcaacacctgatcgagctgatcgaaggcggcatgcaccgggatgaatcgatcggcgagcccctcccgttccatgcgttcggtggccagccccagcgcttcactgtcacggtcaatgccgatgagccgagcctgcggcgcggctttgaggaaggcgatggaatggccggcaaggcccagggtgcaatccgctgcgatggcgttctcatgttccagggcaggcgccatcaggttcacgcaatcgtccagcaataccggcagatgaatattcgccacatcaaccatcagaattccacctccggcaacacatcgtcagcgatatcggaatatccctcttccttctcggcgaggtaggactcccacgtgtccttattccacagttcggcacgggtgccaacgccgatcaccacgacgtcggaacccagattggcgtaatcgcgcagcatctgcggcaccagcacgcggccctgcttgtccggctgctgatcgacggcgccggaaaggaacacacgcaggtattcgcgggcggctttgtttcccaccgacacacgctgaatctgcgaggcgatacggcgaaattcatcgaacggcagcaggtacacgcaccgttcctggcctcgggccatgaccaggccctgccccagctgggagcggaatttggccgggagcgccatacggcctttggcgtcgatcttcggcgtatatgtgccgagaagcagcggcggcagaccagccatgagatcagccatagtggtggagccttgtgcgttggcatcagcgtcgcgaatcgtctgatcggcaaccatggctccacctccttcatcgttacgtgggatacacttcggccaactggttcaccactctaccccacgattccccatttctccccactcatgcacgatttgctcacccttttagggcaattaccgatggattgcgcgtgtcggccacgactgtcgcacgaatgggcgctccgcacatccaatccacgttgcgcactccaccgaccgagcagcatggcgaattcacgctgaattcacctattccgggttgtccgcatcactgacgtagggggtgtgcggtaaatttgaatgccttaagttttttctgccccacggaaatggaacgaagagaacagcatgtcgagttacgcctcccagctgcatgaggagcagcaggccgtcgatcgcgcctatggacgattggatgatctgcgagccgaaatgtggcaacgcctggacaccgtacgcgccgccggctcccacggatcccccacgcaacgcagcgaacgagactcctttgccacaatgtacgaaaaccgcctcacgcaattgcgcagcgttgaggatcggctggtgtttggtcgtctcgacgccaagaacggcgaccgtcattacatcggccgcatcggcctgtcgagcccggaccatgagccgattctgaccgactggcgtgccgaagccgcacgtcctttctatgaggcgaccccctccaatcacggcgacatcgtgatgcgcaggcatatcaccttgagtttccgcgaagtcgtgggcgttgaggatgaggtgctcgacgtgcattccgaccaagtcggccaggcgtcttccgccggcacgttgaccggcgagggtgcgctgctggcttcgctgagctcacgccgcaccggcaagatgaccgatatcgtggccaccattcaggccgagcaggaccgcatcatccgctccgacatgaatcgtgccgtggtggtgcagggcggtcccggcaccggcaagacggccgtggcgctccatcgcgccgcctacctgctgtacacgcaccggcgcacgctggaacgttccggcgtgctggttgttggccccagctcggcgttcctgcactacatcgatcaggtgctgccctccttgggcgagaccggcgtggtctcacgcaccatcagcgatctgattcccggcatcaccgccacggcggtcgactccccttatgcagccaagctcaagggcgatcgacgcatgacctccgtagtggccaatgccatcgccgcgcgcgtgcgtgttcccgctgttctgccgacagtaaccattagcggcattcaggtaccaatgctggccactgatatcgagcaggcgcaggcggacgcgaagcgcacccggcaacctcataacaaggcccgcgagacctttatccgttcgatgctgaccagcatgcagaaccgttatgccgaacagcttgattacacgccggatcaggcggagctgaaccgcgcgatgtcgttgctgcgtatgaacgagcaggtgcgcaagaccctgaacctgtgctggctgccgatgaccgccccatggctcatcgatcagctgttcgcccatcccgaacgtctgaagtctctggctggttggctgaccgacaacgacatcgcggcacttgcccgccccaagggctccccgctgacccgctccgatattccgctgctcgacgaagcgatggatatgctgggtcccgatcccaagacggtggcccgccagtccgccgccgacgcacgtcgtgccgccgaagagcagtatgccaaagacacgctggccgcgaccggtctgggtggaggcatcgtctccagtcagatgctgctcgaccagatgaacggggacgacgccgagctgaccgcgcagcgggccgcggccgaccgtgaatggacctacgggcacatcgtggtcgacgaagcgcaggaactgaccgccatggactggcgtatgttgatccgccgttgcccctcccgctcgttcaccatcgtgggcgatgtggcgcagacctcggcgctgggtggcacccgacgctggagcaaatcgatgaaccgcctgttcggcgaaagccactgggatctgaacgagttgaccatcaactaccgtaatccgcaggaagtttccgaactcgcctcacgatttgccgagaaggaaggcctctacatctccacggtcaatgcggtgcgcaccatccccgattcggtgtcccgcaatgtggtgcccgacatgtcgtccttgctggaaacgacggccgagcaggcggcgcagcttgccgaacaattcgtttcggcagacggcaccggccgcatcgccgtcatctgtccggatgatctcatcgccccggtgcgcgacgccgtgcgccgcaaactggccgccgttcttgacccggccgaatacgcaaggctcatcgagcagcccgaatgggatgagcaaatcagcgtctgcggcaccgaaacggtcaagggtctggagttcgatgccgtcgtggtggtcgagcccggtctcatcgaggatgacgcgccgagccgcctggtcgccgcctcggacctgtacgtggcaatgaccaggccgacccagaaactggttatagttcggacaagaacggacgaaaagtccctgaacatctaaggtatgaagcatgcccaaagcactgttattggaaaacattcaccccgacgcggccaaatcgctgcgtgatcacggtttcgaagtcgagaccatgaagggagccctgagcgaggacgaactcatcgacgcgctggatggcgtggacttggtgggcgtacgctccaagaccaacgtcacagcccgcgtgctggatgcgcgtcctacgctaagcgccatcggctgcttctgcatcggcaccaatcaggtcgatctggcacatgccggcaagcgtggcatcgccgtgttcaacgccccctactccaacacccgttccgtggtggaattggtgatttgcgacatcatctgcttgatgcgccgcattcccgcacacacgcatcacatcaagcatggcctgtgggacaagtccgcttccggctcgcatgaagtgcgcggcaagacccttggcatcatcggctacggcaacatcggctcccagctgtcggtactggccgaggccctcggcatgcgcgtggtgttctacgacattgaggagaaactggcactgggcaacgcccaccgttgcgataccctcaacgaactgctggaacagtccgatgccgtgaccctgcacgtggatggccgcaagtcgaacaccggcttcttcggcgaagaccaattcgcccacatgaagcaggacgcgattttcattaacctttcgcgcggtttcgtcgccgatctgggagctctgaagcagcacctcgattccggccatctgtctggcgcggcggtcgacgtgttccccgttgagccgaagaagagcggagatccgttcgagacctcactggccaacgaagacaatatgattctgactcctcatattggcggctccaccttggaggctcaggaatccatcggccatttcgtctctcagcgtcttgaggattactggttcaagggttctacctcattgtccgtgaacctaccgcagatcaacctaggtgaacgcaagggcgtgtgccgtatcgcccatctgcacgacaatcttcctggtgtgctggctcatgtcaatcgcgtgctcggcgaagagaacatcaacgtttccttccagtcgttggccaccgaaggcgaacttggctatgtggtcaccgacgtggctcagaagcccagcgccgccacgcttgaagcactacgcaacatcgagggcaccgttcgcatgcgtgtcatcagctgacgcagctcatcctcgattgatatgaaagagacccgtcgctgacgggtctctttcataagtgcagggcttcatgattggttcgcaccatggtttgcgaatcactcgcatatcacggtgcatggcattcgcatattattcacgcaaaccatcaatggcgctttggaaatcctccagacctgcaaagttctggtacacactcgcgaatcgaaggtacgccaccacatccaagtcacgcaacggtttcaggatggctttgcccacttcatctgaggtgacttcggcaaggcctcgggagcgaagatcctcttcgactttctgtcccagcagcttcagatcctcttctctgaccggccgcccctggcaggctttacgtacgccggaaatcactttgtctctgctgaatggctccacgccacccgaacgtttagtgaccagcagcatactggtttccaccgtggtaaaacgcttgttgcatttcgggcatacgcgacgccgacggatggaatgaccgtcatcgctaatgcgcgtatcaataactttggtgtcggggttctggcaaaaagggcaatgcatgctctccagaataacgtgtacgggcggaaaaaccatgccgctcgggtttcatttactcaaccggaacaataatgcgctgcccggcctgcaatgttccggactcgagattgttcagcgtaatcagctcatccactgtttccgatacatcatggccagcaggtgtaatagccgaagcatatgaccagagcgtatcccccggccgcacgatatagctggtcacctgcgtggcacccgtatctgattgggcccgctgagcggtaagcgcgccgaaaccacaccaggccagcgccaaggcgatcatcactgcgataatccgcccacgcacattccggcgggacgttccagcatgctgcatagctacacgtgcgctacgggccggggccatcaccattgaaccagtcatcacgaccacctctctcgaacagatgttctatcgaacaactgttcttataatggcacaaatgttcgacacggtcaagtcgaaactcgaacagatgtttgatttcacacgaacaacacgttatgctggtgacataacgaaaggagccctgacgtgagcaccattcccctctcccccaagcagaagccggacgagtccaccctgaccgaccgccagcgcaaagtgttggacgccattcgcacgcatatcgacgaacaaggctttgctccctctttccgggagatcggaaatgccgccgggctcaaaagtccgtcttcggtcaagcatcagctacaagttttggaagacaagggcttcattcgcatgaacgcgaacaagggtcgcgccatcgaggtgatggcaggatccgccccgaatgccgaaaagccatcacaagccagcgaagaggcaaccagcgccagcaatgtggcggagatataccaattccccgccgaagccattgccgaatcacatgacgtaccgctcgttggccgtattgccgccggcgtgccgattaccgccgaacagcatgtggacgacgtcatgcgtctgcctgaacggctgaccggctccggcaccctgttcatgctggaagtccacggtgattccatggtggatgccgctatctgcgatggcgactatgtggtggtgcgcgaacagaattccgccgtcaacggagatatcgtcgccgctctgttggatgacgaggccacggtgaagaccttccgcaaggaaaacggccatgtctggctgatgccgcacaaccccgcatactcgcccatcgacggcacacatgccacgattatgggcaaggtggtcaccgtactgcgcaaattatagcctgttcgccaccagctgatcagcgcgcgctgaatcgcgctggtcgtgctatagtcgcacactgcttacgaaaccccggcctcgcgccggggtttcgtcgtattcagaccatatcgcaaatggtattgagaagcggtttcaactcgatagagcgaaggagtacacatggcccatacccatacacccgcaccatccacatccgtaaaccctgccgcgcaccagcgcaggctgattgccacgttgaccgtcactggttcggtcttcctcatcgaagtggtgtcggccgtcttaaccggctcactggccctgctggtggatgccggtcatatgctcaccgacatgtccgtgctggtggcatccacaatcaccgccatactgatgcgccgcaagcccaacaacactcgtacttggggctgggccaggcttgaggtgctcaccgctgccgcgggcgccgtagtattgcttatcgtcggcatctatgcgttggtagaggccggcatgcgtctgttcggcggctccaaagcggaaatcgacgatatcggcttgctgctgttcgtaggcattctgggtcttgtcgcaaatatcatctcgatcttcatccttgcctcgcagcgcgaagacaacatgaacatgaaggccgcgttcctcgaggtaatgaacgacgcacttggctcggtgtctgtggtggcctctgccctggtaatgatctccaccggatggaatggcttcgacgccgtggccggtgccgtcatcgcactgatgatgattccgcgcgccatcaagctgctgcacaacgcggtcaaggtgctgctggaggaaacaccggatggtcttgatctcgataaggtacgcgagcatctggaagacgtgccgcatgtgcttgccgtgcatgacctccatgccagcacggtgtccaccgacatgccgattcttatggcccacgtggtagtcgacaaagacctcaccatggaagatgccgccacaatcctcacccaactgcaggattgcctgcgcgagcacttcccggtctcggtcccccacaccaccttccagcttgagcccgagggctatagctccccctcctccaacgaattccacgaataaaaaatgctccctctggaagcattcagcagggtataaaaaatcgctgtacgtgtgcgatttttcgtgccgcacaaggtgaaggcctacaaaggtagttcgaaccttgtgcggtgtgaaaggcgctccgtacagcgattttttatcagaagccgaactgggcggcggtttccttcagcgtctcggcggagcgcttcagagcggcgagctccttgtcggagaccggggtgttgatggtgttgttgacgccctgacggttgaggagggtcggcacggacatgcagatgtcggagatgccgtggaagtccttgagcatggagctcacgggcaggatgcggttggtgtcgtgcaggacggcttcgatgatgtcgacgccggacatgccgatggcgtagttggtggcacccttaccgttgatgatcttgtaagcggcgttcttgacttcctggtggatctcctcgcgcttggcggcgtcgagcggatcgtggccgggcagcggggtccagtcgcacatggggacaccaccgatggtggcggactcccacagcgggacttcggagtcgccgtgctcgccggcgatgtaggcgtgcacgttcttgacgttgacgccggtctgctgggcaatcaggaagcgcagacgagcggagtccaggttggtgccggaaccgaagacctggttctcgggcagaccggtgagcttctgagccacgtgggtagcgatgtcgaccgggttggtgatgagcatgtagatggcgttcggagccaccttgaccaagttcggcatgatggccttgaggatgttgacggtagcgccaacgagctcaagacgagactgacccggcttctgacgcggaccagcggtgatgacgaccatgtcggcgtcgcggcagatctcaggatcgtcggaaccgtcgatggacacggtcgggtagaagctggagccgtgctgcatgtcgagcacttcggcttccacgcgctccttggcgatgtcttcaagcacgatctcgcgagcgacgccacgctgggcagcggcgaaggcgagggtggagccaacggcaccggcaccaataacagcaagcttcgtgggcttaacggtagtttccgccatgatggatgaacctctcttcaaaggcggtctgctgatgaatggcaggccttgtaactaacggttttcactctataaacccgctaagacgttttgctaccagcacaccaccctgtctgataacggtatggtaatgtttccaacggttgttagcgctcacaaacaaactgtgatgtttatcacgttagtcaatggactgttcgaccacctgagcggcaagatgggcgtcaacgtccgcttcaagctgtatgccatcatcgcggtactccaccttgtccaccttgccgtattcgcgtacacgagagatcagggagccagcggtatacggcagcagagcgttgacatgcacatgcgggaccggcagcagactttcgaccgcggtacgcagctcgtccaatccctcaccggtataggcggagacgatgaacgcatccggctgcagtgcggcgagtcgttcacgtgtcgcctcgtccgcctgatcggccttgttgaatacgagaatacgcggaatcgaggccgtgccttcgatgtccgccaacacgtcattgaccgcgtcgacctgagagaacgggtcagggtgggagccatcgaccacgtgcaggatcacgtcggcctcggccacctcttccagggtggatttgaacgcctcgatcagctgggtgggcaggcggcgcacgaagccgaccgtgtccacgtaggcgtaagcgcgtccgtcgcgggttttggcgcggcgcacggccgtgtccaatgtggcgaacagcgcgttttccaccagttcggccgaaccggtcagacggttggtcaacgaggatttgccggcgttcgtgtagccgaccacggccactgtgggcaggccgaagcgacggcgtgaaccgcgcttgacctcacgtgccggagccatctcacgaatctgacggcgcagtctggcgatacgcgtgcgaattacacgacggtccatttcgattttggtctcgcccgggcctcgcgatccgatgcccgcatccgcgcctgccgcgcgaccgccggcctgacgggacagcgaaccaccccaaccacgcagtcggggcagcatgtattcgagctgcgccaactcaacctgcgccttaccttcacgcgaggtggcgtgctgggcgaagatgtccagaatcaccgcggtgcgatccaccaccttgactttggctgcgtcctccaatgcacggcgctgtgacggcggcaggtcgtcgtccacgataatcgtatcggcttcctcacgcgccacgatgtcggcaatctccttggctttgccggaaccaacgtacgtggctgcatccggcttggagcgatgctgcagcaaaccatcgcataccaccgcaccggcggtttcggcgagcgccgccaactccctcaacgattcctcggccttggcttgcgtggtgacggcggacgaccagacgccgacgagcaccacacgttccagtcgcaccttgcggtattcgacttcggtgacgtcctgcagctcgccgagaccggcgacatgcttgagctcgttgcgggcctcgcgctccccccattcctggttggcgtcctcgtgccagccggtcgcgcgctggctgtcgtcgagcagcacttcggactgcccggccagcacaccttcaggggtaacgtcgttgttgccgcggtcgatgtcggtgtactgggtgttgtcggtcaagtgcgcctcgtttggttggaatggttcacgattcttctatggtcctttattatcatcacatgaggtgacatgctggcatagatcggcacgtaccggcataggccggctgatacaggtcggcatacgagagcggcgaatcccgcagaaatggagcgaccatggcagaacagtatttctctgcggaacccgcgtcgaaagatgtgcgccgcacattgaacgtaacgttgcgcggccatgaggcgaccgctcaggtgtcgaacggcgtgttctccggctcgcgcgtggacctcggtacatcggtattgctgaagcatgcgcccgagccgccacttaccggcgatttcctggatttgggctgcggctggggccctatcgccctgacattggcgtttgagtcgcccgaagcgaacgtgtgggcggtggatgtcaacgagcgcgcgctggacctgacccatgccaacgcacaggcgaacggccgcacgaacattcatgcggctcaggtggacgagtccagcactcccctgcccgccgagaaccagccggcgttctgcgagacggtgccgggcgacctcacgtttgatgcgatttggtcgaatccaccgatccgtgtcggcaaggaagcgctgcatacattgcttatggcttggctgccgaagctcaaggtgggcggcgccgcctatctcgtagtgcagaagaatctcggctccgattcgctgatcccctggctggacgatgcgctcggcgaggggttcactgcgagcaaatacgcgagctccaagggcttccgtatcattgaagtccgtcatgaaatatgagtatcctgcagaacttcccgtatctgccgcgcgtgatgagatagccagcgcggtcaaacgttcccaagtcgttattgtgtccggccagaccggttcgggcaaaaccacacagctgccgaagatcctgcttgagcttggccgtggcacgcacggcaagcagatcgtgcacacccagcctcgccgtatcgccgcgcgcacggtggccgaacgtatcgcctcggagatgggcgtgaagctcggtgacgaggtcggctatcaggtgcgtttcaccgacgaaagctcgcccagcacgcgattgagagtcgtgaccgacggtattctgctcgcccagatccagcgcgatccgaaactcacccaatacgatacgatcatcatcgacgaggcgcatgagcgcagtcttaacatcgactttctgctcggctatctgacggcactgctgcctcagcgccgcgatctgaagctcatcatcacctccgcgaccatcgattcggtcaagttccaggagcatttcgagcacgccttgcatgagaaggtgccggtaatcgaggtttccggccgcaccttccccgtgcaggtggtctatgagccgcttggcaccgcgcccgcgttgatgcgcgaagtgccgggattcgcggtgggcgcccgccccggcgacgccgattacgacgagctggccagcgccatcgcggaatccgattccgaccggccccgcggccggtccggcgactcctatgccgatgacggcatcaccgatatgcccacggccgtggctcgagcctgcgccgaactggtgatccactcctcccatgagcgcggtccccgcgatattctggtcttcgcttccggcgagcgcgacatccacgagttcgaggccgcactgcggcatcattacggtccgcgcgccgacgacatgcgccgaccggacgccatcgagatcatgccgctgttcgcgcgattgtccgccgccgaccagcacaaggtgttcgaatcgcatttgcatcagcgcatcgtcatcgccaccaatgtggctgagacctcgctgaccgtgcccggtatccgctacgtggtggaccccggttccgcccgtatctcccggtattcgaagaccgcaaaggtccagcgtctgccgatcgagccgatcagccaggccagtgccgaccagaggtccggccgatgcggccgcgtggccgacggcatcgcgatccgcctgtattcgcgtgaggattacgagacccgaccgcgcttcaccgagccggaaatcctgcgtacctcgctgggtgccgtggtgcttcacatgctgtcggtgggcgtggcccgcacggccgaggacgtcacgaacttcgggttcatcgatccgccggatatgaaggccgtgtcggacggtttcaatgagctcaccgagctcaaggccatcggccgaaagcgcggcgaggtgacgctcacccataccggccgtcagctggcgcgcatccccatcgacgtgcgtctgggacgtatggttatcgaggccgcgaaaaccggttcgccgaatcttctggcccaggtgctcgtggtcgtggcgttcctgagcttgcaggacccacgtgaacgcccggacgacaagcgtgaggatgccgaccgtatccacaaccgatatgcggatgagacttccgatttcctgacggccctgaacatctgggatcgcgtgttccaagcggacggcgacccgagcaacaacgcgctgcgccgtatctgcaaaaccgagtatctcagctggctgaggatacgccagtggaaagatctcgtctcccagctacgccagatgtgcaaggagctgaagttcaaggtcggcgacccgttgcccgcctcccgcccaggcttggagattcgccagctgccgttgaatcagcaggccgcgcattcgctgtgctgctcgtgggatgcggatggcatccacaagtcgatgctcgccggattgctgtcgatgatgggcatgcaggtggtgcgtgagcccaaggcctccgatttcgcggggctgaccggtgcggcgcgcgcccgtgcgatgaaacgcgcccagaagcagtcgaagaacgattatcagggcgcgcgcggcacccgtttcgccctgttccccgcctccgccgtggccaagaagaccccgtcatgggtgatgagcaccgaactggtggagacctctcgcctgtgggcccgctattcggcggccatcgacccggcgtgggccgaaccgttggccggccaattgacccgcaccacgtatgcggagccgcactggtcgggttcgcgtggctcggctgtggccaccgcgcgcgtgctgctgtatggtctgccgatcgtacaggaccgtgccgtgcagtggggacgcatcaatccgcttgaggcgcgcgacttcctgattcgccagggtctggtcgagggcgatattcagcagcgcttcagttacgacgactttgtgggcaaaaaccgtgacattctcgaggatgccgccgatgacgcgagccgcacccgccagctggcggacaccgtgtccgacgaggatctgttcgacttctacaacgcggtcattcccaacgatgtgaccagcgtggccgatctggcgaaatggtggaagtccgagcatgaccgtcagccgaatctgcttgatttcgacccggccaaggtggagcgtctggcatccagcgattcggtgagtctggacgattaccccgaccattggcatacgaccggatcggacggccaacccatcgacctgcgtttgagctacgtatacgatccggccgacccggccgacggcgtcaccgtgcatgtgccgttgaaggcgctctcgcgtatcacgcccgaccagttcacatggaatgtgccgggcctgttggatgagctgattctgtcgatgatcaaggcgctgcccaagcagctgcgcgtccagttcgtgccggccccggatgccgcgcgtgcgattcgtgactggatcgacgagcattacccggatctgccgggctcgggctcgcagcagaagccgaatctgccgccggtggatgaggatggcacgaccgttggctggcctgatctggcacatgtgttcaccaaggcggccatcgccaccaagggtgcgcagattcatcccgaagtgttggggccggaactggtcgagcgtctttccccgtatctcagggtcacgttctcggtggagcagcaactgccggccggcaagcaccctcgtggacgccggcatgcgcgcggccccgtcaaggtgctgggtgtgtccaaggatctgaaggcgctgcaacgcaagttcgccgcgcaggcggaggcgtcggcccgtcaaatggtcaagaagcaggccgatcaggctggagaacagggcaagctggtcagtcaggcgaacctgttgcataaggcgggtgccaccaccgagtcccgggccacgatgctctggcgtggcgcattggatgcgctgcggttgccggccgaacgcatttcgtcgcgctggctgggtaccgaggcgttgatgctggcttctgctccgtacaagtccaccaaggatctggtcgaagacctgcagctggccacggtcaaacggctgatgccgaatgtcgacaggctctcggacgatgaggcgttggccaatgcggtgctcgatgtgcgcgaagtgtacgaggacaccgtctatcaggtggcgcatgacgtgatcgccgtgctcaaggcttatgccgaagtcgacaaggccactggcggcaaggccgacttgccgatgctgtcggtgctgcagtcggtgcgcgagcacatcgccacgctggtgttccccggattcgtcggcgccgctcccccggacgcgctggcgaacatctcccgatacctgcaggccgatctcatgcgcctggccaaggcgaagaccgacaagaaccgcgacgtgcgatgggcgtgggaggccgacgaggcccgcacgctggtcgacaaggcgatggccaaggccaaggcggagccggccggcccccgccacgagacgctgatgaagcaggccgaacaggcccgttggatgcttgaagagttctacgtgtccctatgggcgcaggagcttggcaccgccaagccggtgagcctgcagcgcatcaagaaggcactggcgtagcgatggcgacgacgcaacggcgcaagccggccaatccgcgcggcagggcgaacgtgattgtcgcggggcggggcgtgtcaggcggcaatcgcaaacgtcgcccgggcaaacgcccgcgcaatcgcaggtatccgctcagcccggcgcgctggtggaagcgggccgggctggcgcagcgcgtcgcggctgtgctggtcaccgtggtggcggccgcatgcgtggtcgcgctggtcgtgggcactgtgcgggtcgtccagtggcgtcgcgacgtgcaggaggccgaggcccgccagctgcagctgacgcagcaatacgacttcaatcccggcgacatcatctcggacggccagttcttcaacgccaatgcgatgagcgaggccgaggtccagtcgttcctcgacaagcagggcgcggcgtgcagcggttcccggtgcctgaaaaccatgaccttcgacactgaggaccaggcggcgaacgagtattgcgcggcgtacgagggcgcgagaaaggagaccgcggccgcgatcgtcgacaagtcggcgcgcgcgtgcggcatcagccagaaggtgctgctcaccgtgatgcagaaggagcagcacctggtcacggccgtcgatccgacggacttccagtacaaggccgccatggggctgagctgcccggacaacgcgaactgcgatccggcctatgccggcttcttcagacaggtgtacggggcggcgcaccgctaccaatactacgtggcgcatgaaagcgcctacggctatcacgccaacgcgctgaactacatccagtaccatccggatgccgggtgcggcggcaccaacgtgtacatcgagaacaaggcgaccgcgctgctctacatctacacgccctaccagccgaacgacgcctcgctggcggccgggttcggcgagggcgactcatgctccagctacggcaaccgcaacttcgccctcatatacaccaactggttcggtgccgcgcgccgataggggcgggacggcaaaaaaccgaaaccacggtaaggctaggtgtcatccgcgccgtcgccgccccgccgcacggccggagaaccggccggatgacgggcggcacggctcacaggtcgatcttcggggaggcgtcgagcagggtacgcgtgtactcggccttgggatggttgagcacgcggccggtctccccgctctccacgacgcgcccgtggcgcagcaccgtgatcacgtcggacatctcctgcacgatgcccaggtcatgggtgatgaacaggcatgcgaaaccgtgctcgcgctgcagccggcgcagcaggtcgagcaccttgcgctgcacggtcacgtccagcgacgacgtcggctcgtcggcgatgagcagcgacgggttgagcgccaaggcgcgcgcgatgccgacgcgctggcgttggccgcccgacagctggtgcgggaaccggccggccacatcggcgggcagctccacctgatcaagcaattcaaggacgcgcttgcgccggtctgtctcgctgagcccgccctgcacgagcatcggctcgccgatgctccatgccacggacttgcgcgggttgagcgccgatccgctgtcctggaacacatagcccatatgcttcaggatctcgcgcttgcgcctgccatgcgccttggcgagatcctccccctcgatgagcaccgtgcccgaggttggcgcgagctggccggagatcaccttggcgatcgtggtcttgccggctcccgattcgcccaccagcgcgcgggtcctgccggccaccagatcgaacgagatgtccttgacggcgaagctgccggccttgtacgacacggccacgtcgttcacctgcgtgatgcgcctgccgccgccgggcgcgtcactttccgtgatgcgttcgccgccggccgcatgttcgccgtctgccgcatgctcgtcgatgcgcaggcgcggcacggcgtcgagcagcatccgcgtgtagtcgtcggacgggtggcggaagacctgcgcgacgctcccctgctcgacgatcacgccgttgtgcatcacgtacacgtcctgcgcggcctgccacaccacgcccatgtcgtgggtgatgagcagcacggccagatcgaggtcgaccgccagcgaggagatcagggcgagaatcgccttctgcgtggtcacgtcgagcgcggtggtcggctcgtcggcgatgagtaccttgggtcggttgatgatcgccatggcgatcatcacgcgctgcagctggccgcccgacagctcatgcgggtacgacgaccacacgcgttcggcgtcgtcgagcccgacctcgcgcagctgttcgagcaccttggccttgcgctcggcggcgctgagctgcttctggtggtatttgagcgattccgcgacctgtacgccgagcgtgaacaccggattgaacgcggtggacggttcctggaacaccgtgccgatgtattcgccgcggatgcgttgcagcggcgcgtcggcggccagcagatcgatgccgcggccggcggcgtccttgccgtcgccgcccggaccggagtccggcccgtcatccacaagggcgtcgtcgaggtacgcgtggcccttcacgctggccaccgacggatcgagacggggcagcgccatcgccgtcaccgacttgccggagccggattcgccgaccagagcggtgatgcgccccgggaacagcctgaggctgacgccgtgggtcacctcccgctcgtcgaagctgacggccagaccgtccacggtcacgatcgcgcgtggttcactcattggaagctccttggatgcacaagcgttggaatgcgtccggcgcgcgcgccagcggaccatgccgccggcgcgcgccggatgcggatgccggctcagttcgcgctggcgagcgagacctgcgtgtagtccgggtacgccgggaagttgccgatgacgaagttggtcacgttcgatccgtggatgaacgtgttcttcgaatagatcagcggcacgaccggcgcgtcggccatgatcgtcttgtcggcctcggcccagatcttgccggcctcggtctgatcgatggtctcggtggccttcttgatcagctcgtcgaccttcgggttcgcgtaacgggccaggttgtagttgccgtggccgatctgcgaggagtcgaacagcggggagatgttggcgtagggcgacgggaagtcgggctgccacgagctgatggccagatcgtagtcgcccttgtcgttggtcagcgtatcggaatacacatcgtcgttgagtgtctggatgtccaccttgacgccggcccgcttgaggctcgtctggatcgaggaggcggtttcggcctgagcggaggtggcgatgagcttgagggtcggggcctgctcgcccgactccttgatcagctgcttggccttgtccacgtcgccggtcggatcggccttgtacaggtcgtagtcctcgcggccctcgatgccgggcgtaatgagcgtggtggcgaagttgccggcgatctcgccgccggaagccgtctggtaggccttcttgtcgaccgcgtactgcagcgcttggcgaatcttcgcgttcttcacgtgttgggtgttgatggcgaggtattccagcgcgccgtcgccgctggtggtcagcagcttcttgtagttcgggttggcctgcgcctgcgcgagctgcgcggccggcacgaatccggacaggaacgagttcttgccttcaccggtgccctgcatgatcgactgggcggccacagaggtgtcctgtcccatcttgaacacgatcttgtcggggcccgcggtgcgcaccggatcggtcttcttgtcccagtaggtgttgcgcacgaagacggcctgcttgccggcctcgttcgactcgaccttgtacgggccggaggccaccggcagcttgccgtagccggacgccgggcccttgccgtcgggcacgggggtgaacgcggcgagcgagacgacccacggccagtcgccgaacggcgcgttgaggtggaagatgatggtcttgtcgttcggcgtctcgatggagctgagctcctggccgtcgaacgggccgtagtagtcctgcgcgccctcgagcagcgtcttgtggtagctcaggccgccggtcagcgagtcggcgaaggaacgctccagcccgtacttgacgtccttggaggtgatgggcgtgccgtcggagaacttgagcccgttcttgagcgtgtacgtccacgtcttgccgtcgtcgctcgacttgccggtgtcggtggccagatcgggcacgaccttcgtctcgcccttgtcggtaatcttccacgcggtcaggcggcggaagatgttgccgttcgtggtggtcggcagaccctggctcttggccgggtccagatccatctccgtgctggacagcagcacgttcagcgtgccgcccttgacggtggtgccgctcgccgagccggtggcggcgttgtcgttggacgcgccgcagccggacagcgccagtaccgcggcacaagcccccgccgcgaatacgcgccatgcgttgttcttcatgatggttttcctctctatcggtgccggtccgtggagcagaccggcaagtatcgcgtgttgcggccgcagccgcactacttcgtgccgagcgcgaccctggggtcgagcaggctgtagcagatgtccacgatcaggttggcgacgatgaccagcacggcggcgaacatcgtcgcgccgaccagcacctgcaggtcgaggttcgacacggaatcgagcagcagcgagccgagcccctgcatcgagaacaccttctcggtgagcaccgcgccgccgagcagcccgcccagatcgaggccgaacatggtcatcacgggcagcagcgcgttgcgcagcgcgtgcttgaagatgatcaccgattcgggcacgcccttggagcgggcggtgcggatgtagtcctggctcagctcgccgatcatctgcgtgcgggtgaccctggtgtagccggcggcgctgagcacggccagcaccagccacggcagcagcagatgcgtgaaccagccgacagggtcgtcgtggaagttcacgtacccgccgctggggaatatctgcagcaccagcgaaaaggcgatcaccgtcagcaggccgatcaggtatgacggtgccgaaacgcccacgatcgacagcccgagcagcgtgcggtcgatcagcgtatcgcgcttgagggccgcccacacgccggtcgccacgccgatgaccagccacagcacggccgcgccgaccgcgatcgacgcggtgatcgggaagcggtcgaggatcagctggctcaccgattcgttgagacggaacgaatacccgaggcatggtgccgagcagaccacggcaccgccgccgctgccgaaggtgcgcccgacgaagatgcccgccacgtaattgcccatctgctcgtaccacggcttatcggtgcccatgaaggcggagacccgctgcagctgctcgggcgtgcacggcttgccgcacgacagctgcgccggattggtcggcagcaggaagaagatcaggaacagcgccagcgtgatgagcaggatgacgacgatcgagctcgccacgcgcttgccgatgtattgcaggattctcatgcacgcacccccttgcgcgggtcgatggcgtcgctcaggccatcgccaagcaggttgaagccgaaggtcagcaggaacagggcggcgcccgggaagatcagatacatcgggtcgaccagtgcccactgcacggcgtcggagatggaccggccccatgagggcgtcggtgggttcatgccgacgccgaggaacgacaggcccgcctcggcgccgatgcgcccggggatcgacagcgtgatgttgacgatgagcagcggcatgaggttcggcaggatctgatgccacagcacatgggcaggcgaggcgcccatcaccttggacgcgacggcgaaattgcgcttgctcagcgtcagcgtctgcccccggacaagacgcgcgatgccgggccatccgaagaatccgagcactagcgtcagcagcaccggcctcgggaagccctgcggcaccaccgccgacagcgcgatcgcgaagatcaggaacgggaagccgaagaagacgtccatcgtgcgcgagatcagcgcatcgaccaacccggggaaatagccggccagcagcccgagcgccacgccgatgaccagcgagatgaccgacgagacgacgccgatgcccagcgagatccgtgagccgtacgccacgatggagaacaggtcgacgccgcgcagcggggtgacgccgaaccagtgccgggcactgatgccgccgccgaatccggccggcaccgacccggcacccaaggcctcgggatgctcggcgtacgggtcgttgccggtgatggccgacaacggcccggccagcggcgccagcagcacgaagaacagcacgatggcgccgccgaccactatcgatgagcgagcgccggaacggagaacgcgccgccgtctttccgccttcggcgcggctttcgcagtcgcatccgtcatattgtcatccccattttcacgctgaacatgccgataatcatcaatccgcgcaggtgggcgcccgtgagccgggtccccctgcagccggtgtcctaacattaaggtttcgcagcaggatgacatgctgtggccttatcggttatttggatagcaggttatcaatggacggcaatcggcggataaggcatgccgcggggacatgcgggaaaaacccttcgttcccgcgcgtcacgccacccgtcattccccgaccgggctgacgtacggacgcagcagtgtcgtggtgccgaccgccagcaacgcaaaaatcgcgccgaccgggccgagccaggtcaggccaaggaggtcgttgaccaggccgccgaccgcggagccgatggcgatgccgatgttgaacgacatggaattcagggaggcggccagattcaccgaaccgggatgggattggtaggccacatccatatacagcacctgggaagcggaattctgcaggtacatgagcatgccaagcgccaccagcagcagtgcgccgccggccggcaccagcgaggcgaaagccagcaggcacaggcagacggcctgcacgcagtagatcggtcgaatgtgggtcagcggctcgacccccctgccccgatcggccagcttgcctccgtacaggttgctccacaggcaggcacagccgtagaccaccaagccgacgctgatatagcgttcgggcacaccgatttcgtcgcgcatgatcggcgagagatacgtgtagaagacgtaggaggcggctgcgccaaagaccacatccgccacgccgagctggatgcggcggtcgaagaacagacggaattgcctcaggaaaccgatcttcgccggatgcgagttgcgtggcagagacaccgccatcgatgccatcagcacggcggtgagcaccgaaaccaaggcaaaggtgacacgccagccgaaagtattggccacccaagtgccggccggtacgccgaccacagaggcgatggagaaacccgagaatacccaggcaatgaacttggtgcggtatttgtcggtggtcacgtcgggcgcgaaggtcatggagatggccaccagcgtgccggacaccgaggcgatgagcagtcgggcgatgagcagcaccggatagttcggcgcgaaggcgcacaggatattgccgacgaggaacacgcccatcaacgtcagataggtgagaaagcgcgggaatcgggcggataatgcggatccgagcggcgtgcagggcgcgtacacgaatgcgaagatggccaccagattacccacggtcacttcggagaccttaagtccggatgcgatgtccggcaggatgcccactaccacgaattcgctcatgcccagcatgaagctggcgaagatcaggatggtgaccggcagattgaagaagcggtcggtgcgcgcggtgttcgcaggtgtgttcgtcatgggtgctctcttgagtgctctcgctcgtactacaagctgattcgtcggttacgtcaatcgtttttcgtatcaactcagcgacaacactattcccacctctgcccgctacccaccaccacgacacgctatagaaaaccccgccgatgaccaatcatcgacggggttcggcacatgtgcaacgcttgcgattacagcttcggcagatacttcttcagctcgtaaggcgtgacctgctggttgtactcctcccattcctggtgcttgttgtccaggaagtagccgaaggcgtgttcgccgagcacgtcggccacgaagtcggatttctccatgatcttcagcgcctcgtccagcgagcgcggcagcggctgaatgcccatagcctgacgttcgccgtcggtgagctcccacacgtcatcactggtgggttcgcccagctgcatctgcttatcgatgccatcgagaccggcggccagcagcaccgagtaggcaaggtatgggttggccaccgggtcgagcgcacggaactccatgcgcgcggagttgcccttgcccggcttgtactgcgggatgcgcagcagcgcggaacggttgttgtggccccagcagatgtagcttggtgcctcattgccgccccacaggcgcttgtacgagttgacgtactggtcggtgaccgcgcagatttcggccgcatggtacaggatgccggcggcgaactggcgggcggtcagggacatgttgaactcctgaccggcctcgtagaaggcgttggaatcgccttcgaacaggctcaggtgcgtgtgcatgccggaaccaggcgcgtcggccaggggcttgggcatgaagctggcgtgaatgccacgctccaaggaaatctccttgaccaccgtacggaatgtcatgatgttgtcggccatggtgagcgcgtccgcgtatcgcagatcgatctcgttctggcctggccccgcctcatggtgcgagtattccaccgagatgcccatttgctcgagcatgttcacggtggcgcggcggaagtccatgcctgggctgcgcggcacatggtcgaagtagccgccctcgtcgatcggggtcggggccttggaccagtcgtcctggctttcgaacaggtagaactcgatttccggatgcacgtagaacgtgaagcccttgtccttggccttggcgagcgtacgcttcaacacgtgacgtggatcgccgagcgaaggctcgccgtctggggtcagaatgtcgcagaacatgcgggcggtaccttgcgggccaccgcgccacggcaggatctggaacgtcgcgggatcgggttgaacgatcatgtcgtcttcggacacgcgggtcatgccctcgatggcggaaccgtcgaagccgagaccctcctcaaacgcggcttccagttcggccggagcaatcgccacggacttcagtgttcccaacacgtccgtgaaccacagacgaataaagcgcacgtcgcgttcttcgaccgtgcgcagcgcaaactcctgctgtttatccatagtcgcctatcgttccataaccgtgttacgaggggcgttaacatctcactgtttgtcacctgcgagtcgcgagatttcatcaacatgccccggtccgcatgtcaggcatggttcgggcccatgccggcacggcactatggtagtgactatgagcgaagatcatctcaccccatccgccaatccgcctgagctggtgccgatatcagctggatgattacgccgacttggatgcgttgcaggcacgtatagacacgctgttcgagagctaccggcattccctgtacgacgatcgccgttgggtgttcgatcatttgcgctatcaggacgcggcccgcaaggtggtgggcgtggacgtcggtgtggatcgcgcgtgatatcgacgatccgatgatgattcagatgaaggaggccacgtattccgtgctcgagcattactgcggcgcgtcgccgtacgccacgcacggtgagcgcgtggttcaggggcagaagctgattcagaatacggccgatgtgctgttgggttggtcgagctttatggccgaggatggccgaccgcgcgactattacgtgcgccagttgtggaatggcaagggttcgattgatatcgacaatctcaatgcttcgggattgagcgatctgtcgcgcatgtgcgcatggtcgttgacgcatgcccacgcccgcaccggcgattcgatcgcgatcgccaattacatgggtggcaccgacgaattcgatcaggccattgcctcgttcgccgtcagctacgccgaacagaatgatgaagactacaccgtcttcaaaaagctcctcaaatccggcgaccttccttgctgagccgttaagcggacagcccggtgggctgtccgtaggcgaggcctgagtgaagcgatagctgagcaaaggtagcttaacagtctcgctaaggcgagtcctttgcctacttcgcgactgcgagcgcttcctggagcgtgaacgcacgtgcgtataacgacttgccgaggatggcggaatcgacgccgatctcggccagttccttgatggcgcgcaaatcgtccagcttggagataccaccggaggccgtgaccttggcgtcggtgcgttcggcgacttcacgcagcagttggatgttcgggccggacatcatgccgtccttggccacgtcggtgaccacgtaacgcgagcagcccacggagtcaaggaacttcatggtctcaaacaggtcgccgccttcgcgcgtccagccgcgcgccgccagtgtgtgaccgcgcacatccagaccaacagccacacggtcgccgtacttcttgatgaccgaagcggtccaatccgggttctccaaagcggcggtgccgatgttcactcgggcggcaccggcctcaagggccgcgtccaacgaagcgtcatcgcgcacgccgccggacagttcgatgttcacgcggtcgccaagctcatgaacgatctcacgcagctgatcgcgattgttgcccgtaccgaaagcggcatcaaggtcgaccaggtgaatccattcggcaccggcctcaacccaggtacgggcggcctcaaacggcgaaccgtaatcggtttcggaaccggattcgccttggcgcaggcgcacggccttgccatcgcgtacatcgacggcgggcagcagagtcaacgacataagaagagcctttcttcagttacttatacataatttgagctctctcgtcagaggggagcttcatgctttttacagcgtggcgatccagttcttgaggagctgggagccagcgtccccggacttttccgggtggaattgcgtggcggacagcgggccgtgttcgtaggcggccacgaaacgcgaccggccgtacgagcaccagctcacgcgttcgggcgcaccgctcagatcaatgtcgaagcgggacgtatccgccggcttcacttccatcgcggcgtaggagtgcacgaagtaaaaccgttcattctccacgccgttgagcagcaccgaatcgggggcggcctcgatcgtgtcccatcccatgtgaggcaccacgtcggcgtccagcaggttcaccgttccgccgatcagcccgatgcccgcggcatgggccccgtgctccagaccgtgttcgaacatgatctgctcgcccacgcacacgccaagcaccgggcggccggcgcggatgcgatcatagatcacacggtcgccgtcgaccttcttcagtccttccatgcatgcggcgaacgcgcccacgcccggcacgaccagaccgtcggcctccaacgactgccggtagtcggaggtgagggtggtgtcgatgccaagattggcgagcgcacgcaccatggaacgtacattgccgaaaccgtaatcgaaaacaaccgctgtggtcatattctctcctatcccctactggttggttggcgtctattcgatgcgggagccgcgtccgccacgcccacgcttggtatggttggcgagaatctgcatcgcctggtcatggtcgagtccagcggaatccaccacttcgaacccttgggtcttgagttggttcagggttacgatgccgagcatcaggtcctcgacgaagcgcggtgtggaggtgaacagcacgggcggcgcgaaactctgtccggcctctccctgcacgtacatggccacttcgagcttgtcggcacgattgactgcaagaatcacggccatgccggataccacggtggtcaggtccttggctgcggcttccgggccgtcgccgtccagattcttcagcaccgcgacggccccctgattggcaccgacgcatgcggcggagatgtccgacagctggcagaacgcggccaacagttcggcggaggcaagacgggtgacgatcagcgccaccttcgccttgttacccaacagtccagcgagttcgttgtcgaagccgagcgaggggtcgaccacgtcggccatggcctcattcaccgcatcagcgaccgacccggtgacgtcgtcggtcataggctggccggaatcagcggcagccttatcagccgtatcatcattcgcgtcggaatcggacttcgctgaagcagcgtccgccgttttatcggcatcactggtatcactggcatcgccggatgccgaatcgtccgcgaattctttctcgaatccggcgagcgcggcctcaagctcctcgtcggagaagtgcgattcgtccggatcgaacttgtcgtcggccatcacagggctcccttggtgctgggcacgccgtctacacgcgggtcgatttccacggcgaagcgcagcgcacgggccagcgccttgaattcggcttcggcgatgtgatgcggatcacggccggcgagcacctgcatgtgcaggcagatgccggcgtggaaggcgatggattccatgacgtggcggaccagagagccggtgaagtgtccgccgatcatgcagaattcgtagccttcgggctcgccgctgcacacgcagtacgggcggccggaaatgtcgaccacggccttggccagcgcctcgtcgagcggcacggtggcgtcggcgaagcggcggatgcctttcttgtcgccgagggcccgcttcagagcttcgccgaacacgatggccgtatcttccacggtgtggtgcacgtcgatgtcggtgtcgccgtgggcgtggatggtcaggtcgatcagcgaatgcttgccgagcgcggtcatcatatggttgtagaacggcacggatgtatcgatatcggttttgccggtgccgtcgaggttcagttcgaggtcgatgtgtgattcgctggtttcgcggacgatgtgcgcggttcttgccatcatgtctcctgtgtgattcgtcatattggattgcggcgggactcgaatcgcttcgggtctcgccgcaatcggaaagaaacgtcccttatgctgcttccactatacgaagcgcttcaacaagggcgttacggaaggtttccatctcctcgtcggtacccatgcacacgcgcagccaaccgtccggtccgaccacgcggatgagtacgccgcgcttcaggagctcgtcgaagatggcttcgcgcttgtcgaagtgcccgccgaacagcaggaagttcgagccggattcggccacttcaagcggctggtccttgtaggtctgttccttgagccatgcggcggtggcctcgcgggtttcgcgcagatgctcgacacggctcagctgttcatcggtgtgttcgaaggcggccagtgcggcggcctgggtcacggcggacaggtggtacggcatacgtacgatgcgcacgcagtcgatgatgcccttggatgcggctaggtagccgactcgcgcgccggcgaaggcaaaggccttgctcatggtgcggcttacggccaggttcgggtggtccttgatcaggctcacggcgctcggggtgccgggcttgcggaattccacgtacgcttcatcgatgacgagaatcgggtgcacgccctcacccgcgccggccacttcggcggtttcgcaggcggcgagaatacgctcgatatcctccatcggcaacggggtgccggtcgggttgttcggactggtgagcagcaccatcgagggcttgacctcggcgatggcctcaagcaccttgtcgacgttcaacgtgaagtcggcgttgcggtgggcgagcttccaaccggtgaaggtgtcgcgagcgtactccgggtacatggagtacgtcgggtcggcaccgagtgcggtgcggcccgggccgccgaaagcctggaacagctggagcatgatctcgttggagccgttcgcgccccacagctcgtccacgtccagacgggtaccggattcacgggccaggtaatcggagaatgcctgacgcaattcaatgtgctcacggtccgggtatcggttgagtgtgggggcgatttcacgcacacgcttggcgatggtgtcgcatacggccgggtccggcgcatacgggttctcgttgacgttcaggcacaccggcacgtccagctggggagcgccgtacggctcctcaccgatcaggtcgttgcgcagcggcaggttttcgggaatcgagctcatcgcagaccggctcccttctcctgctcgcgcagggtggccttgtcatacggatccttgacgaagcgggagagcacgcactcgccgtgggcgggcaggtcctcggacaccgcgaaggcgttgatgcgggcggcgagagccttgaggccttcctcgtcgtattcgatgacttcgaccggcttcatgaacgtgtgcacgccgaggcctgcggcgaagcgggcggtgccgccggtgggcagcacgtggttggaaccggacatgtagtcgcccagcggcaccggggagtacgggccgcggaagatggcgccggcgttcttgatgcgcttgacgaccgcatccgcatcctcggtctggatctcgaggtgttcggccgcgtaggcgttggccgcgtcgatcgactggtcaaggccgtcggtcagcacgatggcggactgggtgccggacagggatgtgtggacgcgttcggcgtgctcggtcttcggcacgcgatagttgaggttctcctgtaccttgtccgcgatgccggtggagtcggtgaacagcacggaaccggcgagctcatca

SEQ ID NO: 2079 - DNA, 4735 bp, Unknown
  R17_18m  MAG No. k141_62699
accaggaagtccttcatgtcgtaggtcatgccggtcgacccgttctcagccccggccggtggcgtcatttcgccatcgtcgaacgacgcccgttcatagttgccgttcacgcagtactcgcctatcgaagcggacatcacctttgagccgcagttcggcagacccatgcccgcgtacagctcgaacataccccagtctttcaacagcagatggtttttcatcggcaatttgtccgcggccatgccgtgttccgaatccgcttccagcatcgcgccgctgatatcctgggagaagttggtcaggcccagcacatcggccttgtcttcaggctcatggcctttgatttgcagatactgataatcctcggatgaggtggagccaaagggattcatcgaagattgctccaacgtgatgcaatccttgttggcgtccgtcacctcgctcttgcagtacatgccaatcattgcggatgcatggatgctggccatcttgaaattgtcatacgagttggttttgctcaacacgtccatgttgctggacttatcgatgccgtaatacaaggtcaccgattgaccggaactcaacgtggaacccggagccgggtacgaaccggaaatcttgcccacgtatttctctgacgagtaatgcggttccaaatccacactgtagccttgcgactccaagtcgctgacggccttgttcttgtccgcaccaagaatatccaccgggataccatcgcccttggaggccacgccgatgtaaatgccgttgtccttctcgtcatcggtgagccctacaccgggagccgggtacgtgacgctgacctgcccttccggagtcttgctgtccggcgaaatcacaaccttcttatagtgaatcggcacgcccatattcgcgaacgtgttcgtcaccttgttcacatccttgccgaccgtgcccttcggcacaccgggaccggccgactcctgcaccaccaccgtggaaccggccttgacgcgagcgccaggattcgtgccctcgtagccgaggaacacaccgcgatcctcgccggagaacaccggaaccgtcttcgcgttcaggcccttggccttcaacgcctcggtcacatccttggccttgaccaccgatgccttcttgccgttcttatcggtgacgctggaggcgatggacgccggatcaggcagcgacttaccaccccacacctcggcacgatacgtcaggaataaagccacaccggctacgatcaacgccagcagcaccgccacgagcgcgataatcagcgtattcgggccacgcttgcccgaaagattcggcaatgtggcggttgcggtcgttgtgccgctcggcggcgtggctgcgcccggagcgacaggagcacccggagcggcctgcggcactgctcccggtgcgatcgacccagtatgacttgctcccggtgcggtcggcgctcctgccacaccgctcgatgtcggcacgccgggctgcccataggcgttcccatcgtttgggccgggcagcggcgggtgatcaagcaccgtcatagtattgtccggcagcggcactggaatcgggccggccgccgcctgaggagcaggagcactcacgtcggttagcggcgcaccacagtgcatgcagaaccggcttcccccatcattgtcagcaccacaattcttacagatcatcattgctcttctctctggtcgaatgacgcactatagcctcattctactggaaaatgaacgcgatggaatagtccccactcagccgccaaccaaaaggcgtggtccgtatacacagttgcatgtgcaaatactgcttgtactatttgcgcaacgtgctatccaccgaggcaagcacttggctcatcagctgagcggcacgatcctgaccttggttttgcgtgaccacagagaccgcggccttgttgccattcacctccacgatggcgaagtaattccacgtgttctggatgcccatgccacgatgtgcatgcacggtcatgccgctcggaatcaccacgccctccgaagcaatatcagtgttcatcagaccagtgccaccgaccgcatcaacggcaaccagcatgcgggccgcgtcacgagcggtactgtaattctcatatccagcattgctggcctgtacatcaccgaaatcacggttgaagctggtgcctctgtgcccatgggaactcagccatgaattgacagcactccatccgccaagggccccgacagcctgattgccggcactgttatccatgccggtcatcatcgtatttgccaatccttccgcattgccgttgccttgagaggcaaggtacaccggcagatacaggcctgcggcaacgaacttcttactcgactgcgacgtattggcaatggccgagtcttcagacgacgcatcggcgctgggagccacatccatcttcactagcgggttgtatccaccgctcatcggtataccgggtacaaacggattggcggtttgctcgccgttcttgtatgcttcgacgcttgtggtcttgtatcccttggggtcgcgcatgatgaagaacggccggtcggtgtctggcttccccgccttgttcgccgcagccagcgccttgttggagaaatagtcggaatcctcgagtttgctgatcttcgatcccaccgggaagtaaacgtagaagtcatccatttcgtaggtggcaccggattgctgaccatcagggatatcatcagtcctcacatattgaccatggtcacacccttccgtctccccatagcctcggtagaccgtgccgtcgcataccggccatccgtagccacggtacatctcgaacatgccccactgtttggccaacaagtggttgcgcatattggtttcattatcgggaatcgaaccatccttgtagtgcagaatgcacccgccaatgtctccggtgggcgtgcacagtgtgacccgatcgttccatatgccattggactcatcgcctttgcgcaccaaatacgggtaaccggacccgtatttcattccgtcttgacccttcgaaatcagcgagatgcatccacccgagccaggtaagaaaccatccttgcaataggtgcccgtaacacgccattcgcccgcagccgagatatacggcaaactcctgtcactcttgctagtgctggcataatccgcgtgcgggtcgaaatcataatcactacctgaaccggtggtcaccacatcttcagtgttgtcggctcccacaccgtagtacagacgtatcggttgcaatattttataatcattttcctcattgctcgcctcaaacggcgcaccaaaaatgtaattggaagctacgattttgccaaaatccttcttggcggaaaatcgcggctcgagaataacctcgatcttgttgttcgatgcgttttctactgcggttttcgcctcatccctatccataccgataacgtcggccggcatgccctcgactgagggatccgggataccaagataaatcgcaccattatcgtccactggctgcccccagccgggtaggtatacacgactttcttcgtatcggccttggatgttgcggctactcgcttggcataaatcggcacacccatatctttaacggccgcagcggccttggcgacgcttatggcccggtaccggcgtctgcggtaccgcgatagtggcgggcgcagacgacgctgggccgaggctagagctgagaccggggccgggaatgggaccggcgggtggcatcggcacaggcggaacatcagtgaccgtattgtgtcccacggcaagtttcggtgccagcggagcaccgcattccgtgcagaaacgggacctatcgtcattggcagcaccgcacctatcacagttcatcgcgtcttctctctgatgaaatgatgcaatatgcctttcattgtacagagaaaacgcacactggcggagtcaacggaacagactcaccccgcgacgggccgtgcaatacgcgttgcccagccaggtatggcgggaattgggccagacagctcccagtcgcggtgcgttctggctcatccagatgctcggcacgcggccgtctgcggagcgtgagccgagcagattgaagccgttcttttccagcagccactccgggtgctgggtggcgatggccaagccttcctcgagggtgagcggcaggcgttcatcggagtcgataagcttgcgggccacgtccggctcgcgattgatataacacgtgccggtgtgcggattgacgaccagatagaacgggccttccggcggcatgaagccgtcttgaggcaggaagctggcgatgtcacgcggcggcatggtggtgaagccggccatgcgattgatggaggttcgtgcgatcagtgactcaggcgaaaccagttcgcgcgtgggcaccagcaggatgttcgatcccaaatcggaatgctcgagcgccccgatcaggggtcgggccagcgagcggaatgcggcggcggaaatatccgccacatccggatagccgagagccacgatacggtcgagctgtttttgggcctctactgatgcgatagacatggctaccagtgtagaacaccgccgtctcttcgttagtcaccccgttgtctatttagaagtgcaacatccttgttgttcggttaatgatagcagttcgtcggcgaatgcctcggccggggtgcggtagccgagcacgcgcatgggacggtcgtcggtctcgtccacgatggcctgtatc

SEQ ID NO: 2080 - DNA, 4869 bp, Unknown
  R17_18m  MAG No. k141_63163
gatacacaaagccccgtgacgaatcccgtcacggggcttttaccgttttaagccccgcctagtacactcgtcaccatgcgagtgatcggacagcgaatcaaaagaatggcaaccatagcagtgactgccatcctttccgtatccctggcctcgtgcgggcaggccacggacgacaaccgtacggagatcagcgtatggagctgggaaccgagcatgggggaggtcatccgccgtttcgaaaaagccaatccggacatccgcgtgaaatggaccaatatctccggctacggcaatcttaataccgccattcaagacggttacggcacgccggacgtggctcaaatcgaatactatgcactgttgcagtacgcggtctccggccaattgcttgatctgaccgacaaaatcggctcggattattccaacttctttaccctcggcacatggtcgtccgtgcagctcgccggccgtacctatggactgcccatggattcgggcccgatgggcttcttctacaacgaagacgtgttccgccaagccggcgtggacgccaccaagatcaagacttgggatgactattacgaggccgccgaaaagctcaaggagatcggcgcgtatatcgccgccgactcgggcgacggcagtttctatgacgcgatggtctggctcgccggtggtcagccgttccacacgtcggccgacggcaaaaccgtgaccatcgatttggatgaggatgccggcacccaacggttcaccgaattctggcagaaaatgatcgatgaggggcttgttgacaccacctccgccacatggtcggatcggtggaaaagcagagtgggcaccggcaccatcgcctccgtgttctctggggcttggatgccgtcgttgctgctgtccaatgtgccgggcgcggccggtctgtggcgcgtggctcccatgcccacctatggtgggcagcctgccaacgccgaaaatggcggctcggcgctgaccgtgttgcaactgacccgtaagccggatgcggcctatcgtttcgtggactttgtggcgcatgacgcccaaggcattagcgcgcgtgtagacggcggtgccttcccggccgattacgccaccctgaattccgctgattttctggataaaaccacgattaccaatgaccgtggcattgaaatcccgtatttcggcgggcagaagttcaaccgggtactgtcggaggccgccgaggatgtgtcggtcggataccagtatctgccattcgaagtgtatgcgcgcagtgacttcaaatcgacggtgggccaggcatacgagtggtccggcagtttccacgcctatcagcagcgacaggaagccattgagatgggcatgaaggacgaggaaggcaacccgctcgaaccattggagaagcctggcaagaaagtcagtctctccggcggcctggcccaatggcagaaagacctccgagaatacggcctcaatcagggctttacgattaagtagggttttgagtaggtttttcggggagggacggaattgactgcgctatgcgcggccgatgcctgcacaccgcgttacttcacattgcgcgagtagatgtatgccatgcctttgaagatcaggtctgaatcgtagacgtcgatcatgtcggtgtcgtttttgaaaatgcggctgagccctcccgtggctaccacttggaacggctcatcgatttccttgcggaactgctgaatcgtgcgctcaatgccaccgaggaacgtgtaatacagtccggcctgcatagcagtgcgcgtattggtggccagaatcgactgcggttgcgtgatctccacttccggcagctgggcggtctgcccccacaacgcctcggccccggtgcggatgcccgtggtgatgaagccggagcgaatcgtgccggaaccgtccacatagttgaacgtggtggcggtgccgaagtcggccaccagcaccgggccgccataggtgtggtaggcgccggcgcagtcggcgatgcagtcagagcccaaggttttggggtcgtcgagacgaatgttcatgccggtcttgacgccagggcccaccaccatcggttccaatccgaggaatttgatcagcgaggcgcggaaggaatacatcaccttcggcaccaccgagcagacgatcacatcgtccacatcgtcggccgtgtaatcgctcaaagccaggaactgcgtgatcatcagaccgtattcgtctgaggtgtgcgtcgccttggtggtgatgcggtaggagccgacgatgcggtcgccctccagaaaaccgatcacgatattcgtattgccgatatcgaccgccatcagcatgggtcaggcctccttgttctcgtcatcgacattgctcgcgccgccggaacgcaacgctgcgagccgcagcaacagtcgttgcgcaagcacggttttgtccatcttgtcccaatgctcgatcttcggggtgccggcatcctccgctccggacgtgagcacggtgacaacgttggtgtcggtgccgaacccggcaccggcgtcgcgcagattgttggccaccagcatgtcgcaatgcttggacgtcagcttcttctccgcattacgaatcagatgctcggtctccatcgcgaatccgcacaggatctgcgagccgtcgtcgcgcttgcgttcgccggcccacgccagaatatccgggttggaaaccagctccacggtgatgctgctgcggccggccttcttgattttctccggcgcaatctcggccacgcggaaatcgcccacggcggcggccataatcgtgatatccgccgccgggaaggcgtcggccaccgcatcgaacatatcctgcgcggtcgtgacgcgcaccacatccaccgcatcgggcgcggtcaaggcgactggaccggagaccagcgttacgtcggcaccaaattcggctgcggccgaggcaatcgcataccccatcttgccggtggaatggttcgtcagatagcggaccgggtctagcggctcctgcgttggcccggcagtgaccagcacgcgcagccccttgagcggggaagatgagggagcctggtcatcctgcgcatccgccagcagccgagcggccacttcctcgatgcgcgccggctcttccatacggcctcgtcccacgtcgccgcaagccagattgccttcctccggctccacaatctgccagcccaattcggcgcaggttttcagattgcgctgcgtggccggattgttgtacatatgcacgttcatcgccgggcataggatcttcggcccctcataggccagaatggtggacgtcagcgtatcgttcgccaatccacaggcgatgcgggcgatgacgtcggcgctcgccggggccaccaccagcagattggcccaggccgcatcggccacatgattgatggtcgttggcacggtcggattggccgtcacgtcgccgtgcgcggccggataagcggggaacatcgtggtacgggtgggttgatgggtcagtgaggtgaatgtcaggggagtgacgaagccttcggccgctgtggtttcgataacccgcacctcgtggccggccttggtccaatcggatgccagatgacaggccttgaatgcggcgatgctgccggtgacgcccagaagaatatgtgccatagctgcctcccggccttatgccaaggccgcacgtgtgcccacgccagcgcttcccgcgtcgttgcccgacgatgcgccgcgtgttgtggtcgccgcggaccctccgtcggcgccgcaatccagtatagccattgcctccggcgtgtccggggatatagtagaacgtggtgatcgacccgaatgggcgctcaaccacgcaagataacaacgaaaccatattcgggcgtaagcatgcccgaatacatcagggagtatccatgtcccagaacaatggtgtgcacggcgagtctggcgcaaccgaagacaggaacatcgacggcgcgaatcaagccgccagcaccgacgcgagcctgaacgcgcgcgcgaaatcatcagacaagaagaacggcggcccgaaatggtggctgtggacgctgatcgcggtcgtcgtggccgcggcgctcatcgtgggcgtcaccgtcttcggagggaaaggcaagggcaaggacgcgaacgcctccggctcggccagccgatccgataccgtggccgtcggcctcaaactcgccccggtcaatcttgacatccgccaccagtcgggttcggcccttgagcagatcctcatcggcaacgtgtacgagggcctcgtctcgcgcggctcggacaacaaggtccaccccggtctggccaagagctgggagatctccaaggatggcctgacctacacgttccacctcaacgagaagatgaacttctccaacggcgacaagctcgacgccgaggatgtggcgtggtccatcaacgagctcaaggcccagaagtactacgactacgagcaggtcaagagcctggacaaggccgaggccgtggacgccaacacggtcaggctcaccctctccgcgcccaactcgaacatgctgtggtacctcaccagccgtcccggcctggtctacgacaaggacgccacctgggatcagaagaacggcgcgttgggctcgggtccgtacaccgtggtctccttcgacccgaacgacaagatcgtgctcaaggcgaaccccaagtattggggcaccgagcacaaggcgaggaccgagaacgtgatcgtccggttcctgccggacgagaacgccagcatcaacgccctcaagagcggcgacgtgcaggtgctttcgcccatctccgccacccttgccgatccgttccgcaaggatccgaactatgtggtcaagtccggtga

SEQ ID NO: 2081 - DNA, 3159 bp, Unknown
  R17_18m  MAG No. k141_63230
catgctagacgcgccaaccagaaaaaatatgcttcgatatcaggggctgaagcatccactacacccaatacgtgcatttatccgtttcgaggaggctaatttttgcgtttgccggaggcctacttccgtttcaaggggctggtttcgcatttgccggaagtctatctccgcttcgaggggctcctcatccatgtaatcggaagtataaacggctacacgtcaacgtcattccgccgttttagggccgtgtctacttgggcatcagccccttgaagtggaagtagacttccagataaggcaaaatcagcccctcgaagccgagaaagcacgtttctacggtgtcagaagccgacggaacgcaaaagggtcgtctgcacgcagacgacccatatgatcaattcgccaatagacgcagcaaacgcggcctagtgctgctttttgcgcggcgaccagtgcttcgacggcggccgtacttatcggacaggaagccggagaagccggcgccgatcacgccgccgatcatgatggagctgatgaccagaccctgcagggccgggctcagcgcgtacttgtcctgcaggaagtcgatggctcccgaaatagacacggtcataaccgtagagcaaaccggttagacacggtgttgtatacaatccacaaaaccagacagacaacttctccattgcccacaacgcgcgcaaccttacgccagcgtaacctaacttgtcagaatggctcgattttgtcaacagccatcacgcaacgcacgtaaggacacggcccgcttatgcttgaccactacaccacgcctggcgaatccatcgaaatccgcgacaaccagaccatctactccctacttaccgatcgccttgcccgcaccggcgcggacacggtaatcgccgccaagaaaatcggccccggccgctggcagaacgtcaccaccggcgaattccacgagcgcgtggtctcggccgccaagggcctgatcgcgctcggcatcgccaagggcgacgcggtgaccatcttttcctccacccgtctagaatggggcattctcgatttcgcactggccgcggtgggcgcggtaagcgtgccgatctatgacaccgactccgccccgcaggcccagcgcatcatgaacgattcggtggtcaagctggcctttgccgacaatcgcgagcgcttcgaccggctcgactcggtcaaggaccactgccctgccttgaagcagattctcatgatcgagggcaacgcactgggcgcgctcgaaggtctgggcgtggctgtttcggacgaggaactgaacgagcgcgtggccaccgtgcgcacggacgatctggccaccatcgtctacacctcgggctccaccggcaacccgaagggtgccgaactgacccataagaacttcgtgtccatcaccatcgccgcctcgcaggcgttgcatgaggtggttctcgacgaccatccgcgcctgctgctcttcctgccgctggcccactgcttcgcacgatttatccagtacgcctccatcgcctccgatgacggcgtggtcggttatctgccggacaccaagtccctgctgccggacctgcgttcgtttgaaccgacctacctgctgggcgtgccgcgcgtgttcgagaaggtgtacaacgccgcctcgcataaggccggtgccggctggaagggccgcctgtttgtcaaagccgccgaggccgcgcgcgtctggagccgcaaggagcaggccggcgagcagcacacgtttgccgaaatcgccgagcgcgccaagtatgaaacgctcgtctaccgcacggtgcgcggtgctctgggcccgaagatcaagtatgtggcctgcggcggcgcaccactttcgcttgatctggcgcatttctacaacggcatcggtctgccgatgattcagggttatggcatgaccgaaaccgccgccccgttcgccgccacgcgcgtgaccgacaatgtgatcggcaccgtaggccagcccgcgcccggctcctcgattcgcatttccgacgaaggcgaactgcaggtcaagggcccgaacgtgttccgcggctaccacaatctgccggagaagacggccgaggcattcaccgccgacggctggctcaggaccggcgacttggccgagatcgatgacgccggccgcatcatcatcaccggtcgaatcaaggacattattattaccgccggcggcaagaacgtctcccccattccgctggaggaggagatcgccaagtgcccgatcgtggagcactgcgtggtggtgggcgaccagcgcccgttcatcggcgcgctggtgacacttgacccggagtcgctggccatttggctgcccgcgcacggcctgtccacggagacgccggtcgaccggctcgccacgaacgccgcggtgcgcgaggagatccagcagtacgtggacaaggcgaatgcgacggtctcgcgtgccgaatccgtgcgcaagttcgccgtgctgggcacgcagttcacgcaggagaacaagtgcctgacgccgtcgctgaaggtagtgcgcccggccgtcaaccgcgtgttcgccgatgtgatcgacaacgagatctacaacggcaagcggtgaaacgcgcggttcgtaatccgacacaaaaaagggccttttgaaccgcacctccgatcatcgaatctggattactccagtccaacaatcggggtgcggttcaacctcgccgggcacttcatcattcatcactggcatggttccattatcacgcacattatggcgcagagcgaatacggcaccccggcaacgcgagtgggtcgccggggtgccggagcgcgggggtgccagaatgccgaagggccgggataccggagtgcccggtcgccggggtgccgaaatgccgaagcggtgtatgggtgccgcccggcccaggtgggtcacgcccgggtcagtttcttgctcctgagacgcagcacgacatcggcggagtcggcgacacgcttggaatgcgtcaccacgattacgcatttgccgagctgatgggcggcatgctgcagcagatgaatcacctcgtcggtcatctccgggtcgaggctgcccgtcggctcgtccgcgaggatcgcgcggcccggggcgaccagcgcgcggccgaccgccacccgttgacg

SEQ ID NO: 2082 - DNA, 6005 bp, Unknown
  R17_18m  MAG No. k141_68900
cgacggcgcctactacgccgactacaccggcatcatgtccgtgggctggaacgccgacaagtacggcgatgtcgcctccctgaacgacctgctcgatccgaagttcgccggcaccgtgtccctgaacggcaagcctaccgaggccggcgcggccttcaacggctatctgatggtcaaccagctcgccggcggcgacatcaacaacctgcagcccggtctcgacttcttcaagaagctcaaggaagccggcaacctgaacaccatcgatgtgaccaacggcaccatcgactccggccagaccggcgtggtcttcgactggacctacaaccaggcctcctacaagaaggaactcaagtccaagggcgtgaactggaagtacaagaccttccccaaagcccaggtcgtcagctactacaaccaggccatcaacaaggacgcgccgcaccccgccgccgcacgcctgtgggaggaatacctgtacaccgccgaaacccagaacctgtggttcaagggcggcgccaacccggtgctgctcgactccatgaaggccgacggcaccgtcgaccaggccaccctgaaggacgccatcaccatcgaaggccagccggtcacctacagcaacgatgactccacccgcatcaccgagtggcttcaaaacaactgggacaagacgatcggcaactgagagtccacgatgaccgccgcaatcgcacccatcgcaccgaacggacccgccgcctccaaggccgcgggtccgtccgccgcatcgacccccgcttcgtccgcactggcgaagcaccgtcaggagcttggcacgctcgccaccacgctcccgttcttcgcctacaccgcctgcttcctgctggcacccaccgtgatcgtgatcatcggcgcgttccaggatcgcagcggcggtttcacgcttgcgaacttccacaagatgttcgaagccaacaccatcgccgcgttcggcacgtcaatcctggtgtccgtggcctcatccctgatcggtgccgtggtgggcgcgctcgcctcctacgcgctggtgatcggcgccaagccgaacggaccgctgcgccgtatggtcgccgccatctcatcggtgctcgcccagttcggcggcgtgatgctcgcgttcgcgttcatcgccactcttggcatcaacggcatcggcaccatgctcatcaaaaccctgactggctataccgtgaacccgaattggctcagctccctgccggggctggtgaccgtctactgctacttccagattccgctgatgatcatcatcttcctgcctgcggtcgattccattcgtccacagtggcgcgaagcctgcgagtcgctcggcggcaacaccgtccaatactggacgcgcgtggcctgcccgatcctcgcaccccgcttcatctcggcgttcctgctgttgttcgcctccgcgttctccgcatacgcgaccgccgcagccctgttctcgcagcgctcgattctggtgccgttgatgatccaaggtgccatgcgcaatgagatggaccccaaccagcagggcttcgcgcaggtgctggcattcgcaatgatcatcgtcgtggccatcgtcatgctgctgagccacgccgtggaaaagagggccggacgttggcaatgaccgaaacttccacaaccaagccgccgcagctgcgtgccgcccgcgtgcgcaaacagagcatcatcaaattcgtgatcctgttcgtcaccctggcgttcctgttcgtgccgctgctggccatgttcatcttcaccctgcgtcacccgttgtccggtcgctggtcggccgcgccgtggacggcgattttcaccggcaacggcgaatcgttgggcgccgatctgagcgtgctatggcagggcgtcggcatctcgctgtcgttgagcgccgtcaccgtcgtgatcatgctcatcctgctggtgcccaccatggtcatcgtgcatattcgctccaaagccttggagcgtgcaatcgaatgggtggccacgctgccgctgaccattccggccatcgtgctggtggtgggtcttgggccgatctaccgttggctttccgccgacgtgttgagcaccaacccgatctggctgtgcttcgcctatgtgattctcgtgatgccgttcgccttccgcgcgatcgccgtgggcctcaactccatcgacgtcaagacgttggtcgaagcctcccgatcgctcggcgcctcctggcccaaagtgttcttcaaggtgatcatcccgaacctgtggcagtcgatcctctcggcatccttcatctccatcgccgtggtactcggtgaatacaccgtcgcctcgctgctcggccgtatgaacctgcaggtcgcgctctaccagctcggccaatccaatgcccaaatttccaccgccatgtcgctgctggctctgctcttcggcgtggtgctcctcgttgcgctcgacctgatctccgacgcaatgcgtaagtcaagggaaggtaagtgacccgatgaacaacgattcaactcccacccgtcaggaaaccggtaccgcagtggacgccgccccggcgtccccggccatcccggcagccgtgtcctccactgccgaggacgccttcaagaacgatcccaccgctaccctcgagggcgtgcgcggcaaggacgtgaccaaggccgccaaggccctgctcaaagacaccgccaagcgcggcggtggttccattcagatgcagaacgtcgtcaagatctatcccggctccaccgttcacgcgctcgacgacttcaacctggacatcaagcccggcgaaatggtcgtgctgctcggtggatccggttgcggcaagtccaccgcgctgcgatcgcttgccggtctcgaagacatccaaggcggacgcatcatggtcggcggacaggacgtcaccggtgtgccggtgaacaagcgcgagatggccatggtgttccaggcgtactcgctgttcccgcacatgaccgccctggagaacgtggaattcggcctcgaagtgcgcggcatgggcaaggccgaacgccgcaagatcgccatggaacagctggagctcgtggggcttgccgatcaggccaagaagtacacgcagcagatgtccggcggccagcagcagcgcgtggccctggcccgggcgctggccatcaagccgcgcgtgctgctgctcgacgagccgttgtccgcgctcgacgccaaagtgcgcgtccagctgcgtgaccagattcgccgcatccaactcaccaccggcaccacaaccgtcttcgtgacccacgatcaggaagaggcgctggccgtggccgaccgcatcggcgtgatgaacaagggcaagatcgagcagatcgccgccccgcaggacctgtaccagcgccctgccaccgagtacgtggccacgttcattggactcaccaaccgcctgctcggcgcatccaatggcgacgaggccgtggtcttcggccagcgcgtgccgctgctcgccggctccgccaagggcgattccgtggccgtgctcgtgcgcccggagaacctgatgctggccttggctggcagcagcgattcgcacgtcggcgaacgcgcccgcgtggaggtcattcacttccttggctctttggttcgtgtggacacggtcatcacctccggcgaataccagcgctggaacaaaggtgaacagctcaaggccaccgtgcagctgcccgccagcgagctgccggccggtctggcggtgggcgatgacgtgattgtcgccccgcgtccggtcgccgcgctcgcctgctgaatggcgttgcgatgatcgtgcggttctgttctgttttgtgactgtacgatcgtcgaatggcttatcggcaatgatatgtgtgggacggcggcgatttttgggcgattatcgcgtgccgtcccacgccggtgtgggacggcatgaacgtcaaacgatgtacattcgtgccgtcccacagattgtattgaggaatcgttgcaatgacgccatttcttcgtgcggcgtcatcagtcatatgtggagtggtgtgggccgccgcgaaaaaatcgggcaaaatcgcgtgccgtcccacaacaatcccgcagaggagaggactctctcggcatggggattgattgacgtagatcattccttgcccattgatgattttccccattcccaatgcaatcgaaacgccgtgccgtattcttgaagagtattgcacgtgtgatcggtccgtttgcggccagtgactatgggggataagtatgagcgaaccaatgccgtcggcgcagcagccgcaacaaaccccacgcgattggtggttcacggcccatcgccggttttcgacaatcggctcggcgctcgccattatgatggtgttctggatcgggctgaatattctggccactgaagcactacgaacgctgcttggcgccgatgtgcccgcttgggctgtgttgctcgcctcctccgggccgctgtatgtggtggccatgccgctgagtatgttggccttcactcgcgtaccggttattcgcacccggcagtaccccatgaaggcgggggagttcattcggattttcgtcatgtgcattccggtaatgctcttgggcaatatgatcggcaatatattgtctgccggagccactgatggtcaggccaccaatcgcatcaacgacgtgattcttggcagcgactggcgggtgaacgcattgttcataggcctgttggcaccggtttgcgaagaatggatttttcgcaaggagattatctcccgcctgcgccggtacggagaaaagaccgcaatcatgttctccgcattggcgttcgcgctattccatatgaacgtgttccagttcttctacgcctttggcctaggactgatgttcggatatgtatacacacgcacctcccgcctgcggtattcagtggctatgcacatgctgatcaacctgaacggggcagtgctcgccccattggtgatacaacagatcgatccccgcatcctcgacggcacaatcagcgaggccgaaatcatgcgtatggctgaaaccggcaacatgggcggcatgggcatcatgatgttgtacggcacagtgatgttgggcctctgcattgccggtatcgtgctgcttatcaccaagcgcaagagctgggagttctatcttgcgccagaggagttgcctgcggggcttaaaatacgcaccgcctatgccaatcccggcgttatctcgtacctactgttgactgtgatgcttaccggttggatgctgttcgcatgactgtcatagccggacccagagaggcgagccgggagatatcacagattgtctgacgagccgccatcttcaacaaggtatttagtgcccgaaccggcgatggctcgcgccgccatatctttgatggtggaaggcagcacaccctcgcgcgcgaacacaagcacttggccggtcatgccgtaaggggagaagccggtgaacttgaccagcggtggctggccctccagtgccacgtcggcggtggctttggttacgcggtcgagaatatcctgactgatagcggacgggtcgccagaggccttggccgtgaactcgagcgtggccatgccttcgctggccggcgtgagcttggtcaaggcggccgtgttgagcaccgaattgggaatgaccatcatgtccccggaacgggtgcgcaccacggtctgacgccaggtgatgtcgtgcacggtacctgtgacgccttgaatggtcaccagatcgccgggttggattacgcggcccagcatcaggccgaagccgccgatgacgttggcgatcgtatccttcaaacccagtgaaatcgccacgcctccgacaccgagggcggtgaccagggtggtcggattgatgccgaacaccggttgcagcaccatcgccgtaccggtgacccagatggtcacgcgcgtgagattcacgaaaatcgaggcgctgggaatctgcgaactatccagaaccctgcgcagcacgcggctgatgacgcg

SEQ ID NO: 2083 - DNA, 17109 bp, Unknown
  R51_24m  MAG No. k141_83
cgcgcgtgggcaccagcaggatgttcgatcccaaatcggaatgctcgagcgccccgatcaggggtcgggccagcgagcggaatgcggcggcggaaatatccgccacatccggatagccgagggccacgatacggtcgagttgcttttgtgcctctactgatgcgatagacatggctaccagtgtagaacatcaccttcgcttcatcgggcagtcaccatctgggaagaccgctactgttgttccgcacatttcatacaatgtcattgttttacggtcacccgtatgacggccgtccgaacgcaagtaacccatcgaaacccagaggtcatagaggtcatcatgtccgaaaaattgaaggtcggcatccttggtgccaccggtatggtcggtcagcgttttatcacgctgcttgagaatcacccgtggttcgaggtggtcacccttgccgcttccgcgcacagcgccggcaagacgtatgccgaggcggtcggagaccgttggaagatggaaaccccgatgcccgaatacgtcaagaacatggtggtcgtcgatggcgacgatgccgagtccgtggcctctggcgttgatttcatgttctctgcggtaaacatgccgaaggaccagattcgcgccattgaagagcgttatgccaagaccgagaccccggtggtctccaacaacagcgctcaccgttggaccccggacgtgccgatggtggtgccggagatcaacccggagcacttcgaggtgatcgagcaccagcgcaagcgcctgggcaccactcgtggtttcatcgccgtcaagccgaactgctcgattcaggcctacacgccggcactggccgcatggaaggaattcgagccgcgtgaggtggttgtgagcacctatcaggcgatttccggcgcaggcaagaccttcaaggattggcctgagatggtgggcaacatcatcccgttcatctctggtgaagaagcgaagtccgagaaggaaccgctcaaggtgttcggccatgtggacgccgaaaagggcgagatcgtgccgttcgacggcgacctcaagatcacttcgcaatgcatccgcgtgcccgtgctcaacggtcacaccgccaccgtgttcctgaacttcggcaagaaggccaccaaggaagagcttatcgaccgtctggtgaactacacgtccaaggcttccgagctggagctgccgcacgcgccgaagcacttcatccagtacctcaccgaggatgaccgcccgcaggtcaagctcgacgtggactacgagggtggcatgggcgtttccatcggccgtctgcgtgaggattccatcttcgattggaagttcgtgggtctggcccacaacaccctgcgtggtgcagccggcggtgccctcgaatgcgccgaaatgctcaaggctctaggctacatcactaagaagtagttgaatctcgttaaaatcgcaaaagccctccgcaaggagggctttcatcgtattaggcgcggaattcgcggctcagcggccagtaccgccgtacaccacggcttcgatctggtcggcatcgagaccgtatgcagtgtgcagcgccttgacggcgtcgttgagctgatcgagcggcacgagcgcggcgatacggatctcggaagtggagatcatcagcacgttgatgccctcatcgctcagggcctggaagaacttggcagccagaccggcgtgggtcttcatgccaacacccaccacggctaccttgccgacgttggtgttcacatcaaaggagtggtaacccagcacttcctgcttgtcgagcagcgtgttctgcacctgcttgacggccgattcgggcacggtgaaggagatgtctgcagtgccaacggatgcgccggcctgcacgatcatgtccacgttcacgtcggcggtggccagctcggtgaacaccttggctgccatacccggctcgttcggcacgccacgcacggtggccagcgcctcggaacgatcgtgggcaatgccggaaatcaccggtgcctcggggcccaggtcagggaacaggtcgcccatggatttcgcttcttcttcagtcatgtcttgccttgtcttggttgaaattacttacgattattgttcgctgtagccgcgctcagtcgaggttcggcagcgtgcgcgggtcaatgccgtcaggcacaaccagcgtgccggggcgacgggagaacgaagagcgcacgtgcaacggcatgttgaaacgctgagcgtactctacgcagcgcagtgccagcaccttggagccgcaggaggccatttccagaatggcttcgtagccgatggaaggaatacggcgggcggaaggcacgatgcgcggatcggcggtaaagatgccgtccacgtcggtgtaaatctcgcagatgtcggcaccaagggccacagcgagtgccacggcggacgtgtccgaaccaccgcggccgagcgtggtggcgtcacccttggcgttgatgccctggaagccggcaacgatggcgatgtctcccaatgagagcgcgttcttcacgcggtccggtctcacggccttgatgtgggccgcgccgtaacgggtgtcggtgaagaagccggcctgctgaccggtgaaggagtgggcgcggctgccttcggcgtgaatggccatggccagcaggctcatggaaattcgctcgcctgcagtcatcagcatatccatctcgcgctcgggcgggttggagtcgatgctcagcgcctgatcgataaggtcatcggtggtatcgcccatggcggagaccaccacggccaccttattgcccttcttctccgtctccacaacgcgcttggccacacgtttgatcgaatcggtatcggcgaccgacgagccgccgtacttctgcacgatgagagccactgctgtcctttgttcttctcttagggatttgtttggtcgatattctacgcaaacgcaacgattataagggctgtcgcgttcaccccgcgaccccgcgccggcatgcggacacgggtatggcctacgttgttcagcaaatattcaagttttcaccggtggttctttgagacagccgcatccatcctttgagattcgagcggttaactatcaattaccggcaaacgaaagcaaaccggcgaggtttccgcagaaccccataactgaataccttgtcatgggcgaaactttgggctacaaagtggaccgcatttcggtgattttgccggatgacacgtcgaagctcaagattgtgccgggtgaggaccgtgtcaccttgatgacctgtacgccatacggcgtgaacacgcatcgactgcttatctccgagcaccgcgtggcaattccgatgccggcccccgagccgaatgacgtgcttgacgcgcgcaatatcgcccttggtgttggcctgggcatactggcggcaggactgttcattatctggttggcacgacggcacaaggccgcgcgcatcatccgccacggcgcattctggccgtggatgcgccgcaagggcgaaagcgccaatgatacgctggcctaggcctcacgccgaccggccagcgccctgcccagcgtgatttcgtcggcgtactccaagtcggagcccaccggcaggccgctggcaagtcgggtgaccttgacacctacgggtcgcaatagctgggtcaagtagctggtggtggcctcgccttcaatattcgggtcgagcgccataatgacttccttgacctcatcgccttctaagcgtttgagcagactgggaatacgcaggtcggcagggccaacgttggccattgggttgattgcgccgccgagcacatggtataggccgcggtattcgcgcgtgcgctcgatgctcatcacgtccttgggctcttcaaccacgcagatcaccgaacggtcgcgtctcgggtcggcgcataccgggcaggggctggattcgcacacgttgccgcaaatatcacagaagcggatcttggccttgacctcctcgatggcctcggccaaatcgcgcgcttcatcttcgggcgcggacagcatgtagaaggcgatacgctgcgcgcccttcggcccgatgccgggcagccgcccgaaagcgtcgatcagtcgctgtattgcgccgtcataagcaagtgccatgggtattcctcgttattcgtcctcattattcatccgagtgcttcttggcaggctggatgttcttggggttcttcggatcatctgccgcgaattgctcgacttttttgacctcgaatagctttttcagatcgtcaagattcatggccgtcgcctcgccgagcgactggtcgttcatcgagtattcgtcgtcctcggccgcgacttgcggttgcggctgcggctggctattccacgggtcggcattcggcgtcggctgtgcgggctgcggttgattccacgggtcatcgccggcagccggctgcggaaccgattggggctggttccacgggtcatcgcccgacatattgcccgacactgtctgaggaaccgaagaagccggagtctgggactgcggctgattccacgggtcgtctcctggctgcggagccgcctgagcatggttcccctgcggctgattccacggatcatcgtgaggagactgctgatatggctggttccacgggtcggcttcgaccggttgcagtgccagcgaggccgtagcctgagattgcggctgattccatggatcatcgcttgcgccggcaactgccgtagcgggagctgcggtggctggctgccccgtggactgtccagtgggtccagcggacgcaacggacgcagcgggtgcaacaggagcagccggagcggcccacggatcaacaccatcactgatgtccggaaccgcaacatgcttcttgtgatgctcttcgggcgcaggcgcagcagcgggctcgttaggtgcgaacccgtctgcagattgcggtgaagcgttgcttacggccggcttggcccaagggtcatcgtcactccaactcttcgccgccgtggatgcactggattggccggctcgatggctgtcgtccgtatcctcggcttggcctgttgcagtcggcttcggagctttcggctcgctccccatatgaatgcccagacccgcgcccaaactcgacgcggccaatccggccttggccatggcaatctgctgcttgaccttggccaattgctccgggctcatacgtttgacggattcgactcgctcgccattcgccgcgaccgcagaaggtgcaataaccgcattggcaccgaactcgttgcgcacggcatccaacaccacggacgccgccttcttaccgctgttgtccacggccaaggcgaaagcgtgctggctcagcgacttgtcgaacgtcatcgacaggcaaggcagactcttacggttgggaccgaattttacggtcggcaccttgtctcgtgacacatattcacgaatggtttccggcaaagcggcgacggctgcatcccacttctcgtcgatggaccgattatccgatgccgcaggcgaggtcaccggttgggccgggacggccggcgacgtggcgggatcaccccaggcattggcagcagcagttgctgcggcaggttgcgcagacggagagcccgcgggccggtcgctgactgggctgctgacagggccattgtctcccacagcggattcatgggaagcggtgctctgaggcgcggctgcttgctggttgcgtgcagcaccggagaatccaccatgtgagactccggcaaacccgcctcgcgatgcgccggcaaaaccactggcacccgtaccggaagcggctgacgtagtcgaagtcgaagaagcagccgcaggcggcatgccagaagaagctggcgcgggagcggctgttgcaaagcctgattcactgccggccaacaatcgtgcggccagcagttccaagcgcatacgcggagaaatggctccggtcatggcacccaacgtagtgttgatgatgtctgccatggcggtcagtgcgcccagtcccagcgccttggcttggcggtgcagatcgtccatatcctcggcctcagccgtgtcggacagcacggattccgcacggtccccggccaacgtaagcaccagcagatcacgcacacgagccagcaggtcttcgacgaatcgtctcggatcgaatccgccgaccacgactttctggataacgccgtacagggcttcgccgttgtgattgattaccgcatccactgcctcaccgatcagcgcctccggcgtgaagccgagcagggctacagcggcatcatgggtgataacgccttcgaccgaaccaaccatcagctggtcaagcacagacagggtatctcgcatggagccgccaccggcgcgcatcgccagtttcagcacaccgggctcgggcttgatgccttccttgtcgcagatcgtctccaggtagggacccatgacttcctgcggcaccagacggaacggatagtggtgggtgcgcgaacggatggtgccgatcaccttgtctggttcggtggtggcgaagatgaacatcacatgttcaggcggctcttcaacgattttaagcagcgcattgaagccctgctgcgtgaccatatgggcctcatcgagaatgaaaatcttatagcgatcgcgcgcaggggcgaaaccagcgcgttctcgcaattctcgagcatcatccacaccgttgtgcgaggccgcatcgatttcgaccacgtcgatggaacccggaccgccggtggccaggtccttgcagctttcgcattcgccgcaggggtgggaagtcggccctttggcacagttgacgcaacgggccaggatacgcgcggagctggttttaccgcatcctcgcggccctgagaacagataggcatgcgtaagcttgccttcgtccaaggcgcgcatcagcgggaccgtgacttggtcctggccgatgaccccttcgaaggtgtccggacgatagcgacgatacagtgcaagtgccatagctactaacctacctttgccctcagaattaaccgataaaaagtcaagataaaccgggctcatagctgccgaatcgggaaaactctttatattccaacgacattcatctgacaacggttaccgcatttttattgttattaaccgctttctttgtattaacatagtgtcaataacggttgtagtcaggaggtacccatgagcgatatcctcgacaagaaacgccccacccgtggcgatgcccggcgcgacgccatcgtgcaagccgcgcgcaaggtgtgtctggaaaaaggcttctccaaaatcaccgtttccgacatcgcaagcgaagtcggtatgacgcgttcgctgttctaccactacttcgaagacaaggaagccgtagccgacgcagtactcgatgacgtcatcgacgaaatcctcaccacgttgaagcagtggaaccaagcgcgcgaaacaggcaacgtgaacaaggcattagacgacatcgtgcatgtgctccgttccctaatcgccgacgagagccccttctcaaaccgtatgatccaagatggcaacgccgaactgtatatcaagttcattgaccgcgcggcggaccgtattgccgactacattgcccagaccaccgtacgtgatttcgagcagatgcatggtctgccaatcaccaacgtccatgagacattcttcacgctaatcgtggggcttatctcgctggttcgctcgcatccgaacatcagcgaccgaaccatcaaagaggtcatggcgcagacgctgcatatcgaaagctatgtcgtctgaggtctgacggccattggctctggtaccgctctcccgcactcccctcagtccgcttcgcggccagctcgtccgcaatcgcggacagcctacggctgactttctcctggttcgactatcgtcgaaccctcgcctacaaacatcccactgggctgtttgctttacggctcagcctaatgaggggagccaatataatcaggtcaggcgaactggccggttacggggtcgcgaccgtctcgggcgatggcgtcgagcacttcctgtcgggagtccacctcacgggcggctacggccggcggtaccagcacgcgtagcgcgcagtcctcggccactaccctgaatggcagatgcccgatgtattcgccgtccgccatcagcaccggtggctcgtcgccttctgcggctcgcgtgacttcgatctcgcgtatgcgcttccacccgaacacctttgaggcgagcagcttgccgttataggcgttcgagatggccaccgcacattcgccgaagttcggcacatgattcatccacaccaggtccaacagcccgtcggagaagcaggagtacggtgagacctcgataccgccaccgatatgacgcgaattcgcaatcgtcagcaacggcgtgatgatgtctcgttcatccgtggtaccgtccgccagcgtggccttgacgtggtacccataacgcttcatatgcgtcagctccaccagcaccgccgcaaagtagcgcatggtgccggtcggcagatgcgaatgattcgcacggtcgttgatacttgcgtcaagaccacaggacagcatgcccgcatagtaccggtcaatcgggtgctcggcagacttgttctcccggtactcgtattccccgccggtggatgggttcacggcatagccaccatccaaagaggtcacgcgtcccatgtccacatcaatgtgtgatccgcgcacgatagcgccgacgataccttccactgcggtttcgatgcgattgaccggcagcttaagtccccgagcgaaatcgttgcccgagcccatggccacgatgcccagcggcttaccgccgcaacccacggcattggcaccgagtgcgatcatgccgtcgccgccgaccaccaccagatagtcgtactcgtgcgcgcgttcacgcgcctggttcagggaatcgtcgaaacttacgccggtgatgtcgatgacgtcgaagttatgggcacggccggcgtcctccagcagtcccaatactcgcgcatccaccttggcaccacggcccttatcggaagtgggattgcccaccatggccaccacgcgacggcgttctgtgcgttcactctcgctcatgctctcaccttaaccaaaggtccagaagcccgccagagcatcagtgcttacggtccattattgtgataattgtctccttccgtacaattcaccggtccggcccgagccatccgctccacggatgatgccaccggaaccatggtttccaccttgatggttaccaacacgtcttcatcccgcacggagcaggagcccagcgtgacgccattcgcttcagccatgtttgcagcaagcgcgcatggatcaccgatatccacatgccacagcgcatacgcggcgtcaaaggcgatgagatcggcgagggaacgcgctcgattctggcagatcatgaggttgcccacacttgccgccaccgcgagcgcaatgcccaccgccataaccagcatggctccggccatcgtgcccgatccctcctcataacgcattccctgcaccgcagttcctttctattgcggccgcccagccagcagccgaccagttattggcttatcgccgtagcgttgccggtgacccgcgttggagtgacatccagtgggccgggcagtaccgaacattcgaccatcacgctcgtcgattggccgttgtgggcaatgctgacgcggggatctccccctgcaacgtccgcagctatgctgcgcgcggatgattcgtcaccggtaaccacaaactcgcgtgcagccgccgtcgcggcaccttggcagtccatggaaacgatgaccacacgtcccattgccagtatcagcccggcgatggcgataacgccgggcaatacgatcgcgaattcggcggtggccgatcccgtgcataggtctggcggcagtctggcgagcctccaccggcatctcatggtcttcatggctgtcacccgactttcagagcctgtttgatgatgttggtcagcaacgtcttgatggcatccgacttcaggatggcgaccagcaccgccgcaaagcctgtagccgcaacgagtacgactgcgtattccgcagtggctgcgccttcttcgggctcagccatgagggcgcggatgcgtgcgtccatgaggcatagccgttctttcgccttggcgttcagcgtggccacacgagccttgctgtgcgcaaagatgccggcctgcccgtcgacgatgacggggataggggtattcattggcgttcctttcggtaaggaggggaagctgcgcagtggcttcgcaccttccccatgcgtatgtgagtggttggcccccgcgccgggttgacgcggggtgcataccactgtggactatcaacgcttcatgcaccaggaaaaacggggtatgtggttctagcttgccgagttatccacacctcgacgtgtcgtccaccacaaatgtggataaccaaacgcagccaagtacaataccgagcaatacaacaagattcagcctaagcgcactcagttcacgcctatattcacatcatgaaggacgcaatcgccggaatgactcctaccagcacgaatgccggcagaaaacatagccctgtaggcatcagtagctttaccgacagcttcgcggcattccgttcgatagcagcacgctcgtcacggtccagctgttcaatggcggattcgaggcgcacaccaggcatatcgccatgcgtccatgacgattccaaagccgattgcagcaggccaagatctcgttgcgtggtattcgtatttcccttggatggactatcagctggcgcaccctcatgctgaacagccatagcggcatgccacgcatcagcccagggaacccctctggtcagggagttcccgacctcgctcatgtgagcgccgcagtcgccgccgacggctttgcccaccatgtcaagcgcccggggaatcgaggagccctgacgcaaggacacctgcaacatacgcaatatgagtatggtccatgacgacccgcaatcatgcgctacggccggctcctcgcccggcaagcggctgtcatgacgagacagagccttatacaaccaaccagcaatcgccgcacagcctgccgcggcgtgtacccacaccgtactcataatccgctgcctttcaacaatgcccgcatccatgccaagccggcagcataacaacatcctcccaatatcaagcagaccacaccgcgtggcgatccaagcaagaacgccaatggtctagctcccagaagctcgcccaatgccacagtgacggccggaagcgcgctcagcagccccacagtggctttaggaacggcacatgcttgcgatcgcaagttctgcatcagcctcatctgccggtaagcagtcaataccgcttccagacatggcaccgcttggcaaccgagctcatcgctcaaaaccgctgcggcggcgaccccgcgtgcagcttcaagtacctgcgctggtgattcgtcgggcagacgccgctgttcgaacaccgttatgagccgttccacagtaatgcgatgagtggcgaagcgtctgctggattgttcctcgaatgcttcaaccaatgtgccgccacctcgcaatcgcgcgatggcggacgtaatcacctgcgcaacgcccacgcgaggtgagtcggcatatcgaggttcgtttatggctgcggaatcgaccgcgcgcccgcggtaagccagccggtacagcctcccggacttgttccccggccatatcagcacggcgagcgccaccagaacagcacaccacatcatcacccaccaccactcggcctgggaacgatgccccatcgttcaatgaagtgcccccattcggcggcataccgaggaggatggcagccattccataccgccagcggtgttcctgccagttcaccatgtgctacgcgcagttcgccgatctgcgtgatacgccgctgtccgttcactcgctccaaatgcaccaccgcgtcgaaagcgcctgccgccagcatggtcaacgcctgtggactgactccggcgagtaatccaagcgaaatcagcctggacggtactcggttcacgccgtccgcatgcacggtggtcatgccaccgtgatgaccagaattgaacgcgcgcaataggtcgacgatttccgcgccacggcattcgcccagcaccacgcggtcggggcgcattcgcaacgtcgctttgaccaagtccgccaggcttatggctccgacgccctccacattcgcctcgcgtgttaccaacgagacatgatcgtcgcgtcccagttcccccagttcacgaacttcctctacggtgacgatgcgctcgttcacgtcgcattgcgccagcagcgccttgagcaaggtggtcttgcccacgcctgttccgccggtaatcagcactgtggcatgtttgcgcaccaatcccacgaacgtcggcagccaagcagccgggaatacgcctaatttgctcaggtgctgtagcgatgccatggttcggtcagggaatcgtatggaaatcgcggcaccttgtggcaccaatggggcaatcaccgcatgcacgcggatgccatccggactggcggcatccgctatcgggcaggcatcatccagtctgcgcccgagctgcgcgcacagttggacggcgtattctcgaactacttgcggcgagcggaacggcacatgcaatactgtttcgcgcatgccattgccgcggtccgcccaaacgcggccatcacaggtcaccgccaaatcggtaacctgcgggtcagatgccacgtcatccagcagaccgaagaatatggttctgagcgctgtgccagcctcattggctcgcgtgctgacggcagccatagcatcactggtccttgtgagaagctcccgaaaccgggcgaatggcctgttctacgagatcggcaagcaagctcatggctttgcgactgcctttggtcaccgatctgatgccgaggccttccagtacgtctccgcacagattgacacttggcttgatgggccccaataccgtggcagtcaaatagtcctgcgcctcgccaatacccacgtggcctctcccacgtggagcgccacgtggttccacacctacgatatgtggcgcttcacagccccatgaatccaatctggaccggtgcgacttggctctggccagccccattaccgacaattccgcggcaatcacctgcaggccactgcgcagatcgggtacggtctcaatgagtccaccctgaccggcatctacgatgacaacgtcgttcgtttccgccaaagcccgaatggccgcttgaacttcccaccagtcaggctggcgcgcgctccaagggtcatagggaagtactcgcacaccctcccacatcatcagctcatggttcatcgcctcaccctcgatacggccgaggggcgcgtcgacttggctgaaccgcaagcccggctctcgttctacaccaagcagcaggtcaaggcatccggccacgaaatcagcgtctatgagaacgcagctgtgttcacgtctcgccaatgtccatgcaagcatggaagccatgacactcaaccccacgcctccatgacctgacgtcatcgttacaatgttatggaagctggtgtctgtagttagggcgagtgccggagcctcgcccgatctctgccgttcgcatgaggccaacggcctgggcggcggagtgtagtagcgatacgctggaattggcgcatcgtccgtgggcagcggaatgcccggaggtgctaccgctggcgaggtgatcctacgcgccacgcggggtgtggtgttgctattcataagccgattgaaacgtgtccaagttcaatgctcaacacgaatcgaccattgtggttctagcttgctgagttatccacaccccggcatgtcgtccacgacaaatgtggataaccacgctgctgtttcacgcccatctcatgcagaaaaggccctgacctcacatgcacagtcagggccttcattttcacgacgattccttatgcggtaatctacatttcttgcttacttatcgaggttcttaatgccgtcttccatagcatccaactgagcatcggtcaccttggccggcttcttcttgccgaacttggccttgagcagaccgatgatggtcggggcgagcgagaccagcagaatcaacacgatcaccagctcgaagtggtcctgtactgccggaatgttaccgaagaagtagcccagcagcgtgaacaacgtggaccagcacaggccgccgagcactgagaacggcgtgaaacggctccaacgcataccggaaataccggagatgaacggcatgaacgtacgaatgaacgggaagaaacggcccaggaacacggccagcgggccccacttctcaatcatgtgctcggttttggccaaacgctccggagtcaaggccttcaccttgccggactggatgatgcgacggccgaagaaatgaccaatgaagtaattgcactggtcgccgataatcggggcgcaccagaccaccggcagcagccagaacagcggcagcgcggccttgccggtcgcggcatcgggagcggcgaacacaccggcggcgaacagcagggagtcgcccggcaggaatgggaagaacaccacacccgtttcgataaatacgatgaggaagatgaagccgagggtcggcgccacgcccatggcaatccaaccggcaatcgcggcacgcggatccttcagcagttcgaggatgaaattaacgaagcccatgtgattcctatgagtcctatacgtctatatgtgtgaacaatctgtccaataaccagacattcgtctgaaaaccgtcaaccactctaccagtcgccccgatacaagagggggccaccggaacctcatagcagccattactgccatcttctttacaaatatggcgtgcttcgctggtatatcgtcaacacattccaccgctcatgaggagaactgcatgcgcggtgatgtaatcaattactcaccaagacgctggcgcacgaaaccgtccagcgcggccgcatcgataccgtcatacgattcgatggacgcgaactggcccaggccggaagtatccgtgcgaatccagccagtctgcgcgatcagagtcgcgcccgatgccgcaccggcctgaagtccaaccgaggaatcctcgagcaccacgcacttggccatgtcttcacgggcgatgccaagcttgtcggctgcggccagatagggcgcagggttcggcttgtgttcgtacggatcgtcgccacagacgtagccggcgaacagtccctcggactgcttcatgatgttctccgccatacggcgcggcgacgtggtgaccagcatggacggaatgccggcctccttgagcgagtgcagcacgtccaatacgccgggaatccacggcagacgttcgacctccgccttgaacacataatccttgagctgtttgtcgatttcgggaacgctcaatgtgcagccatgcgcaatcatgacctctgccacgtgtggcaccggagtgccggagcactcccaaccgaggtcctcgttccactcgccgccattgttgtgcgcgatctcgatttcaccgtcatgccaaagcggctccgaatcgataagcgttccgtccaaatcccaaaacacggccttgagcagcatggttacctccgtacgtcgcagtgaatcctcaactattcgtattcgatatacctatctcaccaactccgcacgacagccgaacagcaaatcaccaaccccacaggaccatggatttggaatcggcgggggtggagtcggattcgcgcgtggtgtcggcagcggtatcgcggccgggcagttcgcgggtttcgcggcggatggcgttgcgccagaggcgggcgcggttggagcgttgtacctccacgatattgccgtcacggcctgcggcgaaaacgctctcctggtcgccggtttgcatgcgtttgacttcgcggcgcagttggcgattctcttcttcgagggccaaaatgcgtgcgatgccggaaagattgatgccctcatcctgacttaggcgctgagctcgagtcaggcgggcgatgtcgcgcaggcagtagcggcgtgcgccgccatcggtgcgctgcggacggaccagacccagccggtcgtactggcggagggtctgggggtggatgttgcccagttcggctgcctggccgacggtgaagatgggcagttcgatgtcgaagccgacgtcatcggctccgtcgagatcggccctgcccatcaccagcgcggttgcgcacatcgcgtacaactgcttcatttggttggctaaccgcgccattgttcacctcctgattacaggctgagatagtcgccggctttttcgtcgaattctttggcggcgtgcttgacggccagacccggcttggcggggaccatgatctgcacgcggccgatcaggtcgcccggctggttgccgcgctggacgccaagtcccgcgagcttgacctcggcaccggagctggagcctgccggcaccttgaaggtgacgggattgccgtcgatatccttggcctcgaccttgccaccggccacggcctggcccacagttacgggcaggtccatgacgatgtcgtggccgcgcatcgagaacgcggcatcgggcttgacggtgacgtgcaggtacaaatcgccggccttgccgccgttgatgcccggcttgcccttgccggcaagcttgattttctggccgtccttgacgcccgcaggcacgtgggccttgaacttcttgccgtccacggacagggacacggtagcgcccttgaccgcctgacgcagggtcaggctgatcttggagttgcggtcctcgccgttttcggggcgcggggcctcctcatagccatagccgccggcattgccgtacggcgattggccgtagccgccatatgactggccgccctgacctgcagcaccgccgaacatcgagaagatgtcgttgatgttgttggggccgccgcccgaagtggagaagcggatacgcgaaccgttgccaccggcaccctggccaaacatggagccgaagatatcagagaaaccggaagcgtcgaagccgccggc

SEQ ID NO: 2084 - DNA, 18151 bp, Unknown
  R51_24m  MAG No. k141_104
cacgatttcgcggtaaggttcgtcgctgatcaggaagatgtcgtggccgtactcggcctgcttggcggtcaggatcgcggccagacgcttgagcgtgtccgccgaatacaccgcgccggacgggttgttcggggtgttgatgagcacggcctgcacgttcgggttaagcgcggcctcgaacgcctcgaagttgatctggaagttctcggtgtcggccggcacgatggtcagcttggcgccgatgcccttgacgtacggctggtattcggggaagtagggggcgaaggtgatgatctcgtcgcccggcttggtcaccgcgcgcatcgcgtgggacagcgcgcccgccgcgcccgtggtcgggaagatatggttgccggtgtatgccatgccgaaacgttcgttgagattttcggcgatcgcatccttgacggacgggatgccgagcgaaggggagtagccgtggatggacaccggatcgccgttttcgtagaggtcgaccatggcgtcggtgaaggatttcggagccggcaccgagggattgccaaggctgtaatcgaacacgttctggtagccgatttcagcaccgcggctcgtggcgtactcgctcagttcgcgaatcacggacttgccgccaagcatggccttgtattcctcattgatcatggctgttctcctcgcatggttgtactggtatgcaccacgctactactatcgcggccggtttgcgccatttgccgcgccgtacctaagccggctgttctatttgttctattagtggagtttgaaccggcatatacccttgcaataaagccatctgtagggtctgaggctttccggggttgcttgtctcatagattttcggcctcttgatatttgcggttgatagctgtgatgtgtgtgggcgatggctgttgaggcatcatggggatctcttcgactgtccgccgtcgccatgccgccatgatgcctacagaaagtcgagttgcgtatttccgccaagcagggtggtgaccggtggggggcgatcggtgggggtgaccgacacccgctataggcagcaggcagccgcacacatcccaatatctgtgggacggcagacgagtcaatcgtttgtcgtccgcgccgtccctcaagagcgcgggatggcagacaagtcaaccgtttaacgtccgtagcgtcccacaccgacgactgtagaaaccgcggaataacgccgattctcgctgcagctccatgattatgcacaaccgttcatagcgagcgctgtgggacggcgggcggaaaacggccgaatccgcgtgccgtcccacacctcgtataatccgcgttttgggaaagcatcaccgtaaggctgacgcgcatccgcatccacagcaggagccttaccggccgtaatcccgcactcgattattttttctgacaggaaatcgaacccgaaacactaacccatgcccgccccaccgcaaacagcgaataaccaaaaaaaatgcatgatctatccttggtgccgaataatgagagcctgactgtagtggctacgggtagctatattggagaaggattcgatcagaagcgtttcgacacgcttctgcttgccgctccggtctcgtttgagggtactctctcgcaatatgtagggcgacttcatcgcgagaatgatggcaagaccgaggttcgtgtctatgattacatcgacgtgaccgtgcctttatccgctgtcatgtatcgaaaacggctgaaggcatacgcaaatcaaggatattcggtaaatcctgaccatactgagaaaatggacatgctcagtgcaaaggcggaagcgttgcgcgcttgcatgacggccgcgacgcagggcgaagatgctgcggatgcgttgctcgacacccggtctgacggattattcgaaggcagtatcgttacagccacgaattatgcagagatactccgcaaggatattgccggttgcgcacgttccctgattatctcggctgaatatgtatcacaacagggactcagcgcaattgacgatgaattgctccgactggccgacaggaaagcgctcatcgaagtttatgtccgtttgccggcgactgctgcggtggcaaccagaacacgaatagaacggaatattaatcggctgcgtgctattgggtgcattgtccggaccgtcgaatcgtgttccgattttgccataatcgatgacggattgatttggtttggaggcatccctttacttggcaatccaaggagtgacgactgtgcacttcgattcaaagatacgaaaatcggcgagaatctagcagatggactgaaacgacggtcgtcctgagtcaatattcagttaagataatcgcgcagtacgagggcgtgattgatgtgcgggtccttggcggcatagagcagggtcacgtcgggatgctccgcgcagatgtggcgcagattgtccacggcggcattggcgtcgagctcggcgatgtaacgcatgcggaattccgcgaatttggcggggtcatggccgaaccatttgcgcaggaggggagagggagcgacgtccttcagccacaggtccaacgccgcacgctctttcgtcatgccgcgaggccacaggcgatccaccagcacccgatacccatccgacgcagtcggctcttcatatatacgtttgattgcaatacccatacgccccatgattggcgtgcgcttgccggaagtcaaggggagacgcgatccatctacccgttcgatttctgggtgttctgtctaaggccttgtgctatgacagctagcgattcagcagcttttggtgatatcgtccaaccggaccgccttgcccctgtcgaaggtgttcatagtgagatcgacgggtttggtcttgatgaacgctgacagcgcggtgtgcggcgggttgtcgatcaagtgggtgatgggggcaatcgcctcctcgacgctgacgcccacaatggcgtaaatggcacgcgccagcagcttcatcagtggcgaatcgaaactgttcaatgccccattgctgcgcacggcccaagggttgaacaacacatagcggatgcggcctccggtctgctgttgtttttctgcgaagagcgctccccagcagatcgttcagacgactcgtacagatagtcgcgcaatgctagaacgtgattgatgtgcacccttcattgacggtctctcaattgatctcctgcgattcatgccgtataaggaagttctcgaccaaggcgatcatcgtgtctttctccgcaggtgcggacagtgcaatcatcagcgtcatcgccgccaaggcattaccctccacaagcaggggagtcatcgtcgcccagtatactgttgccgttcaggaaatacacgaacagtgcggcggcacaacgtttattgccgtcggagaacgggtgatccttgacaacttgatacagcaggttcgcggctttcttctgggtggaacggtacagttcttcgcctccgaacgtctggtagagtcctgcgacgattccttggaacgaaccgttgcgttccctcccgaacagatcggattgcgtgtagaacggcatcgaccggatgaacagcatcgcgtcctcataggtcaagacccactgggactcgtcgcccttgggtatagggacattgcctgtgtcatagtcgttaagcagcacaagactcggcaaatatcgttccaagatctctgcggtgccagcaatttccggttcggtggacctcgatagcaccttgacgacggcgtgaagtgcgtcaagccgcttgtgattgatggtgtaaccatcaacgagatgctgcttcagaactgagttggcccatcgccggaaattagatgccttccttggatttgacgcggtatccgaccgacaggatcatatccaagttgtaatgctcgacttggtatgtcttaccgtcagatgcagttgtcgcaaattctgcgacaactgaaaatccattgagctcttccctcaatgcattgccgacatgcttgccgattgttttgatatcgcggccaaacagcaatgccaattgctgtctgttaagccacaccgtgtcctcgtccaccttcacatcgaggtgcacggtgtggtccgcgctctcgtactgccggtcgagaaccgggtggcaagggcggccaccaccagtatagtcaccacaccggcgcacaggatgccggcgatggaggccacatccgaagcgatgtccgcacctgcggccggcagcagtgtgccggaagcgtagtcgaagcgcgcgatgtacaggatgtagagagcgaccgtcaccaccgtctgcaatgccacgtacacggcgtagataccaaacagggcaaggattttcgcattgatgatcgtggcgcggtccagatccttgtacaggaacatgcggccggaggccacgggcgtatagatggcaccagccaccagataggccatgaccaccatcggcagcatcagcatgttctgtacgacgaactcgccagcgaggaaatccagcacactcaccgaaccggtctttccgctgactttcatgaaatcggagttgaacaggttcacggccggcagaatcagtatgaatgacggcggccggatccaaagccgcgaccgccgcacgtttcgcgacaccgagcggccggccaagctcgataaccgtgatccgcttctgttcgccggcgaattcgtccgcaagccggccgcctttgatgaacaggaatcgcccgcacaactcctgcaattcgttgagctgatggctggagatgagcatggcgatgctgcggtcgcgataccgccaaagccccacaagttcaagcaccgggcggattgggaggtgcgggcggcgggtcggacgatcacagtgtgacccgaatacgttcatgaatcatcgaatcacaaggcggggcggcccgcaagtattcgagagtcgccagttcggtcgatttcaatgacaatggtgtggacgattacgcggatatcgtggcgggtgcgcgcaaggacgccgaaaaccatccggcttacgattccggctactatcagggcggctatccgccggccgatcgcggggcgtgcaccgtacgtgattcacaacatggcgcagcggcagcgcgaaaacgactacttcgccttcaagaagcacatgacggtcaccgggcactaccgtttcgacgcttcgaaagtgctgtagagcgtactcagggcttggcggtgacggtcggagcggcgtcggcattgccggctttggctccggctgcatcagctgaatcggtgccggccgcactggcgttagcactatcgtcagcgttggcaccgccggctttggccttggcatcagccgcgctcccgccatcgatcaccagtcgcagataatcgcggtcggcggacttgcggcgcggcacgaaccgactgatgatggagtttttcttgccgcggttcttcacgtacaggaagccgaacacggagaacacgaccgcgccgatgaagttgacgataagatcctccatcgtgtcgatcagaccgatgtcgaggtagccgccgaggcccaagtcttggccattgaccgtgacctgggtgatgtcgttgatgcgaatcgcatggttggtgtgcgtggggtcgagcatcaccgagctgatggaatgcacgatggcgtctttctgcatgtcgaatccgaacaactggtccatgccgaattcgaagaactcccagatcacgccgatggtcatggagaagcagaaggagacgatcgccagatacaggggcgaaagctcgaacttcacccggtcggaccggttgagcaggtcgaccagcgagaagccgatcgccgcggcgaggaagccgttcatcgtgtgcaacaccgtgtcccagaacgggaagatctcatagaacgaactgatctcgccaagaatctcggacgagaacacgaacaccagcacgatgacttccagcaccgaaggcagctcgatgcggaactgcacctggatgaacgccggcgccaacagcaacagcaacgtcaggatgcacaggaacacattttcgtagtcgccgttaaagaactggagtattgccatggcgagcaccagcatgcgcagcaccacatagaccgcgaatgagcttttgtgttcgcggatttccatgtctacggctcggctcatggtcttccagcgtacgcgccaggacggtttgcgttgtgcgtcgtgctgttgtgaccgtttccgggtcattcttgcctctttctcgcattgttctcgcgccagtctatccgaacctgcttacaggcaatcggcaagaacgggcgatagtctggccgcatgaaccgaatggaaaccgatgctgcctcgattgtggaccgcacgaatcatgcggcgatgctcgatagggccattgtgccggcggcacgccaccgcgtgtgctgattgcagtgctcgccgtgctgctgtaccgccgtatgggcatgattacaccgctgatcgtggctcatggcatgtatgacgtctccgccgccatgaccaatctgaccggaatcgccggctcctcatggtcactggtcgtagggctggcaatcatggccatgccggtggtttgggctatcgtgaggtgtgcgagataggctttgtaccggttggcagcaaatcaaaccagcgagacaacggaatgaacgaagcgaaaggaacggtatctgatgactccgattgaattgtcaacccgacgccgggttacgggactgacttcggatgagttcgccaggctgttcgtctctttgcaacgcgatgtggacggcgaagccgcgcattggagcgccacggacgtcgaatcctgggagctggtcggcccgccggtgaccgccgaacagcatcttatcgacacgttcgccgcggccaacgaattcgtggccacgcttgcggaccgtctgtaccacacgatcatgccagtcacggaagaatcggtcatcaccgcatacgctgatgacctcacattctgggcatcgcatccggaccttggcggagtgccgtgcgcattatggaacatcgccgcactgcaggcggccgaatgggcccgcaaggaaaccggcatcgcctgtgaactagacgtgcgcgaaccgctggtgtgacagctgagctcaaacatgggcgtaggtaacggcatggtttgaggactatggtgttgcgttaccggtcggaaaggatatgatggtggggcgtcatagcaaaaaagcgcgtggacagtcgaggagacatgcgcgaaagccctccgtttggagtgaaattcgcggctatctgcttacggtgatcgcggtgatgctggtcgtgttgctgggacgcaccttcgtgttcaacgtctatgtgattccatcccgtagcatggaagacacgttgcaaatcggcgaccgcgtatttgcctcgcgattgactccgagactctttgcactgcaccgtggcgacatcatcgtgttcaaagatcccgcagactggatggagggggagcagcttcccaccaatctgatgtcgataatcgacagcaatcgttacctaatcaaacgtgtcatcggtctgcccggcgataccgtcgcctgcaagggatccgaggagcccatcacggtcaacggcaaacccattgatgaaagcgcttatcttaagtccggcgtgaatccaagcgacagtcctttttccgtaaccgttactgacggcaacgtgttcgtgcttggtgataatcgctccaattccagagattctcgataccatcttgacgacggcaacaatgggctagtgccatacgacgatatccaaggtgtggcgttgttccgcttctggccatttacgagaatcggcttgctcaattgagtttggcgtgaatacgcaagttgacatgtgtcgcacggcccggtgcatcctgcagtcggaccgtttccggaaccctccccccgaaatctgacgacccccccccctgtctcacagctatcgcacagctccgatacgggaaacgtgcgggtgattccataacgactacgtatttcaggaagtgacgtgtatcacattatggtcatgtgttcagtgccgcagataggcgaagtttattcatgagccgaatagggccggtgaagcgggctctcactgcgttcataatacggcatatcgtgaacggcgttatcatcacagtcaggccgaattaaaggaggctcggtcatggtcgccgcatccacggcattcagcccgtcaagcacgatgacggccagtttggtggaatcgactggcctgcccagtgccgctattcctgtgcacgaggatggtaacaacggcaacggcgacagtagtgccgatggcagcggcgacgacggcggcatggtcagatcgctgagcctgtggaactacttcaccatgggattcggcgcaatcatcggcaccgtatgggtgctgctggtcggtgactggatgatcgtcggcggtggcccggtcgaggcgatgatcgccttcgtgctgggcgccgtgtttctgctgccgatcggctcgacgtccggcgcggttaccatggtcgggtcgtttctgtccggagtgctggtgatgacgccgctcttctacaccggtttcgacacgattccgcagagtgccgaagaggcaagcgaaggccttgactggaagaagttcggtatggtcatctcagcttcgctgctggccgccggcttaatcatcattggcctgcaggtgctgccgttctccccggccgcgctcaaacccacatcatgggcaatcgtggcggtgtggatttgcggggtctggcattgcgttggatcagtgcacgttcacggcgcgaatagcggtgcgccggtaggtcgcgagccgttcagtcgcgcgcgacccaaagcgtatcgaggtcgtcggcctcggtcgcctttttgcgcttgcgtacccactgttgcaggaaatacgccccatagcaggccacgatgaacacgagctcggccacgagcgcgaaccgttgctccacgtcgaaaatcaccaatacgaacgatgcggtgcacaggatgaacgccgcccaagacacgtacggatagccgggcgtgcggtatttgagttcgctggtggaatggccggactccagccaacggcgacggaacacgatctggcagtaggcgatggcgatccacaccaccacggcggacaggccggaaagcgccaccagcaccaggtacacagtcgaggcggcgatcacggaagacaggagcgccagcaggccaccggccatcgcggcgcacaaggcgagcatcggcacgccgcgacggttcgttttggcgaaccagcgcggaatcatgccttcgttgcccatcgaccacaccatgcgcgtggaggcgtacaggccggaattcgaggcggaaagcacggccgtcagcaccacgaaattcatgatgtcgcccgcataggggatgccgatgctgttgaagacgagcacgaacgggctttcgcccacgccggcctggcgccacgggatcagcgcgcacatcacggtgatcgagccgatgaagaacagcgccagacgccacagggtggtgtggatggctttcggcacggcggtttgcgggtccctcgtctcaccggcggtcacgccgatgagttcggtgccggagaacgcgaagttgacggtcagaatcgtggcgaacaccggcatgaagccgttggggaagacgccgtccttgatgagattgccgaacatcggggcatgttggtagccggcgaccgggatgacgccgaagatggcgagcgatccgatgacgatgaacgcgcagatggcgaacaccttgatggaggcgaaccagaactccgcctcggcgaagaaacgcaccgacaaggcgttcagggtgaagatgagtgtgatgcacgccgcgctccacgcccatgtgggactgttcgggaaccagcgctgcatgagcagcccggcggcggtgaactcggaaccgagcgccaccgtccatgtgagccagtactggatcgcgatcacgaagccggtacccgggccgatgaacttctcggcatacacatggaaggagccggtcaccggcatggccacggacagttcgccgagcgtgagcatgaccaggtagacgatcagcgcgccgatgccatacgccagaatggtgccgatggggcccgcctgctggatggtgtatccggagctcaggaacaggccggtgccgatcacgccgcccaacgagatcatctgcaggtggcgggattccatgccgcgcttcaggttggtatgcagcgcgtgctcgcctttgccgtcatgtggcgactcggactggctgatttgcgctggttggttcacctgttccggctggttttgacggccatccgtctgaatctgcggttcctgctgcgaggacggcgactgtgccgccgtgtcggtgtcgggctgactcatgtttctctctttgccatgcgtgcgttccataggcgtcgtcgtgacggcccggaatagtatacccgcactgaggatatagctgcgctgcatgatgctgagtcaaaatcagcttcaaggggctgatttggcgtttgccggaggtctacttccgtttcaaggggctgttcaactggcggaacgcagatagaaatggcattgttctatcactattccgccgtttttaaccagtggctactttggcatcagccccttgaaacggaagtagatgttccgcaaagtcaaaatcagccccttgaaacggagataggcactcgcagcggctacttcaccttctggatacgcagcacgaacacggcagcgcacacggccatgacgatggagatggcgaacgccggcgtgtaggtgccggtcgtggtcttgaccacggaggtgatggtgggaccgactgcttggccgagcgtggtggccaagctgaggatgccgaggtccttgtcggcctcttccttgttcggcaacacgtcgacgttgagtgcctggtcgatggccgagtacacgccatagccgaagccggcgatgcccgcgtacaggtacatgcccgtgacactcggcatgatccacggcatcgcggtgccaatcgcgaacagcagcgaggcgatgatgactggtaccttgtgcgtgtgcatcttgtcggagatcgggccggagatcagcgaagcggtcagggaaacgaccatggtgatgatggacatggtggcgatggtgccggcagcctcggtcttggtctggtgcacgtaatcctcgacgatgtagagttggtacacggagatcatctggtagctgagcaacatgcacactcggcagccgaacgccttgtagaagtcacgcgaggtggagaacttcgggaagtggaaggagacagcgagatccttgagcgtcatcttggtgcgttccatgtcctttgaggattcctcgcgaggtcagatgtcaagcgccacgaatccggaagcccatgatcacggcgccgatgatgaagccggcttgcgcattgttgatcatgcgagagccgatcatggtgccgatgggctggccggtgaccatgccgcagccgtagaaggagtcggtgccgcacagcttaggcatcgcgattatgtgcctcgtgctcatcatccgtatctgtctattgcctctcttcttctcccaaatgcgcgcgacgcagcgtatgcaggtgctccaaccgcaaatccaacgtatccaacgcaagtacgccgcgcgtaaggatctgcgttccagagaagccatgcaacgtgaaattatggctttgcagcagcggcataacgccaatccgctcggttcatacctgcttcgctgattcaggcgccgattctgtgctcgctgttctacacgctgcaatccctgcccgcaagcgccgccgggaatgcggaaccgttgagcggcatcgaccgcgtcatggcgggcgacatcgaatcatcgtccatattcggcgtgcgcatcgccgactcgttcggcacggtcgtctcgccgcagtcgcacgtcgtcatcggcgtggccgtggcgttgatgtgtctgatgttgttcgcgatgcagtggctgctcatccatcgcaatacgccgaaggacgccatggattcaccgcagttccgcacgcagaagctgaccgcgtttgtgttcccggccatctacgtggtgtcgggcggcaccttgccgttcggcgtgctgctgtactggctgaccaataacctgtggaacttcggccagacgctctgccaactgcgatggtttccggcgcccggatccgaggcggggagcgcaaggccgaacgcgaccatgagcgggagaaccggcaccgcgccgcctccggattgccgtctttggaagaagagcgcgcggcggccgcgcgtgaggaggcccacgtgcgccgcgagcgtgaaaagtcggtcgccagccgcaatcgcagacagcgcaagaacgtgcagctcgccaagcgttgatggcacatgggagaggttacgggggatgcgctgagaccctcgtccccggaacggttcgaagtgctatactgcttgcactacgctgcgatgcctgagcgcaaacggatccaagaccttacgatgacaggatgaacgatgatggccacgaaccgcacgttactggaacaggcccgagaattgcaggcgctggcccagaccggactgatgtactgcaaggaccccttcgaccgggagcgctacgagcgtatccgcgcgatggcggtcgacatgctctccacgcaggttgatgcgccggccggacaggtgagtcgactgctcagcgccggatatccgacgccgaaactcgacactcgtgcggccatcttcgatgaagaaggcaggatcctcatgacgcatgagaacagcggggaatggtcactgcccggaggctgggtcgacgagaaccagtccattcggtccaacgccgtcaaggaggtcaaggaggagactgggctcgatgtgaggggcgagcgactcatcgcggtgcaggactgcgccaatcacaacgcgctgacctatccgtacggggtgctcaagttcttcgtattgtgcagccgcgccggcggttggttctcggccaacatcgaaacgacggaaatccgctacttcgaggaagaccggttgccgcggctttcggaaacaagaaacaccgcggaacaaatcgccatgtgttttgcggcccaccgcgatcccgactggatgacgctatttgagtgaaccccgtgaaggcatccgcacatgcgcgttgcgcggcgccgcctgatcatcgtgccgacggcgagcatcggttccgaacactgacgccgaaccgtcgaagccgttcctgtgggagattcgcgtccaggtcatgcagaaccaggtggccatcgccatgtgcaaccgggtcggcaaggagggcgatgtggcgttcgccggccaatcagtggtggtggacccgtacggcaacgtcgtcagcgagactgatgaccatgaacagttgattatcaccgacatcgatctcacacaaaccgcagcagcgcgcaaacagcgaccattcctgaaactgcgccggcccgaatggtacgcctgaaggggcgaatgggtaataagcaatgtcacgattcgccgcacccatcagccgcattcgtgccggcctacagatacatgaccatacgcagattgcagccagctggtgcaaggcgggaatgtgaagtcattgtgcgtttgcttcgcgaagccgcgcaatgccggattcaaagcagctgctcatcattgctatggatgcgggactgaatggtcacttctcttggaccgccggtctcactgggagctagcgcgtcaccgtcgttgttccagaagcgcaatgcgccttgttgggtctcatcgttgacggatagcaagagatctccctcaaatagtgtgcgtgctgtgcgatgctccgaacgagcatcttgatgttctgcacgaagcatgaggttcctgccccaacgatccggcatgcagtcttgaaagatgcgatgcatcgcattatgctcggccgggaacgttccgggggagaggggcatctctggacagagggatactgcgtttgaagagcgcatataggccgtatcgtatgtgaaatgtgccgattcgatgccgcgcctgatactggtgaataatttcccgacggtgacgtctgtgccgttgaactgcagggtgacgattgcttccatgatgtgttgcgcctcctgctgtactatcgaatacgtttcggagtgtcttcgtcggcgcgtaatttgccgatatctgtgttaagagggtccgtcgcttgctgtacgccgtccagcagtccaagcagacgagcaatgcggaggaagttctcaaagctgccattacccgtacgcagcattttggtgaccgttggcatggataatccagcccgctcggccagcaaggctacgggaatgcgctgttgtctgcgcgccaaatcgaggttggcggatatctgacgcatcgcccgactgaccgggattggtgtgcgtgtcggcatattggcacctcctatcccaaatttaaacataaatttgtatggactagccttatgcggaggttacgccaatatacgacaagaacaaaccgacgtcagcccggaatcttttcgacgatggtgttcaaggtgtcgaaagtctcatcgatttggtccactacctgcttgccctggttgaccatttcggtgatctgttccgtgcggggttgcggcagcgcataaatcgacgtcttgacgcgcttcaagaccgcaccggcgtcggacaggtcctgcttgatggaagcgattttgggaatggaaagcgtgccgtcggagaagttcatgccggacagcagctcttcgatattgaagtccaccaacgtgccctgcgcggcactgtcgattttgggcagggcgttggtcgcggcgtcggcggccgcatccagcatgccgcgcaccgccttcacgtccgaaccgtaatacggcacgtattcggcggcctgccatggcatgccctgggtttcgtctcgcgccgcgacgatgtgactgccagcgctgtccatctgctcaagcgcctgcttgaagtcgccctgcccgacggattgctgtgcttcagccgcatattcgcccgcctgctgcgcctcgccgatcacccgttgtaccgactgccagaacagccagccggaaacgcccaccgccagcagaatagcgaccagtattgcaataacaacagtgccggtatgtttgcgcttagccataggaccaatgtaccttttgtcccatctagcgccattgtgttctggcctttagtccatcaaagtgtccaacagacttgtcttctctgaagaagcgcatggaaatcagttatagtcgattctctcctgtagctggcgaaaaacagatatagttgaattggactaacgggttttatgtagggatgccgaggaggacaaccatgaatcaggggagggctcgactggaacgaattcggtgatggagggctttgcgaaatccccggtcaatcgatttgctgactggttgggatggggattcgtcttcctcggagcgggtataggagcgtttctgggtgtcgtcgcgtacgttcaacactggattagctgacggcttcgaatagttctccgaccgcttctcggatttgccgggtggcatgaggttttcgaccgctcacgtagtggcggcgacctcacgctaatcagtaatacacactttgatctagcagaccctacggctaaggctaggaggccgacgatgggaaaccgcgtatggaaaggtgaaccttccgccggtggccgggccggaacgatcatcgctttgggcatcgcggcgttggtagtggcgggagtatggttcggatggactcgatactagggctatagtccggtttcgaatctgtcgcagacgttctcgatctcattttccgaggatgcgcgggcaatcgtcagcaaggacgaggaaagctttcatggggacggataccggtacgtgaaggtcgccgctgacccagagcaccattctggacggcagggattactccagtggccaactgccccaggagaacatccgcataatcaaggaagcggatgcgaccctgcgattgaacctgggaacacagctcgatgcgctctacgaccggcctcataaggagataaccaacgagggcggcacgctgatcatcatccatgatgccgattcctcggaatggcatttcttcgaatgcctcgtctgaaagctgagcactcccgaaacatatgcgattgtcctgaagaagagcccagaccaaccaagccccgattatccagataaaaagaaacccccagtgcatcacggctgagtcgaagaccgtccggagaggccctttgggggagttcttgatatatcataatgagccatgagccgacagtcaaattcaacaactgatttcctctcacggactccaaggaaaggaagtccgcgggagaaggcgctgcgcgcgtgcattaccgatgaacggcttgccacctacaattatgaggctcaaagacgttcatgcccagcgctagagctgtacctgtgagatcacgacatggccagcgcctgtatgggcgacatcgccatcctcgaggtcgctctgcgcaaccgcatggaccggcaactctccctcctcgctctggagcagaatggcactgaagactggtatatggcagggctacaattcgatgaccgagcccagtaccagattcgtgaagcgtggaaccatctcacccccgcaccagcgaaaaaatcatacgcatggccatctcatagcgtcattgacattcggattttggcgcaatctcttggaagacggcggaacaatccacacgaagtggccagaccagcgccgtgcagattatgagaacgatttatggcgcaaaggactcgataagacattctccaatgggcgccagtatgcccgtgcagtggaagaacgctggacgagaaagtacgcgctggatatcgtaaaaacagtgcatgccctgcgtaatcgggtcgctcaccatgagccgcttgtcaacggcatacctctgccgggtgagaatcgacggattgcattggagaatgcgacgcaggcgtgcttcgctctggcgatgatcctggaccgagacctacacgcatggttgatggataacagcaagatgaaacttgtgctcgaacacgagctgaagcctaatgaataggtagtgagtatcgttttcgccaatcatctcttcagtgggaatggcaatgagctgcagcgacaccaacagattccttaggatccgacaccggcgcatccggcctggtatgcgggttatgacagtgctcgatcgccactgcgggcgaacccgtgccccacatgacataaaagtccttggaaacggccgagatcatcgcgcacatcgcatccagggcgaacggatcattgtccaatacgggcgatacggatcgaccgcgccgcagccccggtcatgtcatcatgtcccatgccgctcatcgtggccacggtcgcagccggacgaaacctgctgtcatgcgattacttgacacgatgttgcgcttttggccatgcgcaggttgaatgggattgcgccacgaaaggatatgccatgaacgatctgctgattatcgacatgctgcccacgtacgggctgctgttctacctgctgatctcggtattcgtcttcgtgggatgccgtggtctgcgccggaggacctcggatcgtggcctgctgcgttttgccgtaggcgcgttcttggttgtttccgcgctcggcgccgtgttcgctgcgctggtgtatatcatggcagcgcctttggcgcagccagatatggtcgacttctaccgcacgtaccggccaggagctctgatcttcctgctgggattgttcatcatacaatttgtcttcggcgtcgctgccgtgtatcggggaaagtaacctggtatatcctgcgataaacgcattggcagacacttgctgcctatctgtaaacacaccctagtaaggcttgcggccgttggtcgagcacagtagtagtgtggtctgctgtgtcaacaggaggagtgtgaccaatgcggctgattgagacatggctggcggaccaggaacgcgcgtttgacttgttcgcgaaattcccggcggaggagacgggattcgagaacccagcggccggcatgaatcgtgaacggttcg

SEQ ID NO: 2085 - DNA, 12827 bp, Unknown
  R51_24m  MAG No. k141_310
acggcaacgacgcagcgaccagcaccggcaccatcgcagacaccaccaacgacgccgcttccggtgccccgcagcgcgcggaaagcgcggaacgactcgcccgtccgctggtcaagctggccaaagcatgcgggctttccacctcgttcatcgaccagctcggcacctacaccgaaatcagcgacgaggccttggtcgccgtgctcaaggccctcgatgtggacgcctccagcgacgaggccataaaacgttccatgaccgaacttgaggccgaaaacagcaaacgtttgctaccacccaccatcgtcgccaccaccggcaaaccgaccggcatcaccctgaactgttcgtcggacgcggacatcaccgtctccatcgagctggaggacggcaccgcgtttggccactttgccctgctgccgcacctcaattccggcaagccggacttgaccatcgctcccgatctgccgatgggctaccacacactgaccgtcacggtggacgggcgcgagggcaaggcggccatcatcgccgcccccgcgcgcattcccgtgccggaggcggtcgccgagcaccagcggtggggctggatgacgcagatgtattccgtgcggtcccgcgaatcgtggggcatcggcgattacggcgatctgaagctgctgctggcggacgcggccgacaagtccaaggccgacttcatgctcatcaacccgattcacgccggcgcgccgattccgccgcttgagccatcgccgtatctaccggaatcgcgccgattcctcaacgtgacgtacatccgcccgcaggacatccccgaatacggcacgctgccggccgatatccgagcgcaggtggatgcgctgcatgattcagtggccgcacgcaacgacgaatcgaacccgatggacatcaacgcggcgtgggcggccaaacgcccggcgctgcgcctgatcttcgacgcgggccgcaacaacaagcgcgagctcgaattcgagcatttcaagaccaccgccggcccagacctcgattccttcgccacctggtgcctgtgcttcgaggtatggggcgcgccgtggggcgagaaccgttggttcttcgagaagaccatcgacgacccggccgtgtgccagctcgtcgaggagcaccacgacctgttcgagttcaaccgctggctgcagtggattgccgccgagcaggtgaacgccgcgcagcaggaggcgctggaccacggcatgacactgggtctgatgcaagacatggccgtgggcgtgcacgggctcggcgcggatgcctgggccaatccggaacgcttcgcctccggcggcgtcacggtcggctgcccgccggacttctataaccagcagggccaggattggggccagccgccgttcaacccacgctatctggaggccaccggctaccaggtgtaccgcgagatggtgcattcgatgtacgagcacgcgggcgcggtgcgcatcgaccatgtgctgggcctgttccgcctgtggtggattccgcaggggctcggcgccctcaacggcgcatacgtaacgtacaaccacgaagcgatgctgggagtactggccatcgaagccacgcgcgccggaggcatggtggttggcgaggatctgggcaccgtgccggattacgtgcgccgcattctgtccgatcacggcgtgctcggcactgacgtggaatggttcaaccgcgtggacgattcgccgaacgccggcgacccgtaccgtgcacccaaggactatcgcaaacaggcattggcctcggtgaccacgcacgatctgccacccaccgccggctacctgaacttcgaacacgtcaagctgcgcgaggagctgcatctcctgagcgagccggtggaggcgttcgccgcctcggcgatggccgaacgcacggctatgatgaaccgtctggtggagaacggctatatctcacagaccgtggcggatgatgtggaaggccatgtgcaggagatcgtggaagcgatgcacgccatgctcaccgatacgccgtcgctgctgctgcaggcagcgctggtggacggcgtgggcgaatgccgctcccagaatcagccgggcacttccagagaatattcgaactggcgcgtgccgctggcggacagctcaggccacgtggtacataccgacgaggtcttcgacctgccacgcgtgcagtccctagccgccgtgatgcgccgagagaagcggtgatcgattccggcaatgggaaattggtctaaatcggcttcgaggggctgatttggcctttcccggacatccacttccgcttcaaggggctggcgcccaagtagacccagcgcgagaacggcggaatgacgttggcacaaagtcgtttgcacttgtggtttcaccggcaaggagccccttgaaacggaagtagatgtccggaatgccctaaatcagcccctcgtaatcgagatagccgaagacggcgacttgttatgggcatgttatcgttgtcatgacaatgattgttcgcgacggtaaaggagcgacggcatatgaccaaggcaagcattcaggcagtggcccgcgaggccggcgtttccgtatccacggtgtcccgaaccttcgccaagccggatctggtgcttcccgagactcgagaccgagtgatggccgcggccgaaaagctcgactactcagtctctcgctcggccgccgccctgaaatccggccaatcgttccgtatcgcattgcttgccagcgagaccatcgccagctggttcaattcgaacatcttcgccggtcttgactcggcgctgcgcccctccggctacgacactgtgccctaccccatgcgtaacgccgccgagcgccacgacttctttgcggatttgcccgtgcggcgcaatgcggatgcggtgattgtcagctccttcgacatcgaaccggctgaagtggagcgactgaagcatatgcacgtgccgattgtcggcatcaacatcccctccaccgatgggttcgacgcaggcgtgagcattgatgattacgccgccacacgttcggctatcgagcacctgattgcactcggccaccggcatatcgcgttcgtcggcagcgcaccgaccaaaaccaatatgcgctacagtaccgaggctcgtttgcagggcgtcattgatgccgctgccgcccatccggggatcgagctaacgcccctgagcattcaacgcggtcttggcgaaagcaacgcggcattgaacgccgtactgaacgcctcccccagcatcaccgccttctgttttgaggatgatgaaatggccgcgcccgtgctgtatcgcctgcgtcaatacgggcggcgggtacctcaggacatttccatcatcggcttcgacgattccaccctgtccgccgccgtgggactgaccacgctgcatcaggacccgttcgcaatgggcgcgactgccgggcacatggtattggatgccattgccggcaagtcaatcgaaccggcattcgtacggccggacactccgctaatactgcgcgaaaccaccgcgccgcctgccgcgacagcagcgcccgcgcaggcgtgaccacgttaccaccgcaaaacgccgataaatcgatttttgcatgtgtaattcacatgatatcgttgtcatcatcaatacaacggtcgggccttcacacagcagttcggccgcgaccggaacaacccaaccacaacgcacccggaacaggagagaatcggcatgaccgcaaataacctcaatgacgactggtggaagcaggccgtcgtttaccagatctacccgcgcagcttcaaggacgttaacggcgacggcatcggcgacatcgccggcgttaccgagaaaatggactacctgaagagcctcggcgtggacgccatctggctctccccgttctacccctccgatctggcggacggcggctacgacgtgatcgactaccgcaacgtcgacccgcgactgggcaccatggacgacttcgacgcgatggccaaggccgcgcatgaggccggcatcaaggtaatcgtggacatcgtgcccaatcacaccgccgacaagcacgtgttcttccaggaggccctcgccgccgagcccggctccccggcgcgcgaccgctacatcttccgcgacggccgcggcgagcatggcgaactgcccccgaacgactggcaatccttcttcggcggcccggcctgggcgcgcgtggccgacggccagtggtatctgcacctgttcgataaggcgcagccggacgtcaactggaagaatccggacatccacgaggagttcaagaagaccctgcgtttctggtccgaccacggcaccgacggcttccgcatcgacgtggcgcacggcctggccaaggacctcgaatccaagccgttggaagagctcggccgcgaatacagcgtggtcggcgtgctgaatcatgacttcagccacccgctgttcgaccgtcgcgaggtgcacgatatctaccgcgaatggcgcaaggtgttcaacgagtacaacccgccgcgctttgccgtggccgaggcgtgggtggtgcccgagcaccagcacctgtacgcttcgatggacgagctgggccagtccttcaacttcgacttcgcgcaagccaactggtatgccgacgagttccgcaaggccatcgccgccggactcaaggccgccgccgaaaccggcggttccaccaccacgtgggtcatgaacaatcacgacgtgccgcgcagcccctcccgttacggcctgccgcagatcaagggcgcgccctaccaccagctgccgcacgactggctgctgcgcaacggcactacctatcccgaggatcgcgagcttggcacccgccgcgcccgcgccgccgctttgatggagctcggcctgcccggcgccgcctatatctatcagggcgaggagctgggcctgtttgaggtggccgatattccgtgggatcacttggaggatccgaccgctttccacactgctcaggccacgatggacaagggccgcgacggctgccgcgtgccgctgccgtggaccgccgccgatgagccggccttggccgacttcagccgtccgactccggccgatgacggtaccggcgagaaccatgtgccgctgtgcgccgccggccagttcggcacgggcgcttccttcggcttctcgccggctacgcgcgctgagggcgtgacgccggccgccgacccgcacctgccgcaaccgctgtggttcaaggattacgcggtggacgtggagcaagccgacccggactcgatgctcgcgctgtatcgcgccgcactggcgattcgccaggagtcgctgaccgccacgcgcgacaccacggccgagcaggtggacatgggcgacgatgtggtggcgtacacccgcgcggcggttggcgggcgggtgttcacctcaatcaccaacttcggcaatgccccggtcgcgctgcccgatggctccgtggtgctggcgtccggcccgctgacccccgaaggccagctccccaccgacacttctgcgtgggttatcaagtagagcttttgcgagcttacccgacgccagtcatccatcttctccggatgctggcgtcgtcctttttcccggctaagctgtctccatttcggggatgactgccctttctttccattcgcgacatgccaaccccgaaatacttaataatattctatatacttaacaagagatgtgaatcttacagattttcgttaaggattgaggtcgacatggatgccgagcattacattcgcgagacacttggtctgccctgccaaatcacttcttgggatggcactgcctcactgccgctatttctgaccaacggacggacattcagcaaactcaccatcgacaacacgagcatgctaatcgcgagcggagaggctcacccattcagcatcacacgcgtcaccgccgacgccagcaggcttgagcagcggacggatctgcccattgtctttcagtttccccggctttctgcataccagcgaaaagccttgattcagaatcacgttcctttcatcgtgcccggtacccaactgtatatcccttcactgggcatggtgttcacccagcgcatctcctcacggccgctggagaacgcacaggatatcgaggtgcgacccttctcccccgcaacacagctggtctggctgtatttgctctactccaacgagagcaaagtccaatcagatattgcccgagcgcttcagtttaccgaagctcaggtcagcgttgccgtgacgctgttagaacagctggcattcgtgcaccgcaccaagcaaggccgcagcaatagcgtcgaactactgacttcaaggcagaccagccgacttgatttactgaaatcatcttggcatctcctgaagtcaccaatattcagcaaatataccgtcacgaatcgcaatcgccagatgattgccgacgagctgattccggccggcgaatttgctctttcgcgcaggacgcaactggccaccccaaaactgcgaatctatgccgttgaacgtcattggctcaagcagcacaacaaggaactatgcattatcgaccccgctttggaaaaggtgccagataatgcatatattctggagctgtggaggtacgatccccgcctacttgctcaatatacgcaggaagactaccttgccgaccccatttccacggccctgactcttggcgagattgccgacgaacgtttggaagacgccatacaagaatccatccgcaatactttctcaggagcgacaatatgacacaaggcctgcagctcatcagaacggcctttgccggctacgaagattcttacgtaatcatcggcggcaccgcttgtgacatcatcatgaccgacaacgacctggacttccgagccaccaaagatattgacatggtgctgattgccgagggacatcttcgcgagtttgcacaacgattgtggtctttcattcgcgatggcggatacacctctatcacgaagaactccgcacagcctcacctgtaccgtttcatgcaccccagtatgtacgggtatcccactatgatcgagctattttcacgtcaccctgacttccccattgtgccgaactcgttcctgacgccattgcatattgcaaacgacgtttccagcctgtcagccatcatgctgaacgacagctactatcggctattgcagcaaggccgcgaatcaatacaaggcatcagcgtgcttaacgagaaatatctcattcctttcaaggcgaaagcatggttggatctcaacgcccgagaacaacatggcgagcacgtagacggaaaagatctcaagaagcataaatatgatgtattccgtttggctcaactacttgctccagaggatcgcgtgtctctcaacgacgaggcctaccatgatctcgctgattttcttggggaaatatcccatgaaacgcttccgatgaagcagctcggcatacggggaacacagcaaggcatcattgatttgatagccggcgtatatcaactgtctatcccaccacgcgatgaatcttctaccacgatgtcagcgtaattttgtattccgcggaataaagccgttttgcgtcaccacgtggtgggtagtttgctacgtcgtggggattttactacgtggtggaggtttgactatatggtgggaccatgcgaaaggccgccgttccgaatgaatcggagcggcggccttttggtacgtgctgggtactctcctcaggcgcttatgcgccagcgggagctacaggggctcactgaacctgggcgcgggcgatcttgccggtgaaggagttggcctcgtcggcatccttgacgccatccttgttccaggagaacatggcgcgcagcttcgggccgacggtctcgatgcgctcgttggagtacttctcctgcagttccttgaagtgcggggcgccggcatcctgatcgtcgatgaactccttggcgaaggagccgtcctggatgcgctgcaggtggtattccatgcgcttgcggcagtcctcgttgatgacggtgttgacgtagtcgccgtactgagcggtgtcggagcaggaccaacgagccttgttcaggccgccctcgttcatcagatcgacgagcatcttgagctcgtggcagacctcgaagtaggcgatctccggctggtagccggcgtcggtcaggacttcgaagcccatctcgacgagcttgttcacaccgcccatgagcacgttctgctcgccgaagagatcggtctcggtctcttccttgaaggtggtcttgatggcaccggcgcgcagagcaccgagggccttggcgtaagccagggtcagagcccaaccatcgccacgcggatcctgctcgacggccacgacgaccggcacgccacggccagcggcgtactcacgacgaacgatgtgacccgggcccttcggggcaaccatgaacaccgggtgatcctcagtgggcttgatgtagccgtagtgaatgttgaagccgtgagcgaaggcgacggcggcacccggcttgatgttgggctcgatgtcgttggcccagatggtgcgctggtactggtcgggggccaggatcatgatcacgtcggcctcggcggaagcctcggccacggacttgacctcgaggccctgctccttggcgaagtcgaccgacttggaggtcggacgcaggccgacgaccacgtcgacaccggaatcgcgcaggttcagcgcgtgggcgtggccctgggagccgtagccgatgattgcgaccttcttgccttcgagaacagaaagatcaccgtcgttctcataccagatctgtgctgccattattggcactccttttcagtagtggggtgtggcgccgctgggcgccggggtatctacggtgtgcagataagtcctgtgttgcgaggattgtgtccttcaaaccgaaatcaatcctaccgagaacgccgtcacagccccgctggagtccacaacgtgagctaggtcactattggagtatggacagccgtgtgcagagaacgattctcgataacaactctgcacccttttgaacagaatcgcacaatcccacatatggggaaaggctgagatatcaacgatcttgcatattcggtgttcgtttgcctgcaagaaatcagcgcacagttgttattgagaatgattcgctgcgcgcaacaacacaaaaccgccgctcccgtatgggcgggaacggcggtttgctagcttaaatccccttcaggggcggcaatcactgaacctgggtacgagcgatcttgccgttgaaggactcggcctcgtccttgtccttggcctcggcgttgttccaggagaacatggcgcgcagcttcgggccgacggtctcgaggtgcgggtgagagaactcttcctgcagcttcttgaacttcggggcgccagcggcctggtcgtccatgaactccttggcgaaggagccgtcctgaatgcgcttgagctggtactgcatgcgcttcttggtctcctcggtgatgacggtggaggtgtagtcgccgtactgagcggtgtcggagcaggaccagcgagccttgttcaggccaccctcgttagccaggtcgaccagcatcttcagctcgtggaagacctcgaagtaggcgatctccggctggtagccagcctcggtcagcacgtcgaaaccgaggtcgcacaggtggttgatgccacccatgaggacgtcctgctcaccgaacagatcggtctcggtctcctcggtgaaggtggtcttgatggcacctgcacgcagagcgcccagagccttggcgtaagccaggcacagcggccaggtcttgccgtccgggtcctgctcgacggcaacgacgaccgggacgccacggccagcggcgtactcacgacgaacgatgtggcccgggcccttcggggcaaccatgaacaccgggtgatcctcggacggcttgatgtagccgtagtggatgttgaagccgtgggcgaaggccagggcagcacccggcttcaggttcggctcaacttcttccttgtagaccttggcctggtactggtcaggcagaaggatcatcacaacgtcagcctcggcgacggcctcgccaaccggcttgacctcgaggccctgctccttggcgaactcgacagacttggaggtcggacgcaggccgacgaccacgtcgacaccggagtcacgcaggttcagcgcgtgagcgtgaccctgagagccgtagcccaagatggcgaccttcttgccatcgaacacggacagatcggcgtccttctcgtaccagatagttgctgccatttttggcgctccttttatttatttgtttatgggggtgaaatctttaattgttattgtgctctgctggttctgcagaaactgtttttagttttggctttccttgtgggcttttccgatatgcaggtttagtcctgttgcaccggaaaagcctcgcaggggttcacttcgtggaattgagatttttcacgttgtgaacttggcgatatttagttatggaggatttcacttggtaaagtcagcgtccttcgtctcgcggcaggtcaggaccgacaccaggcagcacacggccatcacggcgagatagaggcccacggagtgaacgccccaatgggagctcagccaagtggcgatggtcggcacgaacgccgcaccgacgatggcggccaggttgtagccgatgccggacccggagtagcgcacgttcgcctcgaacagttcaggcaggaacgcgccgatcgggccgaaggcgacgcccatcagggcaaagccaacgcacaggaacaccatgttggcgaggaagttcttctggccgaccagaccaccgtccagcaggaacgggaagagcacggcgaacacgacgagtgcgcaggaggagaaggtcagcacgcgcttgcggccgatcttgtccgcgtacaggcaggacagcacgatgaacagggcgaacacgcagatggagatcatgagcatgagcaggtattcctggttggtgaagccaaggccgccgccgccttcgccctgctccttggtgccccaagcgagggaccaggtggcgagcgtgtagaacagcgtgtaggtcacggccacgaggaaggtggcctgcagcacctgacgccaagacttgcggaagacctcggtcagcggggacttgacgaccttcttctgctcctgagccatacggaagatcggggtctcctccatgtgaacgcgaaccacgaggccgacgatcaccaggatggcggacagcaggaacggcacacgccagccccaagccagcatcgcgtcctgattgttgaaggattcgagcacgaagtaggtgccgttggacaggaagaagccgatcggggcaccgagctccgggaaggagccgtacagtgcgcgcttgtcttcaggcgcgttctcggtggcgaccagtgccgcgccggaccattcgccgcccaggccgatgccctggatgaagcgcagcaggcagaggatggcgactgcgccaacgccgacctgatcgtaggtgggcaggcagccaatcaggaaggtgccgacacccatggtcatcaggctgacgaccagcgtggtcttgcggcccatgcggtcaccgaagtggccgaagatcagcgagcccagcgggcgggcgatgaaggcgatggcgaaggtcagcaagctcatcagcagtgcgacggtggggttgtccttcgcggagaagaagatgtgcgggaagtagtttgccgcggcggtgccgtaggcgtagaagtcatagaattcgatggcggtaccgaccatcgatgcggcgatcacggtcttgaccgaatcgcgtaccaaggtagcggctttacctgccgcctgccctaagccagtctcttcgactgctgcagtcattgttactcctgttttgctctcgttcactctcattggcgggcgattatttcgtctcacagggaggttgttgttctgttgctgtgttgttgccgtgtactgtccgctaccgtttccgtctgcgggattctgccgtaagccttgtgagcgcaacaaaaaaagccccgcatcttgcagggccttaccgattgtgtcagcttgattggccctgccttcgttgacggggcttcaagcatcaatgccgaattagtccgccagcgaagacgggctaataattcgtgcggatacaaacgcagaagcattgaatccagtcatcgcgtggcctcctttcggtatttcctcaggccgttcgacctgaactggaatgtaaacataggtttggctgtcttgccaatccagcaagggttcacattgtggacgccacgtcgccgagacgaacgcccccgccgcggggaggaacgccgccggcggccggggagccggaccggcccgtcattgcgcggactcggcggtgagggtgacgattccggccagcagcaccatgacgatggcggacgggaagagcaggtaatagccgaagctgtgctcgaaggcgttcaccagtaacgcgccgatgatggcggcgagcgccagaccggccgagttggcgagcgcataaatgccgaggtcgtggccggctcggcgcgggtcgggcaaagagtccatcaccagttcaaggcctaacgcatcgtagacgccgaaggcgaatccggagatcagcgcgaagagcagcatgccgttttcacgggcggtgccggtggaccagacgccgagcccccatgccaccgccacgccgatggcatacagcaggcaggatgccgccaccactgcagtggtggcgatgttccgttcctcgatcttctcggagatcggcccagcggcccaggacgcg

SEQ ID NO: 2086 - DNA, 5902 bp, Unknown
  R51_24m  MAG No. k141_437
caacaacatcctttactcaataagctgcgggcagccggcatacctcatgctggaacagtgatgggagctggttaagcgcagtgaaccacggtggtcaaatccatggggtcagagtcaccagaaccatggtcactgcagaactgccaaagcagtaacccgcgttatttgatatctgatatccgcttttccggtgatgatgagaccgccgatccatgcggcggcagcccaggcgatgagaatcaggccggactgccaccattcgggaatccagtagtccggtttaacggcttcggccagtgtggactgcgcggagctgctgatgcctgcggcgagcaggatgccgacgatgccggcggcaaatgcgaattaatgccgcggcgatggatttggtggcgtagatcatgcctctaatgtggcccatattaggcagatgcggcaggattgtcggcgcatggctacacgcctgatacggcgtgttgggcaatccatgcgtgcatggccacggccgccgcagcgcctgcattaatggagcgcacggaaccgaattgagagatgtagaccacatcgtcggccaattcgagggccttctcgctcaatccggggccttccgcaccgaagagcagcaggcaccgcttggggaaggtataggtttccatcggcactgcgccgggaatgatatcgagggcgatgacgcgggcggcttgaagctccttgatgcgcgcatcacaagcatcgatttcggccagcagctcatgaaggtgcttgttgtctccatccacagccacatcatgcgcatggatggcggcggcaccggccttggctcgttcataggcgatttcaccggcgatgcgatgatgccagctttccaccagttcggcgatggaggggtggtgttcgacgtgctggtacagttcggtcatcaacgcgcccttgcgattccacttatgtggaccgacaatgtgtacgcgcttggcctggaaggcgttggcggtgcggaccatggaaccgatgttgaaatcgtgggtccagttttccaccgcaacttcgaagtcatgacgccctcgagcgtcaagatcggccttaatggcagcgacggtccagtagcggtaacgatccaatacgttgcggcggtcgccgtcattcaacagcaccgagtcgaaacgaccgtcataattcggagaagtcggatcgtcgggacgaggctcgccgggatgggtctcagaccacggcccaaggccgatttcacggaattccggttcacctgaagctttggcagccaaagaaatctggttgggtgcgtgcaatctttctcctcgataacgctattcaccggttcctcttagtcaacttcgcggctcagcccggctgactttatgcgagggaagtcaaaggtggatttaccgcagttcggattcgtcgaagacctggatgaaggggagcgtttgctcgtcgccggtggaggggttgaccacattgatgtctttggcaccgccaccgaccagcgaggcgatggccacgaccttggcacccagctgctccactatgccaaagtcgaggctcagctcattgccgttgcgcagggtgaccagcgagctggtctgcacgtacgacttttcggacagccaagcatccaacagcaccacacggcggccttcgatggaggggcccttgatggacgggtagacgaagtccatcacgaatccatctaggtcctcgccacgagaggcggcggcctggatcatggcggacaccatgggcacagatgctgcggtcaaggcaccaacagcatcgaagtcatcaaccgaatagcccgcatcttccaaagcgtcaatcagcacatggcccatgacggtggcggcacggtggtcaaaagtcaccgcggcaagttcggagaacggacggcccaccacatgctccctcagcaaggtggctagctgttcacgcggctccagcatggcaaagtcattatggctcttcgcgacggcgaggtccggggtaccagtggggcggaatccagattcagtcatgactccagactatcgcctgaggcagtcagatgagtatcaccctcatcggccggcaccacttcaggggcggacagttcgctcacattgcctttatctgattcgatgatcggtacttcctcgatgatcttggtcggttcgattttttgcagcttgcgagcggtgagcaacacacggcgttccaaactggacgcgaacttgttgtaagcgctgactgtcttggtgatctgggtgcccaatttgatggcataatcacccaacgtggagaaccgttcgtaaagttctcgggacaaatcgaacagctgcttggcgtcatcggtgagcgactgctgctgccaggcataggccacggatttcagcacggcccacagcgtgaccggcgaggtgagcgccactttgcgagagaacgcatcatccatcagtgtggggtcggcttcgagcgcggcctgcaacagcgcctcattggggatgaaggccaccacaaaatcgggtgccacatcaaaggcattccaataggccttttcgccgagagcacgtacatgctcgcgcaacgccttggcatgggctcgcagcaaatcatcgcggcgggcaatatcctcggggctggcggtgtccgggatctcgcaggcacgctggtaatcggcataaggcactttggcatcaatcggaatggtcttgcctcccggcagatgcacgatcatatccgggcgcaacgtacgtccatcggcatccgtgaccaccacctgaatgtcgaaatcgacatgttccagcaatccggcggactcgacaatgttcttgagctgggcctcgccccacgcgccacgcaccttgttgttgcgcaatgcggcggacagggaactggtctccttgtccaaacgggcctgctggtcgttgagccccttgagttgggctcccaatgcgcccatttccctcttgcggccctcttcgatctgcgtgaccttgttctgcaaggtatcaagattcttggccactggcgcaagcgcctcgagtaccttgctctgttctttcaaacgtgcttcctgttcagcacgcttggcctcggcggcctgagcatccgcctgacgcttccgttccgcctccgcagccgcacgctcacgttcctgctgaatgcgaatctgctcagcctgctgcgcctgggcaagttgtgacttggcgaaagccaattgctggttcacgccttcaatctgagcctgtgcggcagcattgcgcgcgctaagctcagcattctcgaatcgcgcattctccagcgaggtcttggcctcctccagctcctcgcttttgacgcctcgagccatctcctgacccttatggcgccccagcacgaagccggcgaagaggccaagccctgcaccaaccactagcacgacgatgacgataaccacggttcctatttgctcaaacatggtacctagtatgtcatcgatggtgaatgacggtaaatttttaccgaattcgacggtttcaagccgttaaacggatgctcagcagctcacattggacatttggactcatcgcagtcgagcatcaaccgttattgcgctgtgccacacccgaacgccggatgtccttccatgatttgccagcgcgcatcatcatgcggcagaactcgtcacgatttgacgagacgtgcgatggccgcggaagcctccgcaagtttttcatcagccacctcgccgccctggaccgacgcctgccgcacgcaatggttgagatgatcgtccagcagcaataacgccacggatttcagcgccgagttcgacgccgaaatctgcgtcagaatatcgatgcagtatttgtcatcctccaccatctgcgtgatggcgcgcacctgcccttcgatacggcgtaatcgtgcgatgaccttggccttgtcttcgtcataaccatgcatcgcaaccccctgatacttatccgtcagctgaacacaccccattatataccctctaggggtatagggtatacactgttgttcagtacatcaggagtgggaaggaacagttatggagttcagcatcttctcgaccgtcgcggcgctgatagtggcggccgcattgacatggctggtcctgcggttcttcttcggaacgcagaaggcaacggccggggccatggacgcttccggcgaacgccaatccgcaacaatcactgtcaagggcgggtactcccccgccgtggtgagcatgcgtgcgggtacgccgatcacactagccttcgaccggcaggagaccggcgaatgcacctcgcatgtggtgtttgctgatctgggacttgatgccatgctgccgggcaacgccaccaccgacgtggaactgccggcgttgccgccgggcgagtatccgtttgcgtgcggcatgaatatggtgcatgggatgttgaaggttgagggagaggacggctcggatgagaacacgccccttcctcatcctgatgcttcgcatacggcacctaccgccgtggatgcggcggaggccgatcggcgagaggcggctgaacgcgccaatgagatcaaggcgctgacgaagctggtgattgtgggcgcggtactgacgttgccggtattcgccgtcaccatgctgcatatggccaatcccacgctggtgccgcattggatggtgaacccgtggttgcaggccatcctgatcacgccggtgatgttctactgcgggcgtccgatccacacggtcggcttccccgcgttggcgcatcgctcccccgacatgaactcgctggtctcactgggcacttcggccgcctacctgtattcgctggtgacctgcatcgccccgtgggtgttcccggaaggctcgcgcgaaccgtatttcgaatcggttggcgtggtcatcaccttggtgctggtcggccgccttctggaaaccaaggcccgcgaaggcaccggcaaggcggtgcagtcgctcatcaaactgcgcccgcgcaccgcgcacaaactcaacgccacttccgcagacaatgtggacggcatcgaatggcgcaatccggcgtatttcacggacaccgacatcgacgccatcgccaccggcgacctgctggtcatcaagaacggcgagcgcgtgcccacagacggcatcatagtggccggcgaggcgcatatcgacgaatcgatgatcaccggcgaatccaagccggtttccaaaaccgcaggcgacccggtgaccggggccaccgtgctgctcaagggcgactgcgtgatgcgcgccacccaagtcggcgcggacacggtactctcgcagatcgcggcgatggtggcccgcgcccaggcgaccaaggcaccggtacagcaactagccgataagatcgcccggtatttcgtgccggcggtgatgatcatcgccatctggacgttcgccatctgggtgtcgttgggcccgacaccgcaactggcgcacgcgctggtcaccgcggtcagcgtgctgatcatcgcctgcccgtgcgcgctgggactggccacaccgctgtcggtgacggtctcgctgggcctgggtgccaccaacggcgtgctggtcaccagtgccaaggcgctggaacaggcgcgtcgtatcggcaccgtggtgttcgacaagaccggcaccatcacgcgcggcgtggtggacgcggccgccgactgggacaagccgagctacgagcaggacacagtcaaggaaggctcgcgcgaggccatcgcggcgttgcgcgaacgcggcatccgcacggtgatgctgtcgggcgacaaggccgaggtagccgggcgcatcgcccgcgaagtcggcatcgatacggtgatctgcgaggtcaagccggacggcaaggcctactggatcgccaaactgcagcgcgaacgcgacgaggccgccgccaagtcc

SEQ ID NO: 2087 - DNA, 4327 bp, Unknown
  R51_24m  MAG No. k141_537
gaagaagcgcgtgcgccacgtcgtcaccgaaatcgagcgcgtgcgttccttcgtgcgtgccttcgctcagggcgacatcaaggctgcgggccgtctgttcaacgcttcccacgattcgctggccgccgactacgaggtcactgtccccgagctggacatcgccgtggacgtggcccgcaagaacggcgcctacggtgcgcgtatgaccggcggcggcttcggcggctccatcatcgctctggttgataagggccgttctcaggaagtcgctcagaagatcgccgacgaattcgaaaatcaaggcttccacgcaccgcgcgccctggccgcgtacgcagcgccgagcgcttcgcgcgaggcctaggacaacccggtgggttgtccggcggatgcggtcgaggtcgagccaataggcgaggccgaggtaatgctgggtcggccgtaggtcgtccgtaattgcaggaccgcgtgcgcagcgccgagcgctttgcgcgaggcctgagccattgcaagctccctctgacgagggagcttcgttttatcccgcaccaccaccatgcccgccggcgcgctgttctttaccatcggcgtcaactcgggcgttgtgctggtgttctccttcatgttcaagggcggcaaacgatacatgaatcggtaatgaacataatggcgggtgtcttccctataattgggtagtcacccgctttttgtatacgaccagggagagccatgaacaaggcaatcatcaccgtcgtcggtcaggacaccgtcggcatcatcgcacgcgtttgcacctacctgtcccagcacaacgtcaacgtgctcgacatctcgcagaccatcatcgacggttacttcaacatgatgatgattgtcgactacgccaacgcggacaaggacttcggcgcgatggtcggcaaccttgaggacctcggcgacgacatcggtgtgcgcatccgctgccagcgtgaggaaatcttcaccaagatgcaccgtatttgaggaggcccgctcagcaggccgccgcacgcgaggaggcggaaagcccggtgggctttccgctgacggagccatccttatccctctgatgagggtgaccgccaaactagtctttaaatatcctgtaaggaacaaaccatgctgaacatcatggaggtccacgagaccaatcagatgatcgagcaggagaagctcgacgtccgcaccatcaccatgggcatctcgttgctcgactgcgcctcggacgatgtcgacaagacctgcgacaacatctaccgcaagatcactacctatgctaaggacctcgtttccaccggcaaggccatcgaacgcgactacggcatcccgatcgtcaataagcgcatcaccgttaccccgatctcgctggtcggtgccagctcctgcaagacgagcgaggacttcgtcaagatcgcccacgcgcttgacaaggcggccaaggaggtcggcgtcgacctgatcggcggctactccgcactcgtctccaagtccatgaccccggccgaggagttgctcatccgctccctgccgcaagccctttccgagaccgacatcgtctgctcgtccgtgaacgtcggctccaccaagaccggcatcgacatgaacgcggtcgaactgctcggccacatcatcaaggacgttgccgagcgcaccgccgacaacgactcctacggctgcgtcaagttcgtggccttctgcaacgtgcctgacgacaacccgttcatggccggcggcttccacggcgtcaccgaaggcgacgcggtgattaatgtcggcgtctccggccccggcgtggtctcccgcgcgctcgatgcggccaagggcaaggatttcgagttcctgtgcgagaccatcaagcgcaccgcgttcaagatcacgcgcgtgggtcagcttgtggctcaggaggcttcccgccgcctcggcatcccgttcggcatcatcgacctgtcgctcgccccgaccccggccgtgggcgactccgtgggtgaagtgctggagaagatcggcctcgagcaggtcggcgcaccgggcactaccgcggcgctcgccatgctcaacgaccaggtcaagaagggcggcatcatggcgtcctcctacgtgggcggcttgtccggcgcgttcatcccggtctccgaagacaagaacatgatcgacgcggcaaccaatggctgcctgaagatcgaaaagcttgaggccatgacctgcgtgtgctccgtcggcctcgacatgattgccattccgggagacaccaccgcagccaccatttccggcatcatcgccgacgaggccgcgatcggcatggtcaaccagaagaccaccgccgtgcgcgtgattccggtggaaggcaaaggcgtaggggagatggccaacttcggcggcctgatgggctatgcgccgatcattccggtgaaccagaccagctgcgaggccttcgtgacccgtggcggccgaatccctgcgccgattcacagcttcaagaattgattcggtagggtatctgctttcagagaggtacatttggcccctcgcggagagctatctgctttcaaagaggtacttatatgcggaaaccccgggtatgagcgttggaatatcaacactcatacccggggtttctcgattgcggtacctctttgaaggcagatagcattctgcaaacgctcgaatgtacctctttaaaggcagataccagctcgaattacctttctggaggtctattcccgtttcgaggggctgattccgacctttctggaggtctacttccgtttcgaggggctggtatatatgaagaccccgagtacaagcattgatatttcaacggccatactcggggtctcgtcctttgacagccccttgaagcggcagtagacctccggcggatgccaaatccgcccctcgaaacgcaggtagccttatattcagcgttcatcactgcgcgaagctcagtgtttccgctctcgcgcctgtcggcgttcgttcggcgtcgctactcgaaggcccaccgggccttctcctcacgctccgcccgcaaaattgagctggcgccaggcttcgtagatggcgatggatgcgcagttggtgaggttcagggaacgcagggatgggcgcatgggcagccgcacttgttcggccacatgagggccctccatgatgtccatcgggtcggggatgtcgccgggctcggggccgaacagcaggatgtcagtcggcttgtattccacctcggtgtagagcttggtggcgtgcgcggtgaacgcgatgatgcgcgaattgggcatcgactccaccagattgtcgaaattcgggtgcaacaccacgtgggccatgtcatggtagtcgaggcccgcacggcgcagcttggtgtcgcgcaggttgaagcccagcggctccaccagatgcagaatcgtgccggtcactgcgcacaggcggatggccgaaccggtgttgccgggaatacgcggcgagtaatagcacaggtgcggcgtcacggtttcggtggcggcggccttctcggcggaaagcatcgcgtccaccacggagatggggttgccgtgtgcgtcggtcaccagctcgtccggcccgtaattcgacttgcgatagccgtattcgaacattttctcgactttggtttcgggattggctggattcggtgtgctctgggggttgtgttttgcctcgttcgtcatagctgctaagaataagaacgatgaacgacacagcaatttctttgcgattgggagcatggtgggaggccaatgcgcgtgacttgccatggcgcttcggacgggccacgccgtggggcgtgctggtcagtgaggtgatgagccagcagacgcagatgagtcgtgtggtgccgtattggaacgattggatggcacgctggcccgacgcccgctcactcgccgaggcccccaaggccgaggtgatcaccgcatggggccggcttggctatcctcgccgtgcattgcgcttgcaggaatgtgcccgcgtggtggccgagcagtacgccgacaaactgccgcgtacgtatgacgaactcactgcattgcccggcatcggcgattacaccgcctccgcggtgctgagctttgcgttcggcgaacgaatcgccgtgatcgataccaacatccgccgcgtgctgagccgtgtgttccttggcgtcgaatcgcgcgggggagcggccagcccggccgaacgcgcgctggcgaaccgcatgctgcccaaagacgagattctcgggcgcgatgctgacgtcgccgataatgccggtagcgccgaacataccgtgaacggcactatccgtggcggc

SEQ ID NO: 2088 - DNA, 7331 bp, Unknown
  R51_24m  MAG No. k141_761
aagacggttttattctatgcgcgcaggcccttgctgcatagagtctcgctcggataacgggaaagctttcggcgtggttatggagtggctcaagtttccgtttgttagatttttcgggcgattgttggatgtctgtctatgcgtgaatcgggtcgaaatggaagccgcatcacaccggaggcacgttcatatagtggacataaaggcggacttgggagatgtcagatgtgtctgttggggatcgtgcggtctgtggggtttgtggggtgtggctggaccgtggggtcgtatggtttttgtgacctgtggggtttgtggggtgtgtggccgcaggtcttcggcgcgcaggttaccgggttcgcggtcagtgtgcgaagtaggtctgcagaatcatcgtggtctcggtgcttaccggcaccgtgcggtggatgagattgagcagttcttcaagtgcggtaggggaagccacgcgcaccaccagcacgaaactgggggcgccggccaccgaatagcaggagacgatgccgtcgatattgttcagcttgtccgggatcgaggattcggctgagtagtcgagcggggtcacgttgacgaacgcgctgatgggcaagccgcgctgctcttggtcgatgatggccttgtatcccttgatgatgccgcgcttctccagcttctgcacgcgcgactgggcggcggagactgacagtccggtcacctgggccagttgcgcgagcgtggcgcggccgtcggcctccagcatggtgaggatgcgctggtcggtctcgtcaatcgcggtcatgatgtcttctccgttcgttgtgctctgtgttcactgtacctgttgccggaatgcgatggctttccgattttgcctggtaatttcagtagttcttcctgtgttttctgttgtgtggtggaatgtttacgtttaaagtcctaattggatgtaataattccttttgaaataagagaacgacgaaataattccattgaggagggatgatatgcagaagttttccaacatgtctctgtccgaagttgcatctgctgctgcgcctgctactatgcctgctgccggtcgggttgctgtgccgaccgccgagcccgcgagcctgtccgccgaagccctgaatatcccgcgctccggcatccgagacgtattcgaccgtgtagagcgcgtgcctgacgcgatttcactgaccgtgggggagcccagcgccacggccgcgccgcatatcgtggcagccgcttgcgaggccgcacaggctggccgcactcggtacaccaacgtgcttggcatccccgaataccgcaaggccgtggccgattactccgcctgtgtgaagggacttacttatgatcccgaaaccgagattcaagccgttgacggtgccacgattggcctgtttctggcgctgaaagccgtggtgggcaccggcgatgaagtgattattccctcgccgttcttcacttcctatgacgccgaagtgatgctgtgcggcggccgcccggtcaccgtggcgctgcgtccggagcacggcatgcgcgtgaacgcggcggacatcgaagcggcgatcaccccgcgcacccgcgccgtaatcatcaactcaccgggcaatccgaccggcgcggtaacctctgccgccgaactggcgcgtattgccgaagtatgcaagcagcacaatatttgggccatctccgacgaggtttaccatccgttcgtgtttggggaaacgttcggggaaacgcttgagggagaggcagccgtggcaccgtcgatcgccgcggtgccgggcatgaaagagcgcaccattgtggtggaaagcctgtcgaaaacctatgcgatgaccggctggcgcatcggctacctgctggcacccgaagcggtcatcgaacagaccggcaaaatcgccgaactcatgcactcctcggtgaactccttggcgcaatacgcaggcgtggcagcactggctggcccgcaagataacgtggccgccatgcgcgaggaataccgcgccaagcgccagatcgtgctggacggtctggccggatgcacggtattgcgtctgatcgaaccgcaaggcgcgttctacgcctttgtggacgtacgcctgactggccttgactccggtgaattcgcagaccgtctgctggacgaagagcgcgtggctgtggtccccggcgaggccttcggcgaggaggggcgcggcttcgtgcgcctctcctacgccggagatgccgacgagctgtgcgagggcgtcgcccgtctgcgcgcattcgccgaacgggtatggaaccccatcaccggccaccacaccgccacctatcaccccatggaggtgctggcctgaggcttaaagcgaggctaggccgccattcggcctcgtcggcgcgagcgatggcctgcttcttggctcgcagcaagatgtagccgagtaccagaacgttggccagagctcgatgttggcatcgcgtcaaaacaaccgcattaaggctgccgcgtctcgtatcgttacgcgtaggggctggctgaggcgtaatgctgaagagtaacattgaagcgatggcaatcaagccgatttgagggagagaggcacacgatggcgtactgcggccactgcggaaatagagttgatgggccggcacgattttgcccggcatgtggagcgtctgtagacagcgcaccagttgcgacggcaccagtaccggccgcatcgccagccgtaccgcctgcgtcgataccggcacctgctgtgccggcgtctgcggtaccaccatcgataccagccgcgccggttgccccatcggtttacgccgcgtccgctgccccacagccggcaccaaccgttcccctgccggctttgccgattcccgctcctgccgcatatcaggcgactgatgcaaccgccgtcctggcaccgcagcgcaaatccagcaagaagctgatcgccgctctctgcgcattgcttgcgacgattctggtggcggccttggcgttcatcatccccaacttcaccgccgtcaaagcgatgctgggcttccggcccaccaatccgctggtcgtcaccttcgacgcgatcaactcgctgtccactctgcgcagcaccaaatacgaactcagaacccacagcatcactgacgattctcttgacgtgcggatgtctggcatgtattcgctgggcaaaaccaccaacgaatcctccgcgtccttcactagcaaaacagacgaatatgcaacgaccttcgcttggtacaaaggcgcattcgccgggaaatccgtttggcatgacgacgacccctactacatctactacccggccgaccaatatgaagatgacttaaggaacggcgttggtagtgatgtggcggacttgatattgaacgtcaaggatgcgttggtcaagaacggtgcttgggacatcaccggcgcggagcaaacgttctacgatcagctggacaagatgaacgacgatgggtactcgaacgacatcgaccgggtcaagggcacgaaaacgtctgccgaggtgaaggccgaggccagcaaattcatccaacaatatttcggcgtggagctggaagataagaatgtgcgcagccagctgttcccgaagacatcgtctgccaagtctgccggcaatacgcagctgtcgtaccaaatcgatatcaaagcgttgtctcagcatttcgtgaattactggatcagtcatgaagcgcagtatccgcatctgaaatcctgggtgattcagcaaatcgaggatgccggcgtggacgatgctgaagatgagtaccgtcaggcgctcgataatgtgcgcaactgggatttcggcacggatgaagagccggagatgccgactatcaccgtggatctgaactacggcagaaagcgtctgatgaattcgattgccataagcgtgtccggcaaggacgaatacggcgactcctataatggctcgctatcgttgacgctcagtcagcagaacgcggtgtctgtggacgaccccgatttgactgatatggtgagcaaagccaaggacaacaacggactggatttgtcctgaatatggtgcgtgggatgttgcggcggcgctaatttcctcggtgggctatcacgcactcttcccgcttgcagcggtctgctcgctgattggcgcggtgctgatcgtcttcatcaagtcagtgaagtaaacatacttattcatccctcttccttccataacaaacgagcggaggggttgggccattgttttgcggtgtgtccagtctctccgctcgtttatttgcttgattctgtggaatggaaggggcatgctctatgtcaaataagataatgcggaagggctgttctgcgtgcatatatcttgctgaacgtatttgagggtactttctggttaaagacacgccctatggtgggcagaatgctgccgttgtgtctggcgtcggtcgcaggacatgttgtatcatgagggcacaagcttaattcagccgtcctcaatctgattagtcgtcgggtcggattggcgtgatcggcttgcagggaatcatccggctcttccggttttggtgtgtagaggggatgcttataggtgggcttgtatggtgtgtctgaagccgccggtgtggaggaggctgcgggtgacgtagttgtcgaggttgcggaagccgagggcgatgccgcgtagggtctcgggcctgccgttgatggcctcggtgggaccgttggcggtgccgtgggcgcggtcgtcggatcgatcgtccccggtgccggcaccgtggtcggcgcatttgtcggaacggcgattggcactggagccggatggctgataagtagcggcttagacgcactttacgacaatcaggtgcacagaggcggtggagatgacccgggcagtcatttcaaggataatctcgggttttggaagtgggggtatctgttggcgttgttcactcggtatgtgttggtggggcgtcttgaggacggggcgcaggtgttctgggacacgctggagaagacgccggtcaagcgcaagctggatttcggcggcgattccggctgggcgcgggctggcgcggcggccggcggcgctgccgccgcggctgcgcccggcctgatggtcatgatccacggcatcgcccggctgctcaccccggacacgaagacgcaccacacgcataccgatgacgtgacgctgctggcttttctcagaccggtcactatatcccgcgacgcatggaacacgtacgtggcggtcgccgtgatgtggctggccggactcctcctgtactggggtttctgccggctcgtgttcggccggccgaacacctacgtccccgcctcgctggaggacttggcattcgcctcctccgtgcccgccacgaagctgcgctacatgttcggcggccccatcgtcggcacgctgttcctcatcgcgatatcgggcttccccatagcgatgacatggatgttctggtcgagcgcgcaatgggtcgacaccggcagatccacacctgactggattggatggttggctttcttctgggcgttcctcgccacatgctccccgattctgttggccttgcgtttcgtcggaccgtgggactggcggggacgtttcagcccgcgcgcgggcgccgaacgctggagccggctgaaatgagcacactgctgatgggggccgggatgggcctcatggtcgcaatctcgctcgcattcatcctcgcgttcaacatgtcccggctccgctggctcatggaccacgacatccacccgctgctcgaggagcacggactgcgcgaacccgacgacgggttcacgtcctccggcgccaaggagcgcatggccgcgttccactcggacgtcgcggaggcgctggcagcgccggaacgggaacgcgaagcgagggaacggcgacgattcactgtgttcgacccgacggtcgacaagttgccgctgccggcgggcccctacccgttcgaccgtccgacggcgtcctgggcacgcgacatctacgaggaaggcgattgggcgtacgccgacgcatgggtcagggggcggaggaagccacgcgtggtgcgcgagcaacgctacgactcgtggcgcaacgaagtcctcgcccgccacggcctgaccgacgcgccatccgccacgctcgaacacatcgaacacgccgctgcacgcatccgcgccctccaccacaccagcccagccgaagcctacaaacaagcctgcaaggaagccaccggcaacacggtcaacgacgaaaccaccggagaaggaaaagaaaacggctcttccggttttggcgtgacccgcagcctcctccacaccggcggcttcagacacaccatacaagcccacctataagcatccccctacacaccaaaaccggaagagccaattatctgccggtaccttccacccgagaggaaggtgtagtcctccgggtccgggcgatatcgccgcaaggcgaaggattttcgtgtaccgttccgtgaagacggagcgacaatgaccacgcggttggtctgaatcctcgaggggtggtccttaacaggaccacccctttttcgatggagagggccatggcggactgggagaatccctcgaacaagaacgcaaaaaccctcagaatcggtattattccaagggttgtctgtggagctagccgggttcgaaccggcgaccctctgcttgcaaagcagatgcgctaccagctgcgctatagccccgtgagaaaaaaagagcggctcgcagccgcttcattttttctgtgggcccgggaggacttgaacctccgacctcatccttatcagggatgcgctctaaccagctgagctacgggcccgatccatacgcttcaaaagcgcacaagtaattacaataccattgaacggcggtatgtcaataacggcgtgtcgtgattgtcgcttgcgccatgattgccggctcgacggtcaatgcccagcaacgccacagccaatgcccagctacgtaaccttgcgttctcacaccgtaatgctgcggttacacctccctctctgcgcagaaatgttcaatacatatgaggcttctgctgttttcgtgggttgggttcttggttgtggtgggcgtatgtcgagtccgccgcggcggagcatgacgagggcgatgggattgttcgcgtggtggaagccgtaggccatgcggatggtggccttgatcctgttgtcggacgcctcgagcctggcgtttgaacagcccaattcgattgtcccgaggatgtcgggcccatgacggcggatctttcgggcgagttcgacgatctcggggatgcggctgtgggacgcccggaaca
